United States Patent Application Publication US 2004/0123343 A1 - sequence listing, part 25

SEQ ID NO: 69398 - DNA, 387 bp, Oryza sativa
  Clone ID: PAT_MRT4530_7006C.1
atggatctccgccggccgccgcgctcgtcgtcggggggcgtggagcccaagatccggcaggtggggttcgtcacccccgacgcctcctcctcggccccgcccgccgagccccccgccgccgccgctgcagcggtcgcggcggctgctgctgccgcctcctcggcggcggccgcggcggcgcaggcgcaggcgtcctccgaggggtcccccccggcgtccgagctctccccgggctcgctctcccccgtcatgatcccgcccccgcgccacgccgaccacctcgccccaggctcgccytcccccgcggcgtccccctccgagctgggcgacgacgagtcctggtcgcgggcgccttctgccgccgagctcggtagctggcttttctag

SEQ ID NO: 69399 - DNA, 1669 bp, Oryza sativa
  Clone ID: PAT_MRT4530_70070C.1
ctagttcacccctccgtttcgctcgtcgaccgccggagcgccgccgtccccgtcgacccgagccgcgccgccgccttcctccgctccggtcgccgtttccgtcgtcgccgtcgacccggggtgagccgtggaccgccgcttcgtttccccctttccctcccctctctcgggcgccgctccaccgtacctatggccgccgccggcgaccataggggcgcgggcgcgccgcctcccgccggccgcgccgccgtggccgccttcgggcgcaccgagcggctgccgcgtggggcccggcattcctcctgcaatggtgagcccgtcaggaaaccgtagcagctgcgcctcaacggggcaggtaggatcacagagcatggactccatgcaaactcaggatgaaaccacttgccccgttgatgagatcacgtagcggacaccatgtgagctacatatttccttcaagaacttatcagtcaagataacctctcatcacgtgaaggtggcatcaggaatggccatcccaactgacccttcagggacttaccactgcaggccgattccagcaggatactcgagggtcgaagttgagctggtggaagacgcttacgaggacctcgagttggactaccctggaggagacggtgagacgcatctacgagactcaagccacgccattatactatggcgcaagcggtacatcatccaccctgggcgacaagcagcgtctcgtgcaccatctcctccggctccgccatctcctccgctacctcctcctgcaccatctcctctggctcctccgtcacctcctcctgtaccatctcctccggctcctccggctcctccgcctcctccacctccaccatgtccgcctgcacctcccaagacaaggtctcgtcaagctccaccgcctgcccgcacaagggcaacgaagaaggcaaaagttgacgccaccaaaaacaaggagccgctgtacaattgcagtcaagaggagcttgacgcttatgtggcagcaaaagtgaagaggcaattcaagcctcggagtcttgaaaagaagatacctattgacccgagcgtgaagaacttcttcaagaaaatgtccacaacaaacaaggaggccttaaagctatcggactatgaccgaacacttaagaaagcctattacaagaagtccaaaccagttcctcagcttggagaacaacctaaccaagagttgattagaggcgcaccaatcccgaagacggaagtggcatacaagtttgaactcggtaaaccgcttgtcacgcctgagcagctgcagtccctaccgacacagatgtacaaattccatgaatggtacatggaaatgaacgccaagggtagagagatgttcggagcgaggataagaaactccgacttcttgcaaggagaaaatgttctctggatccatttcaaggatgtcttcgaactataccatctgaacgccctgaacgtctctcttctgagcgcatggattttaatgaagattcaaaagacccgacggcggggggtttgcgatactgggttcatcgaccctcagaaaatcaacgtcgaaatgatcgacaagtacgagaaagacacagaggacaatctcgtccatctcctgacgcagcagcatttcaagacgttcatagtactgccgtacaacacagagtga

SEQ ID NO: 69400 - DNA, 318 bp, Oryza sativa
  Clone ID: PAT_MRT4530_70071C.1
atgacgtatcctcgtatcaccgtattgcgtatccgtatccgtatccccgtatcgaggtcaacgctgagttccgccgccacgcgcgtcaagcccgtcgatgccgagctctgccacttcttcaaggacgacgccgcacggcccggaggatgccgccaccgccgctcggcccggaggacgatgccgttgctcggcccagaggagaggagagccggcgccggcggagggaggaggggagccggcaccggtgaaggcaggaagggagagccagcggggaagagtggcatttgggggtggaggatttggggatttggccggtga

SEQ ID NO: 69401 - DNA, 2577 bp, Oryza sativa
  Clone ID: PAT_MRT4530_70072C.1
atggctgatcgcgacgaggaacagatactatacaatacaatcgcagagggaagcaaccagtactggaacgaagaagaggggaacgaggatccaagccagtacttgatcgaggaggggaacgtggagagggatgcggagacgaacgaggaggggaacgaggaggaggaggctagtggaagtcatccctccgctggacagaagagggcacgcggacaacaaggtgccgcgaagaaaatagagggtcggcacatcataactgaggtggacgaagacggccgacctagtgccccggcagaagcagccaagaattttgtacgccacaacggttgggttgtgagggacaacgtgcctgtcagcacggtgtactggcacagaacaagggcacgcagggataatgacagctttgtcccggaatcagagaaagagatgctgtggaccacaatgctcgagacgttcacgctacccacgggtacggagaacacagtgaaacagttgactcagaagaaaatggcagaacaattccagagcttcaagggagatctctacaagaaatacatcctgaagggactaacaccgaacttcgacgtattcccaaagctaagggatcattgggacgagttcgttgcttacaagataggccaacaagggcaagcgatgatggccagaaacaaagaaaatgccgccaagaagaagtaccatcaccacttggggtcaggcggatatagcgtcgcaatgccgaagtgggaggagatggaagcaggattaattgagaggggtatcgaaccggccaccgctaaatggtcggatcgatcaaagttctggtactatctgcacggtggaacacttaacctagttgatggctcccttggcacattccgacccgacagagagaaggacgagctgtcactcaccctacagactcccgagcatccaggacgaacacgagggaaaggcatgattccctggaagattggattcaaggaggacatccacacgtacaggagtcggatgaggagcaagaaagataccgaggcgaagattgcagatcttgagtacagggtatcgagctacgagctcagcatgcaagaggaggtggcaagaaaggtggatgaacacatggctgcacatcggtcccaggatccccaaccgtacattcctcctgcaatggtcaggccatcaggcaatcgtagcagctgcgcctcaacggggcaggtaggatcacagagcatggacgccatgcaaacccaggacgaaaccacctgccccgttgatgagatcacgcaacggacaccatgtgagctgcatattcccttcaagaacttatcaatcaaggtggcgtcgggaatgaccatcccaacggacatttcagggacttaccactgcaggccaatttcagcaggatacttgagggtcgaagttgagctggtggaagccgcgtacgaggacctcgagttggactacccaggaggagacgcaaacaagcagaagatgaagctatcggactatgaccgaacacttaagaaagcctattacaagaagtccaaactagtccctcagcttggagaacaaccaaaccaagaggtcgagccgttggtgaccggcgaagaatttggcataacggaattcatttcggacaccggtctaactatggatcagttgattggaagcgcatcaatcccgaaggcggaagtggcatacaagtttgaactcggtaaaccgcttgtcacgcctgagcagctgcagtccctaccgacacagatgtacaaattcaatgaacggtacatggaaatgagcgccaagggtagagagatgttcggagtgaggatcagaaaccccgacttcttgcaaggagaagatgttctctggctccatttcaaggatgtcttcgatctgtaccatctggacgccctcgacgtctctcttttgagcgcatggattttaatggagattcaaagggcccgacggcggggggtttacgatactgggttcatcgaccctcggaaaatcaacaccgaaatgatcgacaagtacgagaaagacacggaggacaatctcgtccatctcctaacgcagcaacatttcaagacgttcatactactgccgtacaacacagaattccactgggtcctgttattcttcgacttggacgcatgcagagtcactgtgtacgactcaatgaataaagaggagaagatttttgacaaggtcttccaaccgatagacagggcttgggatcgattccgtcaattggtccgcgggacttggaaagaaaaacttggacggaggtttcattttccatgtgcaaagcaggacaagggaactaacttatgcggctactacgtatgcgagtatgccaactgcctatcaaaccaaatatgcaccagacaagagctcgatcgtattcacatgaggaataatctcccacacaaggattttatcacagctgttcaagaacaactaatgggattgatcaacgaagaagtccttaatcccgatggtgaattctactacgacagatcgacaattcataacgtcggtccttcctcttctgacataacgccggcatcgaagtcatag

SEQ ID NO: 69402 - DNA, 2213 bp, Oryza sativa
  Clone ID: PAT_MRT4530_70073C.1
tgatttaactactaaggactgcagaaccgcgggagggttactatacaattagggtggcgagaacaagactaactccaaccatattaatggataacaggccctctaccaattacggaaaaccaagcgtcctggcaacactcagaagaaacacactgatcctgatgctattatgaatacagctgcacctgggattttacctacctcacgaaatgcaccagttagaaaagtggcagaatgtgatgtactatctgccaaacaagagtctgttcctgttgcagtgcctgccaagcaagaggttcatagtcccaaacaagagagtatcccaaaattcaatactggatcttcaagagttagccagttgatttctgtgcaacaagcaaatgattcgtcaccaaacagtaaagtctctgcagatgctaatattggcagttttgatctggcaaagttttccaagaaaaatgctcttccctgtgatatctgcatgcgatctgagactgtactgaaccggatatttgtctgctccagctgcaaggctgctgtgcatttggattgctaccggagtgtgacgaatcccacaggtccctggaagtgtgaactttgccaagagatgccatcagatgttgtcgctggcagtcaatcagattgcgacggttcaaaaccatgcttgttgcagtgcgatttgtgccatggaacatctggtgcttttagaaaaacaataaaggggcgatgtattcatgccttttgtgctgagtggttgttggagagcacgttcacaaggggacaatataatgcagtagatgggatggagagccttcccaaggataaggatacatgcgctatctgccaccgcaatgttggctcatgcttgaagtgcagtactgtggactgtcaaattacttttcatcctacgtgcgctagagatgctggtttttacatggatacaaaaacaattggtagtacgttggaacataaagcatattgtggcaagcatggcattgagcaaagaaaggctgacttactacaattacatggacctggggaggtcaagaatatgaaacagatgagggttgacttggaagtattacgccttatttgtgagagagttgtgaaaagagaaaagttgaagaaagacttggttgtatgtggacatgatacacttgctgcaagaaggaattctattgcctattcaacccggacttcatattgtggatctggacctggagcaagttcagaatctgcaacaacttctgtcaataactcatatagtgggttaatgcaaagaacagatgatgtcgcggttgacagtattatttccaggaaacctactgttaggttttctctcaataacagcgatgctgataggaacacagctgacagttcaacatcgtcaatatcgtacaagcagaagctggatgaccgggaatcacttgctgataagaatcttccgaagaaaccagctactgccatgcagatatcagaagagggtgagacaaaatcatcggataaaaagaaccaacgccctccaaagagtatcgtctatactcgacgtagcgccttgtccaaaaagaggcaattgagtcagaatgtagaaggacctggtggatagaagccaaccaaggtggctccttcgtggatagccagagtgtttgaagcattctccatgtggaaagcacatgcagccagcggagctggccagtgtaaccatgatattgccataggggcacggtcggccaaggttgtaaatttacaaacggcgcagatgggagttcttcaaagtgtgacttgagcttccgaccagaatattcgagtatttgacccctcaaggctcaagctcacatcactcagacgaggggtgacatggcagaattcatccactgatttagctactagatgctaatctgtgagatatgctttgtacaattgttagtttagttctgtaaaagaaaacaagcaattgccattagtggatgattaaagagaagcgaggaaagtcttgttaggctgacatctgtagctgacagtttcccagtagctaaccagaacatgagtgaattaagcacatgtaggttcaaatgtgctatgacgattacctgttgcgttgatgtatggctacatttgttgtgacttgtaatgaatccatgccagagtttttgaaagaaaaaaaaaaaaaaaatgctgcttcaaaaaaaaaaaaaaaaaaaaaaaaaaaaaaa

SEQ ID NO: 69403 - DNA, 2411 bp, Oryza sativa
  Clone ID: PAT_MRT4530_70074C.1
ttggctgatcgcgatgaggaacagatattgtacgatacaatcgtagagggaagcagccagtactggaatgaagaagaggggaacgaggatccaaaccagtacttgaacgaggaggggaacatggagagggatgcggaggggaacgtggagagggatgcggaggggaacgaggaggaggctagtggaagtcatccctccgctggacagaagagggcacgcggacaacgaggtgccgcgaagaagatagagggtcggcacatcataactgagaaagcagccaagaattttgtacgccacagcggttgggttgtgagggataacgtgcctgtcagcaaggtgtactggcacagaacaagggctctcggggataatgacagctttgtcccggaatcaaagaaagagatgctgtggaccacaatgctcgagacattcacgctccctgcgggtacggagaacgtagtgaaaccctggactcgtaagaaaatggccaaacagttccagagcttcaagggagatctgtacaagaaatacatcctgaagggactaacaccgaacttcgacgtattcccaaagctaagggatcattgggacgagttcgttgcttacaagacagggcaacaagggcaagcgatgatggtcaaaaacaaggaaaacgccgccaagaagaagtaccatcaccacttagggtcaagtgttgatggctccctggtcttcagcgatcagatacgcgaagctgccagtcgactaatggacgcagtggaagcctcttctcagggcacgttccgacccgacagagagaaggacgagctgtcactcgccctacagactcccgagcattcaggacgaacacgagggaaatgcatgattccctggaagattggattcaaggaggacatccacacgtacaggagttggatgaggagcaagagagataccgaggcgaagattgcaaatcttgagtacagggtatcgagctacgagctcagcatgcaagaggaggtggcaaggaaggtggatgaatgcatggcagcacatcggtcccaggatccccagccgtacatacctcctccaatggtcagcccatcaggcaatcgtagcagctgcgcctcaacggggcaggtggcgtcgggaatggccatcccaacggacattttagggacttaccactgcaggccaattctagcaggatactcgagggtcgaagttgagctggtggaagccgcgtacgaggacctcgagttggactacccaggaggagacggagaagtgaagaggcaactcaagcctcggagtcctgaaaagaagatacctattgacccgagcatgaagaagttcttcaagggaatgttcaccacaaacaaggaggccttaaagctatcggactatgaccgaacacttaggaaagcctattacaagaagtccaaaccagttcctcaacttggagaacaaccaaaccaagaggtcaagccattggtgaccggcgaagactttggcataacggatttcatttcggacaccggtctaactgtggttcagttggttggaggcgcaccaatcccgaaggcggaagtggcatacaagtttgaactcggtaaaccgcttgtcaggcctgagcagctgcagtccctaccgacacaaatgtacaaattccgtgaacggcacatggaaatgagcgccaagggtagagagatgttcggagcgaggatcagaaaccccgacttcttgcaaggagaagatgttctatggatccatttcaaggatgtcttcgatctgtaccatctggatgccctcgatgtctctcttctgagcacatggattttaatggagattcaaagggcccgacggcggggggtttacgatactgggttcatcgaccctcggaaaatcaacaccgaaatgatcgacaagtacgagaaagacacaaaggacaatctcgtccatctcctaacgcagcagcatttcaagacgttcatactactgccgtgcaacacagaagtcactgtgtacgactcaatgaataaagaggagaaggtttttgacaaggtcttccaactgatagacagggcttgggatcggttccatcaattggtccgcgggacttggaaagaaaaacttgacggaggttttattttccatgtgcaaagcaggaccaggaaactaacttatgcggctactacgtatgcgagtatgcccactgcctatcaaaccaaatatacaccacacgagagctcgatcgtattcacatgagggaaaatctcccacacaaggattttatcacgactgttcaagaacaactaatggggttcatcaacgaagaagtctttaatcccgatggtgaattctactacgacggatcgacaattcataacgtcggtccttcctcttctgacgtaacgccggcgtcgaagtcg

SEQ ID NO: 69404 - DNA, 498 bp, Oryza sativa
  Clone ID: PAT_MRT4530_70075C.1
atgaagatggaaatccatcccttcctcaatgaagaggatcttggagccttcacaaactacctttgtagatctagagatgttgatggtgatgataatggacctttacaaattgttcttcggtccttgactgataacgatgtccaactccgatatggagctggtgaagttggagatgataactccgatggggagttgacaatgcagatgatgtggtgtgataaaccagctccaaagaaagcagaggagtttcctcagctgcttgaggatgaaatggatcaagatgacttgctgctgctgacacatgctgctgcaagtctgcaactagctcaatggctgctgcttcttaatgatttgctgcttgaagacgacgaaagcagggctgctgctgttgaggatacggcggccgcgactggcgatgggatgagagctgacggcttgatggtgtggctgccggcggcggcgtccgccgccggcgcaccggggaggacgtcggattga

SEQ ID NO: 69405 - DNA, 2947 bp, Oryza sativa
  Clone ID: PAT_MRT4530_70076C.1
atggctgatcgcgatgaggaacagatactgtacgatacaatcgcatcgggaagcagccagtactggaacgaagaagaggggaacgaggatccaaaccagtacttgaacgaggagagggatgcagaggggaacaaggagggaaacgtggagagagatgcggaggggaatgaggaggaggatagtggaagtcatccctccgctggacagaagagggcacgcggacaacgaggtgccgcgaagaagatagagggtcggcacatcataactgaggtggacgcagacagccgacctagtgccccggcacaagcagccaagaattttgtacgccacagcggttgggttgtgagggataacgtgcctgtcagcaagacgttcacgctccctgcgggtacagagaacatagtgaaacagtggactcttaagaaaatggcagaacagttccagaccttcaagggagatctgtaccggaaatacatcttgaaggggcagacaccgaactttgacgtattcccgaagctaagggatcacttggacgagttcgttgcttacaagacaggtcaacaaggcgtcgcgatgccgaagtgggaggagatggaggcaagcttgcttgagaggggtatcgaaccggccaccgctaaatggcctgatcgatcgaagttctggtactatgctcacggtggaacgctcaacccagttgatggctccttggtcttcagcgatcagatacgcgaggctgcgaatcgactaacggacgcagtggaagcctcttctcagggcacgttccgacccgacagagagaaggacgagctgtcactcgccctacaaactcccgagcatccaggacgaacacgagggaaaggcgtgattccctggaagattggattcaaggaggacatccacacgtacaggagtcggatgaggagcaagagagataccgaggcgaagattgcagatcttgagtacagggtatcgagctacgagctcagcatgcaagagaaggtggcccggaaggtggatgaacgcatggcagcacatcgttcacatgatccccagccgtacatacatcctccaatggtcagcccatcaggcaatcgtagcagctgcgcctcaacggggcaggtggcgtcaggaatggccatcccaacggacatttcagggacttaccactgcaggccgattccagcaggatactcgagggtcaaagttgagctggtggaagccgtgtacgaggacatcgagttggactacccgggaggagacgtttgtgtacctcggctgattcctggacgaggattttatgcacaaataagttcggaaaatactagtgaatttccgggcgtgacaatactatggcgcaagtggtacatcatcctcccggggcgacaagcggcgtctcgtgcagcatctcctccggctccgccgtctcctccggcaccatctcctctggctcctccgcctcctcctccaccgtgtccgcctgcacctcccaagacaaggtctcgccaagctccacctcctgccagcacaagggcaacgaagaaggccaaagttgacaccaccaaaaacaaggagccaccgtacggttgcagtcaagtggagcttgacgcttatgtggcaggagaagtgaagaggcaactcaagcctcggagtcctgaaaagaagatacctattgacccgagcgtgaagaatttcttcaagggaatgtccaccgcaaacaaggaggccttaaagctatcggattgtgaccgaacacttaggaaagcctattacaagaagtccaaaccagttcctcagcttggagaacaaccacaccaagtggtcgagccgttggtgacaggcgaagactttagcataacggattttattttggacaccggtctacccatggctcagttggttggaggcgcaccaatcccgaaggcggaagtggcatacaagtttgaactcggtaaaccgcttgtcaggcctgaccagctgcagtccctaccgacagaaatgtacaaattccatgaacggtacatggaaatgagcgccaatggtagagagatgttcggagcgaggatcagaaaccccgacttcttgcaaggagaagatgttctatggatccatttcaaggatgtcttcgatctgtaccatcgggacaccctcgacgtctctcttctaagcgcatggattttaatggagattcaaagggcccgacggcggggggtttacgatactgggttcatcgaccctcggaaaatcaacaccgaaatgctcgacaagtacgagaaagacacagaggacaatctcgtccatctcctaacgcagcagcatttcaagacgttcatactattgccgtacaacacagaattccactgggtcctgttctttttcaacttggacgcatacagagtcactgtgtacgactcaatcaataaggaggagaaggttttttacaaggtcttccaactgatagacagggcttgggatcggttccgtcaattggtccgcgggacttggaaagaaaaacttggacggaggtttcattttccatgtgcaaagcaggacaagggaactaatttatgcggctactacgtatgcgagtatgcccactgcctatcaaaccaaatatacaccacacgagagctcgatcgtattcacatgagggaaaaactcccacacaaggattttatcacggctgttcaagaacaactgatggggttcatcaacgaagaagtccttaatcccgatggtgaattctactacgacggatcgacaattcgtaacgtcggtccttcctcttctgacgtaacgcaggcatcgaagtctcggaagctgtccactttgaagcaacaccctcgcggcggaggccatcgccggcgcctccagcagcgctgccgccaagacgaacatcatcatgacgagcacctccgccagccgccggccgccggtggtcctgagcgcc

SEQ ID NO: 69406 - DNA, 264 bp, Oryza sativa
  Clone ID: PAT_MRT4530_70077C.1
atggccactggggttaaagtgtgttcatggcttgttttcagtgatcctctgcttgttaccgagtccctagccctgaaccttgtcatcagtgtggaaccgtttctgacagagcagagtgtcagggcaagccaagttcttgaattaatatacgctgcatttgttgcttggttcggcagctacattgcttggtcgatgattttgggtgtgttcttgcagaaaatggctaagcaatgtttcatgatggatagttctgttaagtgttga

SEQ ID NO: 69407 - DNA, 780 bp, Oryza sativa
  Clone ID: PAT_MRT4530_70078C.1
atgattaaatttcagttcacagcagaagcaaacagaagtaacattacccatatacaggctttatactccaagggaaatatgcaactgagaccaaaaactgtgatgttgatgacagcgaccagttcggcctcttgcacacggatgtaccacactaccacatgtcgatctcaaactcgtctggcatctcgcctccgctccgcgtttgctgatggatccaaacgcgaggaaatggtgggcgcggagagggggagggggaagcggaacctggatgaagtagatcaggcagacgagccacaggaacggcgccccgaacgccgccgccatccgccccgcccacggcgaggaggaggacgaagccgccgccgccgccatggcggaaacgggcgggacgggctgctcgtcgcagtggattctagggttcgggtggatcaggaggttgagagtaatgccgaaattgctattttgtgcagagaacatttttaccagcaaaaaaggcatttcagagatcttcttgtcagcaaatgcggcaactttctggtaatccaacgagtgtcagggcggtctgaatctgatccggtagcagaagggtcaggactcaggggagaccagagaggaatcagaggaagctttcgccttacgcgttcttgtttaattacccaattattagttcaatccgcacactattgccgtgtcttgacggcattagaaattgggaccacctatacatttgtcgacaaattttctactaaaaatttgacagatgtaattatagtacaatcg

SEQ ID NO: 69408 - DNA, 243 bp, Oryza sativa
  Clone ID: PAT_MRT4530_70079C.1
gtgttcctagccctcgccctcgcctcccgctcccgccaccccgccgcgccgccctcgtcaccgccgcgcaggaccctcggtggcggcgggccatggcgtcgctggccgtctcggcgtccgcgtcggcgtcgggggaggaggtgacgcacctcgcgcagcgccaggcggcggagatcgacgagcagctcatgggcccgctcggattgagtgctctacctctcatggagcttgcggggctcagcg

SEQ ID NO: 69409 - DNA, 581 bp, Oryza sativa
  Clone ID: PAT_MRT4530_7007C.1
gtgatgatttggaagacacagaaaggtttgttcatgagttgacagtaacagctggagaaggcaacatagaaaccatgctttctgttgataaagggcttcaagaactagctttcttgaaggttgaggatgctgttcttattgctcttgcccatcatcatcgtcctaatgttgctgaactagtagacccagatctcagcaaggaggaagaggaagatgtattgttcaagcaggaaggaattaccaactacaacattgtgcaaaacgcatggctcgtatatttctggagaagggctaaaacccataacgtggaagatgatattgctgaggagcggttgcagatgtggattgatcgacatgggcagcagcccacctcacatgatgctgtagatgttgatatgggtatacgcgagctgaggcgcctaggaatcgaacagctactatgggaactttcgcggagagaggcgaactctaccaaagaagaggagctgaacagcaccaaagaagagctgaaaaacaccaccacaaaagatgagatggacaccaccaacgaggaatcgtccgatgtcgaggatctgacctag

SEQ ID NO: 69410 - DNA, 1485 bp, Oryza sativa
  Clone ID: PAT_MRT4530_70080C.1
atggtggtggtggtggtgggaggcggaggaggaggaggaggaggaggaggggtgaagaaggaggagggggaggaggaggcgaggggaagaggaggaggaggcggcgtggtgggagggtgggggacgtgggaggagctggtgctgggcagcgccgtcatccgccatgggggcgttgcgtggggcgccgtcgccgccgaggtccggtcccgctcgccgtgcgccttctcgcctgaggaatgtgaagctaaattttcagagatacaagcacgctactctgcatgcgatgcttggtttgaggagctccgtaagcggagagttgctgaattaagaaatgatctgaagaagtctgaaaattttattggatccctgcagtccatgatcaaaagcctcagcaatagcaagcatgatgatggcaactctgaatgtcacactagtcatactgagtcatgttcaaataatgaaaatacagctgataacaattcatcaagctaagcattgtccaaagatagatcatctgctgctagttttacagaggaagaaagcgacagtcagaactctgataaggtgcaacactgcgatactgattcaattcaagtgaacaatacttcagcagaggctttggtaaaaccccttgttgaaaaaaaggtttgtgctgaagatggtttgctttggggctctagaaagaaaagggccgtgagggataggaggacttttctgatggctgataatagttgcagagctggcgagaatacatctacatcacacatacagacagatggttcctctgaaggctatgcaaagaagggcttgaaaactccaaatctagaatctggtgtgtctgtcgttgagaaagcaaaaccaaacttggcagagattttgaaaactatatctactcaaagtgactgttatatgttgcaacgccgacttgatgtccagcggaagcggactagatacaagaagatgattcgccggcatatagacttccgtatccttcattcaaagatcaagagtggcgcaacatcttctaccaaggagcttctaagagacattctactgtttgtgaataatgtccttgccttctatccaaaggctacgttagagcacatggctgcaattgaacttcgaaatattgcattcagaacagtgcaagagagcgcaagcatgccctctaagagttgtggagtaacaggagcagcaactgcccctttagtgaagaagaacacccgacccgtgcagcctggaagtcatgggcctcatgatgcaaagagaagcaaagtttctttaaaggggactggaagtactgtcaagcagggtgaggccaagggatcgcgtggtggttcatcagtgacagctaatgtaaaaactatgcagagaaatccaccggccaagaagagaggcgttgggcggcctccaaagaatgggcagaagcgtgctgctgcacagcaagatagccctaacaaaggcaggaagaggacccgacgctga

SEQ ID NO: 69411 - DNA, 1139 bp, Oryza sativa
  Clone ID: PAT_MRT4530_70081C.1
gatcgccaaacatcattgggcgggtgaaaaattacatatgaagatggcatctgtccctacttttaaacgactaggactctgtactcaacaattatcatgccaatttaagttcttttttttaaaaaaaaaactcgccctttacttccctaccctaacactataaaagaatacaaaaggccttacatcatgtaaaactcaaggggaaaaaatatacacatggactttcaggaaagaacggacaggaaaaagctagccacaccccactgaattgtctcatgttgctggagtattgcaaccattctgcagcactacatgtgcactatatttgccttttcatgccgatacccttttggatatatcaaaactgaatcaacgcacaagccacctttcgtatgggtgcaatcaatctgcaacattgagaacttgagcttcataagctcgtccgagttcagtacaacaaaatcaccaacatgataaagtatccagcttccttcttgttctagataatattctgatgtagcatgttgttcatctgaagttgagagctgaaaccgtgtgggtttggcttcccacccatggacttgttcagttccacaaatacggcggcccatgcgcctgtatggtcgtccaagatgaagccgaaaaaaaatgctgtatgaaccagcagggaagcaaaaatcaagctctccatctacctcaagccaccaaatttgctgaagataggcaatatggtggaatcttgattcctctgtggcaagttggctccagtatctccggtcatctatacctgtaatcaccattgcctttgaggagatagacaagcaaatacctcccttgttcttgtcaatccagaattccttgttgccaaaatcgaatggagtcggtcgacataggcgcgcgaaaatatccttcttgctgctgggcgagctgcgcttgccattaccgtgtccgccgtcaccaccttcgtcatcagcggcagctgcaaaggctaggaggtaccggtagttgacgggcagcttcccggcccagacgcagtctgcggaggcagcgccgcggaaggcgcggttgaggcgggcgacttggcagatctccggcggatcaaggtagagcagcaccgccgccacgcagctctccggcat

SEQ ID NO: 69412 - DNA, 490 bp, Oryza sativa
  unsure (1)..(490): unsure at all n locations
  Clone ID: PAT_MRT4530_70082C.1
tccacgcgtccggtattctgccgtgattaccatggtacgtagtcaaattgccctcgtcccgttccatgtgatggaggcgtggtgtgatgcatttttgcacgatgaggatgcttatcttgagtgtcgtcaaaccgtgcaaaccaaccccgtcaacggagagaccaagacccccgggcagaatatctatctcaagaacatctgcaatgttgaggttgaccctgacggtgtgcgtgctgccatcatcatgcataagcgtgttggaggcgaggatgaggacgctgttctcgtttacttgccatccatgcgccgcgggacggacattattcaccatttccttcctcgtgggtatcaaatccccgtcggcacccattcgtactttgcgggtatcaatccgtacacctatggtaccgacaccaagactggcatgtgccaatacgctgcanatacgaagtatgaggactggccagcagcacatgctatcgtgtccagc

SEQ ID NO: 69413 - DNA, 465 bp, Oryza sativa
  Clone ID: PAT_MRT4530_70083C.1
atggagcctaatcccttgccaccagccgccaccaccaccacctaccgccgtcgcagcaagcccaatcccatgcgcaaggcgaccaagcctccctcgccatccccgttgcccaagcgccaggcccggggcgacttgcctcccccgcacacggggcccctcacctgcgccggccaccactcgccactcaaccccggccccgcgctggaggatgcgccccagctccacggcggggagcgcgaggcgcctccctgtgctcagatagaggcagcaaagctttcgctggtgagcgaagaagtggaggccgccttgttgcgcggagcaggcgtccacgtcgtcccctccttcggcgtcaagccccccgactccatctcctggattgcgtcctccatgagggcgagctcccccgtggcaccggagcaggagtcggcgtactgcggcgcagccctttgtcacgccccgaactag

SEQ ID NO: 69414 - DNA, 628 bp, Oryza sativa
  Clone ID: PAT_MRT4530_70084C.1
ggcccaaatttggggggggttttttttttttttaaaaaatttagaaaaaaaaaaaacggaaacgttttttggccaccttaaaaaaaaaggggggggggaaaaaagacccaaaaaggaacggccccttaataaaccaaaaaaaaaaccccgacccccaccgaaaaaaagggggaaagaaaagccccaggggcgattagccccttaaaaatggaccaaaacgggccccccggtttaaattcccccgggggttaaaaaagggagggttccgggcccggttccccggccgttcaaaaaaccattttaaaaagccccccggggcccccaaaaaacttttaaaaccccctttttttgggaaaaaggggggccttgacgggggaacccgggcccccccggaagttttcctcgaaaaaccacgggtccctttgggggacccccaaaaaaacccccccccccttaaacttgggggggggggccaaaaccccccccccggggtccccgggggggaaaaaggcccccctgaggtccggggccccctttgccaggccctgccaaatggggggggccccctcacaaaggaaagctccgggcgcggaaaagtgcccccccccccccccaatggggggcgggg

SEQ ID NO: 69415 - DNA, 1279 bp, Oryza sativa
  Clone ID: PAT_MRT4530_70085C.1
atggccgagatcaacttgatctaccgcggtctacggctgacgtcgacgatgacatcggcgatgacgtcaccaccgggggcggctcggccacgcacgctcgccggcgaacgatggcgcggcggcgcaaacggagggcacctacgggtagcgggcgacgcggcgaactcaccgcaagcacggacggcggcggacggcaaccagacggcgacggcgacgagaggggtggacgaggacggtgacgacttggcgaacctgacggtggccttcccgagcgacgacgacgacctaagcgacgacggccacgatgacgtcagcgacaacgtcagcgatgacgtcagcaccggcggcgactcgggcggctcgggcgcgcatgctcgccggcgaacgacggcgcggcgacgcgaacggagggcaccaacgggtagagggcgacgcggcgaactcaccggtgaccaaagaagcggcggaggaacaacggacagcgccggcgacaaggaagaagcggcggcggagatcgggtcgacggtggtgacggtgctccggcggtcttcggcagcggcgaaggggcggacgaggacggcgacgcgacggcgaccacgatggtggcgacggcgaccgacgacggcggctgcaacggcggcgcggcgcggcacgcgtagtcgatgatggggtagtcttcctcatgctcagaaatattggcaaagctaacgaattctccggcgaggtatgtgttctccgatagatgtgcctcgtacacctccagcaccttcttcaacttctccacagtctcatccacgatcttctggttggttgggatgccatgcaaggccgggttgatgatgcactggaacatgattggcgatagtgctggattaaattggtgcgtctccacctcggtccagagatccaccatggctgcctccttgaggttaccttcacggagtagatcgacctcgctcgtcttgtaattgcggaggatgtactttccgattgcgcgggactgtacgttgcgctggaggtgttcgtggctcttgtgttccttggccttgaagtcgacgttgtgcggccgtgtcatgccgctcgctgcttctgcgctctcggtgacttctcggcgtctcgcaaacgaaaacaacaagttggcaaatcgcgactcgccaatagccacgctcgtgtcgatcgtccgccggtcgacttctctgctcattaatgtaggggactccatgtaagtttttgccctcggccctaaaaccccaggaccggtcctgttcaccggcgccat

SEQ ID NO: 69416 - DNA, 480 bp, Oryza sativa
  Clone ID: PAT_MRT4530_70086C.1
ttttgttgtcaggcctagctcctgctagaatccacccgggatgattaagtaccatcgtcgccatgactgcaatggaccatactgacacgtgaaaaggaagagctttctaggcggttcttacacacctttgcagcaggtgttcatcatacagatgtgttctttcctcttaagtcgatatttgacccaaaactgtcccatttggatataggacacttggctttctccttccatctctttttctcttctatattcctttctgaatgagatgagagttggtgtttcgcggatgcacaaatgctccttagccgttgcacatatatttggcgttgcctcggttttgttcatcctgtccagccgattgtattgtctccttctggatctcaagctcgaactaccattgcctgaacgaatttacttgttagcgctgagaaggtccaaaatttcgattggtgtccttccgaccacacaacagcttgacta

SEQ ID NO: 69417 - DNA, 447 bp, Oryza sativa
  Clone ID: PAT_MRT4530_70087C.1
tcaacatgttcgtcgatggcagacaaggataatgatgctcggttcaaccgcaaccccatattcaagagcggagctcggagcacaacaccataaagagcatagagtgaagcacgagcattagatgaacccatcagtagtggcgtttcacaacagcaatgtcaccacttcaagaaccaatgattcttgattctgtgtcgaacttgatgctacgtactaaactgagtgattttgcttcggacatgagagaccatggttggttagcatcagacaggatttgtgtgcatctatctgtccaccttgttcttcagctacgcggttataaagatattgatcgtcgatacttaagtcaattggtaatctgtcgttatgattttgtttgtaatcctgtgactcatcgatcatgcccattgccagatagtgtttccggaaaaaaaaaaaaaaaaaaaa

SEQ ID NO: 69418 - DNA, 211 bp, Oryza sativa
  Clone ID: PAT_MRT4530_70088C.1
cttgtcttcatttttatgtcttgtgatctcttttattttttttgttggttggagcgggacccaccagtcaacacagaaccagagggtttgcgggggcccaccccactaaaaaccctcatgcaaccccccttgcttttgggcccccaaccaacaatgttccccccatccccgggggagccaggcagggggggaaacaaaggtgtgggcccgc

SEQ ID NO: 69419 - DNA, 4165 bp, Oryza sativa
  Clone ID: PAT_MRT4530_70089C.1
gcacgagggtgattccggaggcgagcgagagagggagagaggaggggtgggagcgggggcggcgcggcggcggcggtggatggcgatggcgggcggcggggggctcaaccggtcgtcgtcgagggggcagctgccgccgcaggagcttctcgacgatctctgcagccgcttcgtgctcaacgtgcccaaggaggatttggagtcgttcgagcggatcctgttcttgctggagcaggcgcactggttctacgaggacaactccgtcgagcacaacccctccctcaagtcgctctccttcaaggacttcactacgctcatgttcaatagctgtgctgcgctcaggccataccgcgcgcaccttgatgacatttacaaggatttcactcactataagttccgtgtccctgtctgcggcgccatcatcctcgatgacacctacgagaagtgcttgcttgtgaagggatggaagtctagcgccagctggagttttcctcgtggaaagaggagtaaagatgaagaagatcatacatgtgctgttagagaagttctagaggaaactgggtgtgatgtttcgaagcttttaaaattggaagattatattgaagtttcaatgtggcagcaaagagtccgcctttatattataactggtgttaagggggatactgtttttgcgcctcaaactaagaaggagatcagtgagatctcatggcacaacatcgatgaactccttcctgctggtgatgacgcaatatctcgtggagtgaatgggatgaagctctatatggtcgcaccatttttgcagggtctaaaagcctggatagccacacatcgtcacccacagtatcagaaatcagacacgtctgctagaggtactgtgtggaaagcgaagaattcctcaactggagcggcgcctgttgagaaccccgttattactagaacaggatctgacccacaaactcttgacagccgcccagttgtatctgtaatcctgaatgcaacagatgcttctaccattgtgataatatccctacatttcgtgcacatgaatgttttttcttctgtccattcagatttgtgtttgaaatgttgctcaaaatggaaagcttctggaatctggagccgagccgatgccatggcggcgctcgtgcggcccgccgtgctgcccgtctgcgccatgacgggcggcggcggtaacgacaagcggtcgccgccgcagcagcggtcgtggtggggcgggaacaagcagagattgccgcaccagccgcggcggcagccgggcgggaatggtggccgaggaggaggaggaggggcgctggaccaggtgctcggagtgctccgccgcgacggcgagttcctccaggcggcagccggcgcccccctccgcgacatcttctggctccgcttcctcgagaagaagaagcagcagcggcggcggaagcaaccaaaacctaaacccaaacctccggagcagcagcagcagcaagaggaagcggcggcggctatccaagccccatccttcccacctccctcctaccagccaggattatcatgcctggatcttatgactgctgatttcgaagccctgaagctgtatatcggctactcgaagcatgcaatcgagcagcaatttctcaaaggcaagcggcaacctcagcatcagcaaactcctaaaccaaaactccagcaacagcagcagcagcagaagaagaagcagcagcaacaagagcagcagaatcagacacttcaacctccggccttccctcccccatcgtaccctccagggctgtcttgtatggagctgatgatggctgatatcgaagctctcaagttgtacatcaactactatgtagccattctcaccactcctctaccccagcattacgatccggagatactgtcccgttacttcacctcgcgtcctcatattctcgcatttcgcaccattcagataatcttcgcatttgtctcggctgcagtaaagatgcaaatttctaaaagaacaaacttgatcacagatgccacctacagctgtaatagcaccggaagcaaaggtttcaatgcttcacaatacatggttggccagcttctcaaagagacatttctagatcttgggcctacttttgttaaagttggacagtccctctcaacaaggcctgatatcacaggctcggagatttctgaggttagttacatttctgatgagcctgttgctgcagcttcctttggacaggtttatcagggacgtacagttgatggtgctcttgtggccataaaggttcaacggcctaaccttcttccttcagtattgagggacatttatattctacggcttgggctttcttttgtgaggaaggtagcaaagaggaaaagcaacattgccctctatgctgatgagttgggtaaaggtttggttggcgagttggactacaatattgaagctgctaatgctaccaaattcctggaatatcattccagatattcatttatgctggttccaaaggttctcaagcaacttacgaggagaagagttttgacaatggagtgggtatctggtgaaaatcccacagatttgctttccttatctaaaggaatttcatcagaaattgctgaatcgtcagagaagcagaagatcgaagcaacagcccgtcttcttgacctggtcaacaaaggtgtcgaagcatcattagtgcagctcctcgagactggtttgttgcatgctgatcctcatcctgggaatttgcgttatacacctgaaggtcgtgtcgggtttcttgattttggtttgctttgtatgatggagaagaaacatcagcatgctatgcttgcaagtatcgttcacatagtaaatggagattgggcttctcttgtttatgatttgactgcaatggatgttgttccaccaagaactaatctacgccgagtgacaatggacttggaggatgcgttgggtgaggtgacctttgaagatggaattccagatatcaagtttagcagggtgcttggaaaaatatggtctgtggcatttaaataccacttccgtatgccgccgtactacacgctcgtcctgaggtcacttgcctctttggaagggctggccattgcagcagatggaacttttaaaacatttcaagcagcatatccatatgttgtgcggaagcttctatcggataattcagttgcaacaaggagactcttgcatcaggctattttcaacaaaaggaaagagtttcagtggaacaagattacagtatttctaaaattagcatcagcaaggtataatactggcgttttgcctgagaggaagggtttggatgttgcaaaacttgtagagatcagtgatgcatcttcttcactccatcttaaccgtgctacaccagaaagagcactacatactgcaaatctgtgcttgcggcttttactatcgaaggagagcattgtgataaggagacttgtaatgacagcgaacgcgaagtcacttgctcgtgacctgatctccaaagatgcatcgatttaccgggtgctcttaagtcgggtacttgccgatgtcatcttccagtggatggtgaaggcaactggttttaaacgagccggacagctcgagcctcacccacgcgtgacagcaggaaagaacgatgaagacctggggctgtccaaagaagcaccagccttggtgacattccagacagcagtaagagatcgcaggctgaaggtgatattctccaagttcgtcagggacataagagaggaccccatcctgatggtcagagtgagctggaacatgtttgctatctcggtggtctccgctgcaattggcgttcaccgtttcatcgtcgtcttgtcggaggaatttctgtctacattaccaccgcctgtgcctccgccgcggctagttcagattcagagcatatgaagagcagcaactatgccttggtgcatgaagtaacttttttactgggtatcccgtagctgtatataaacgttttcaggagcagaatcagccatcctgtagctgacagtagctcgatcagagttctccatggctagttctccgtaaatttgtcttctactattacaggcttcctttgaaaagggaattttgtgggaattaaactgatttttgtgaaagtactgtaaaattcttgtccaaaaaaaaaaaaaaaaaaaa

SEQ ID NO: 69420 - DNA, 2938 bp, Oryza sativa
  Clone ID: PAT_MRT4530_7008C.1
gaactgagattaaatgattgtatgatgctggttttattcgtccttgccgatacgctgaatgggtttctagtatagttccagttactaagaagaatggcaaggtcagggtgtgcattgatttctgagatctgaataaagctacaccgaaggacgaatacccaatgccagtagccgatcagttggttgatgctacatcagggaacaagattttgagttttatggatgggaacgcaggatataatcaaatctttgtggctgaagaagatatccataagacaacttttagatgccctggtgcattcggcttatttgagtgggtcgtcatgactttcggcttgaagagtgctggagctacatatcaaagagccatgaattatatatatcatgatttaatctgctggttggttgaagtctatatcgatgatgtggttgttaagtctaaagaaatagaggaccacatagccaatttgaggagggtttttgagagaaccagaaaatatggtgtgaagatgaatccgacaaagtgtgcttttggtgtatcggcctaccaatttttgggatttcttgttcatgaaagagggatcgaggtaactcaaaggaatgttaatgcgatgaagaagattcagcctccggaggataagacagaattacaagagatgatcggcaagataaattttgttaggaggtttatttctaatttgtctggaaggttagaaccttttacaccattgttgcgattgaaagccgatcagcagtttacttggggggcagagcagcaaaaggctttggataatattaaggaatatcttagctctcctcatgttttgattcctccacagaaagggataccatttaggctatatttatcagccggtgagaagtcaatcggctcagtattgattcaggagttggaagggaaggaacgagttgtattctatctcagccgtctgctcttagatgctgaaactcggtactcccctgtggagaagttatgcttgtgtctatatttttcgtgtacaaggttgaggcattatctactatctaacgagtgtactattatatgcaaagccgacgtagtcaagtacatgctattggctccaatattaaaaggaagggttggaaaatggatattttctttaaccgagtttgatcttcggtatgagtcgccgaaggcgattaagggacaagctatagccgattttattgtggaacatcgtgatgattcaatcggctcggttgaaatagtgccatggactttattctttgatggatcggtgtgcactcatggttgtggtattgacctagttataatttcccctaggggggcatgtttcgagtttgcttatactattaaaccgtatgcgactaataatcaagctgagtatgaggcagtgctcaaagggttgcaattactcaaggaagttaaagccgataccattgaaatcatgggggattctttgctagtaatgagtcaattggcaggagagtatgaatgcaagaatgatacattgatggtttataatgagaagtgccaagaactaatgaaggagtttcggctggttactttaaagcatgtctctcgagaacaaaatattgaagctaatgatttggcccaaggggcatcagggtataagccgatgatcaaagatgttaaggttgagattgcagcaatgacagccgatgattggaggtatgatgtgcatcagtatttgcataatccgtctcaatcggcttctaggaaattgagatataagtcattaaagtatacactgttggatgatgagctttattatcggacggttgatggagtattactcatgtgcttgagtgccgatcaggctaagattgcaatcggcgaagttcatgaaggaatttgtggtactcatcaatcggctcataagatgaagtggttgcttcggcgtgcagggtacttttggccgacaatgctggaggattgtttcagatattataaggggtgtcaagattgtcagaagtttggagcaattcagatagcgccggcatcggctatgaatcctattattaagccatggccattcagaggtcggggaattgatatgatcggtatgataaacccaccatcaagtaaaggacataaatttatattggtggcgactgattatttcagcaagtgggtggaggcgattcctttgaagaaagttgattctgggatgccattcaattcgttcaagaacatataatctaccgatttggtattcctcaaactattactaccgatcagggttcaatctttgtgtccgatgagtttgttcagtttgccgatagcatgggtatcaaattgttgaattcttcaccttattatgcacaagctaatgggcaagccgaggtgtctaataaaagtttgatcaaattgattaagcggaaaaattctgattatcctcggcaatggcatactaggttggccgaagcattgttgtcttataggatggcttgtcatggatcgatccaagtccctccttacaaacttgtttatgggcatgaggctgttttgccatgggaggttagaatcggctctcgaagaacggaattacaaaatgatttaacagctgatgagtattacaaccttatggccgatgagagggaggatctggttcagtcacgattgcgagcccttgcgaaggttaccaaggataagtagtgtgttgctcggcattataataagaaagtggtacctaaagtttttttggaaggagaacttgtatggaagttgattttgccgattggtactcgtgatagtagattcggcaagtggtcgccgaattgggaaggaccattccaaatttataaggttgtgtctaagggagcatatatgttgcaagggcttgatggtgaagtttatgggcgagcgctcaatgccaaatttttgaagaagtattacccaagtgtttgggttaacgca

SEQ ID NO: 69421 - DNA, 282 bp, Oryza sativa
  Clone ID: PAT_MRT4530_70090C.1
atggacctgtgtgcaaggaaggtgatgacggcgctgggcgagttacattgtctaccgatggtgggtggcgccggccggcccgactcgacggcacgactggggatggggacggggacggggacggcgttggcgggcggcggtgccatctgcgtcgacgtaggagaacttccccaccttatcggcgacctcatctcgctcaccaccattgacttgtccaacaactcgtctccagccacaacaccatcttcacactgccccgagctcgccccagttcctggctga

SEQ ID NO: 69422 - DNA, 760 bp, Oryza sativa
  Clone ID: PAT_MRT4530_70091C.1
agaagatcatacatgtgctgttagagaagttctagaggaaactgggtgtgatgtttcgaagcttttaaaattggaagattatattgaagtttcaatgtggcagcaaagagtccgcctttatattataactggtgttaagggggatactgtttttgcgcctcaaactaagaaggagatcagtgagatctcatggcacaacatcgatgaactccttcctgctggtgatgacgcaatatctcgtggagtgaatgggatgaagctctatatggtcgcaccatttttgcagggtctaaaagcctggatagccacacatcgtcacccacagtatcagaaatcagacacgtctgctagaggtactgtgtggaaagcgaagaattcctcaactggagcggcgcctgttgagaaccccgttattactagaacaggatctgacccacaaactcttgacagccgcccaggtaaaagcttccgaaacttcaggttcgacacagcgagtatcctgcagtccatggaagcttccttcctacgtacctaggagcctgacaaagcatcaccccatgtgtgtatgcttgatgtgtatagactatgtaagccaagggcgtgtcttctgttgttaactcagctttttcttcacttttctagttgtatctgtaatcctgaatgcaacagatgcttctaccattgtgataatatccctacatttcgtgcacatgaatgttttttcttctgtccattcagatttgtgtttgaaatgttgctc

SEQ ID NO: 69423 - DNA, 1000 bp, Oryza sativa
  Clone ID: PAT_MRT4530_70092C.1
atggcgatccatgccatgtcgcagctggacggcggtgccgacggcccctccccatcccccaccccgggagcgaggatgtcgccatcgtggatcttcgcggggccgccgacggcgcgcggggtggccgacggctcctccaccacggcgagggacgcactgggtgaacaacggcgaggggcgcaggccgcgcggtgtggcctctctctccctctcccgctcgcttctctccctccctctctctctcccatcgccggcggccgcggagtcatcgccatcgcggatctttgcggggccgccgacgccgcgaggtcgtcgccgtcgcggatcctcgcggagccgccgacagcgcgcggggtggccgacggctcctccaccacggcgaggggcgcgcggggtggccgacggctcctccactacggcgaggggcgcgcggggtggccgacggctcctccaccacggcgaggggcgcgcggggtggccgacggctcctccaccatggcgaggggcgcgcggggtggccgacggctcctccaccacggcgaggggcgcgcggggtggccgacggctcctccactacggcgaggggcgcgcggggttcgccgcatcctcgccaacctcgtccacctctccgtttcggtcgccgaccgccggaacgccgttgaccccgtcgacccgagccgcgccggcacctccctctggtccggccgcctcctccgtcggcaccgtcgccccggggtgagccggggaccatccgctcctttcccccttccctcccctttatcggctgccgctccgccgcgccggtggtcgccggcggcgaccatcggggcgtgggcgcgccgcctaccgcgaccgcgccggcgtgggcgccctcgggcgcgccgagtggatgccgcgtggggccccgctgtcagccgcccgcgcccttgggtgcggctgacgtgtggggcataccgcgccggccggtgcgagcccgggtgcatccggtccaccgtggacc

SEQ ID NO: 69424 - DNA, 579 bp, Oryza sativa
  Clone ID: PAT_MRT4530_70093C.1
ccggccggggtttcatctgctcgccttggcttccctaccggttttgctcctctccttcctcctcctcatgggtgcttatgactacgtttctgatgctctcgccctctcccacacacttacaacacttccatatgatccacaacgtacaagcgggtgggcggcgataattcagatgctatctatgtttccaacgcaaacgtctagacaccatgattacactcggatctcttgcgcgtacgccgatctgaatgatcacttgcaactggaacgctagcaagtggaccccttcttatccaactctccgtcgactactatgctatcgtgcatatcctcgacgacagccggaccatcatgctcgtgaacaccgtatcgactccgcggaggcggttggcccagagtgcagcacaacatcaccgtctctcagggagatgagagcctccgcacatcggtccacgagaccagctcacattcttcttcagatgatgactagcaccactaccgccgatggagacaaggctgactcggaatgaaaaatacaagatgagcaactggaatgaattatccaactgagatggcgag

SEQ ID NO: 69425 - DNA, 483 bp, Oryza sativa
  Clone ID: PAT_MRT4530_70094C.1
gatcaaagtttcataacatgttgatttatgttactgagtagcaccaacacaaatacaacacatctgcacgttgatcatactacaacgacctattcaaagttgacaacagtcattggcacaacgaactacacagctcactagagtttctagtagtatgagctatgcgacgctggccgctcaaatgggcataagtctgttcaccatccactggaatatgacagtcggcaagtacccgacttaatagcacccggtaaatcgatgcatctttggagatcaggtcacgagcaagtgacttcgcgttcgctgtcattacaagtctccttatcaccaatgctctccttcgatagtacaaagccgtaagcacagatttgcagtatgtagtgctctttctggtgtagcacggttaagatggagtgaagaagatgcatcactgatctctacaagttttgcaacatccaaacccttcctctcaggcaaaacgcc

SEQ ID NO: 69426 - DNA, 378 bp, Oryza sativa
  unsure (1)..(378): unsure at all n locations
  Clone ID: PAT_MRT4530_70095C.1
gagaaagatatttttcgatggtttgggtattgatttgttgttgagcgagatgtagggaggtaagagaaaaaaaaggagagattgttcatggattaatgaatatgggaaggagatggaggggattatgggttaaaaaaaatagattttggttagggatgaaagaaaaaggggaagaggttgaattgantaagtaggaatataaattgaaagttatatggggagggggacgggaatgggttgggggggataaacaaagaggggaatgagtttgaaagggataagaaaccccgtgacccggggggttgcctttaaaaacccaccaatggcggggggccttccctgggaaaaggccagataaaataggacttgccgggcgga

SEQ ID NO: 69427 - DNA, 1896 bp, Oryza sativa
  Clone ID: PAT_MRT4530_70096C.1
ccgcgcggcgcctcctcacccccgcgctctcaccgctccaaactgccgccaaggtcgcacgccgaagacaccgagggcgaatctcgtttattctactacccaaggtcactagatcctctgccaatccatgctgttcaaccgtctccccgtgctggcactaaccatatcccaccatcttggcccttttcctgcctcagaagcacaccttcaactttgcctctcaacgctcgcgttgtaggcccgaccggactcacaggactttaggtggcccaagctcgctacggtaaagctttccaagactcagttccgtggggcatgcacgtggaccaatcggtcgtggtagggcatcgttggttaggtcctcgcgtctctaggctgttttacatctggcaatcattccttccccgatgaggtgcatgaaggggaggaattctacggtgctaatgagttcatgttctaggtcgatctgctctcaagcattgcctgttgtgtttttatcctattttttgtttgggtcttttgtttgtagggagtgtgtttggcctgttggcccctaaaacctgtcttagttatcttttatgtaataatttctgtaaaaacttgggtatatatatcgaaagctgttctgtttatatttgatatgagtcactcgcctggagtgatatgaaagattaattccggatgaagatggatgttgtggtgtgtgaggccgtgcatattgttataattattttgtggaatgtgtatatttacacttaaagtatgcacgggcctgtgctagttttggtggcttccctcggatataaggactacccccttatgccatggaaaatgatgtaatttgcgcccacacaggctaatcaacttagcatggtactatataagctgtcattgggtgattcctatttatcatggtatgagtagattttaaattaaaatatggaatatgatgaagatgaggatgaatggtgattaatattgctactattttaaaatgatgatttacaactgtttgcaaatgaaatgttttacaaagtagggaaaaactatttataataggcttgttatgaaacctccttgatgaactatattctttgtacgccttgcatatattctatttgtattattatggatgtggcttgctgggtacctcggtactcacctcttgcataaaatgtggttcagacgatcagttcttccctgaggaggcgcaggaaggggaagaattctatggtgctgacgagttcttgttctaggtcgatctgctctcaggcgttgcctgtggtgtttttatcctattttgtgtttgggtcttttgtttgtggggagtgtgtttgccctgtcggcccctaaaacctgtcttagttatcttttatgtaataatttctgtaaaaacttgggtatatgtatcgaaagctgttctgtatatcaatctatgcgcgatcgaaatcctagacgggcgggtggtttcgggatactatactcaaaccgggtatccccacaactgtagactgtattaataaagaaatagaaagaaaaaattttatgtcttcactcaaaatttggatggaggggcggcagacaaagaataggatgggaaacagaggcaggctaaactgatggcgaagagtttgaagacggcgatggaaacctgtgttttgatgcttgaaatgccaatattttaagtcctgtaataactgtttgttttccttttttttctcgtcttatctgtaagaactagatgttctggaactcttgtaatcatctgcgttttatttaatgaaaacgggggagatacccttccctttctaaaaaaaaaaaaaaaaaaaaaaaaaaaaaaaaaaaaaaaaaaaaaaaaaaaaaaaaaaaaaaaaaaaaaaaaaaaaaaaaaaaaaa

SEQ ID NO: 69428 - DNA, 320 bp, Oryza sativa
  Clone ID: PAT_MRT4530_70097C.1
ttttgtttttttattttttgtgtttttttttttgtcttttttttgggatgatactggtttgggcacattctgctagggccaaaggtggttatggtaaacggcaagtggggagaactgcgaacagaaagtcatggaagggaaacataaggaaagggccccagccagggatttcccggaaaaggcctttgcatctacaatcacaggcttcaacagtagggatctttcccaccaagcattttcttcggccgaatatatccaggacattttctatacctgaaatgctcacttaatgaaccaagtgatggaacttccgcttgaag

SEQ ID NO: 69429 - DNA, 1164 bp, Oryza sativa
  Clone ID: PAT_MRT4530_70098C.1
atgccgccgccgccgccgtcgaagaaccgcggccacgttcccgcgccccggccgcctccgggcaagccgcctgggcgacggatggcgagccgggacgcggcggagcgggcggcgttcttcgcgcggcgcgaggcggccgcggtgctccgccgcgtgctccgcggggacgcgtccaggcgcgccgcgggctccatcaagtcgctcgtgtactccccctccgtccgcaacaagcgcgccaccttcgccctcgtctgccagagagtcttgaccatttgactcccattcgaactcaagaggtaatcaggatgatgaaacaacgagtggaaaggataaggaaaactctccgccttcaagaggaatgaccttctctttggtcaggagacagcagcttctggatccgttgaacagttaattatgttacataaggatactattatggctgctcttgagaaaatgtgtattagaaggaaggttcgtagtgttgaagacttagtaagcaagaaaaggacagtcaaaccaaaacccaggtttcttcgtgttaacacactcaggaccagtacagattctgtcatcgaagaactgaacaaaatacacaaggggaaagcaagttgtatggtggcagttgcattatgccctgagccaggctggaaggttattgatgcatgtgcggctccagggaataaaacagtccatcttgctgcactcatgaatggagaggggaatattgaaacaatcaatggtgactttttggatatcgatagcaatgatccatcatatgccgaggtccgagctattctattagatccctcttgctctggttccggaatctctacagagagacttgaccatttgctcccttcgcactcaagaggtaatcaggatgatgcaagtacgagttcaaggataaggaaactctccgccttccagaggaaagcgctctcacatgctctgtcattcccctctgtggagagagtggtctacagcacctgctcaatccaccaagctgagaacgaggacgtcgtgagctccgtcctgccattggcgtcatcgctcggattcgagctcgctactccattccctcaatggcgacgccgtggtctccccgtctttgaaggatgtaggtgttctatacctcaaatttcaaccatgatcagtcctggatga

SEQ ID NO: 69430 - DNA, 542 bp, Oryza sativa
  Clone ID: PAT_MRT4530_70099C.1
gacgtaccgtcagctcttccattctgagtagtttcatttcttggaaggaggatgccgtgtacagtcttgtccgtggccatcatactgtcgtaaaggattatcgtatatctatgcctggaccgcgtgctcatgttttcatatatctgttctgggttgcacgtatcttttgtcgccaatgcagttggttgtggatctttactatgtcttctctttcttcctttgtatccctctttctctgttcacttcatgattctccttctttgctcttcatacatctttttttttcttcttcctttcctatttatttttttatctcattccttttctcatctcttccccttctttcctattcttttcttctttgcttttgcctccattacttccattctctgtttatgctccctcttcattccttccttttcttttccttctcttccttttactttacttccttctttcaccttcctctcttccttcttcctcttcttgttttcttctcccttctttccactcttctctttcccacttcttctcctcttctt

SEQ ID NO: 69431 - DNA, 722 bp, Oryza sativa
  unsure (1)..(722): unsure at all n locations
  Clone ID: PAT_MRT4530_7009C.1
atgggtggcggcgcgccatgcgacgtcgacgtcgacgtcggcgagcagcgtcgcggcggcggtgggcacaggctggtgtggcgcgggcgcgggcggcgccggaagctcccggtcgtcaggctaggcggcggtggtggcggtggcggtggtggtgggcgacggcggcgcgggttcctgcggcggctgcggctgaggtggctggcggcgaggtggctccggcgcgccgtgcgcaggctggcggcgatctacgtggcggcgctcgcgggcccgccgccgccgtcgtcgccgtcgccgtcgtgccggccgtggatcggcgccgagcccctcttcgccgtgccgttcatgcccaacgtccggcccttcctgtgatcaccaagctccggccggcgacgcggcgagcacatgtcgtcgtcgtcatcgtcgcaactccatgaggccatcatgtccatccagcaagtgatcatctcctgattccatgcaacttactattaattaatcaggtgccactaagancaaaaatattaattaagcatatatatatatatatatatatatatatatatatatatatatatatatgtgagcctcatcaggcataatttgcatgcgtaagaaatctcttcttaatttgttcagtctgtttttttttgttcttctttttgaatcaaggaaatggagaagtactttcatcagtttcaatattaaaaaaaaaaaaaaaaaaa

SEQ ID NO: 69432 - DNA, 1507 bp, Oryza sativa
  Clone ID: PAT_MRT4530_700C.1
aagcacaacccaaaaccctcccctctctctctcgcctcaccaccgccgtcgtcgtcgccgccgccgcaaccctcgccgccggcgctaggctcgcgactccgacgatgtcggcgccatccgaccccgccgtggccacccacccgcaggcgggcgccgccgcggcggcgtcctccagcagcggcctcaccttcaagctccaccccctcgtcatcgtgaacgtctccgaccaccacacccgcgtgaaggcccaggcggcgtgctccggcgacggggcctcgtctgcggcggcgggggggcagccgccgagggtgttcgggtgcgtgatcggggtgcagcgcgggcggacggtggagatcttcaacagcttcgagctcgtcctcgaccctgtctccgggaccctcgaccgcgccttcctcgagaaaaagcaggagctctataagaaggttttccccgacttctatgtgctgggttggtactccactggaagcgatgtgcgggacactgatatgcaaatccacaaggctctgatggacattaacgaaagtcccgtttatcttcttttgaatcctgcaatcaacctctcccagaaggatctccctgtaacaatttatgagagtgagttgcatgttatcgatgggagtccgcagctcatctttgtcagagctaattatacaattgagactgtagaggcagagaggatatctgttgatcatgttgcccatctcaaaccatctgatggtggctctgcggcgactcaattggctgctcatctgacaggaatacacagtgccatcaagatgctcaatagcagggtccgtgttatccatcaatatcttgtttccatgcagaaaggtgatatgccactggacaattcgctgcttaggcaagtctcaagcctagtaagaaggctaccagcaatggagtcagaaaaattccaagatgacttcctaatggaatacaatgacaccctcctcatgacttaccttgctatgttcactaactgttcaagcacaatgaatgagctggtcgagaagtttaacgcgacatacgagaggtcgactgccaggagaggaggccgaggtgctttcatgtagattttcccccttctgcatctgcagctggttctctgctgagattttggaaatagttacccatatggccaggaagtttttgcgtataatctgttaggaactatatctggcagccatcaagtttcttccaaactcatgctccctcgttcaggattgacacggcaaacatgttgatattcttgattctgtgcctagatcgttgtttattcctcattcgccaagattgacatgtaaagtttatccccatcacccccatggtagttacactatttgactccctaaatggatatggatgcaggtttcctgagttatgcttgtaaaaaaaattaggttaactgtatgtatggctcttggtgtccacgcagcttgaggtgatgtgatgcgttaaaaaaaaaaaaaaaaaactcgagactagc

SEQ ID NO: 69433 - DNA, 315 bp, Oryza sativa
  Clone ID: PAT_MRT4530_70100C.1
gggaaaaaaaaaacgaaaaaaattttgagggggggaaaatttcccataaacggccatttatccccccgggggtaaattagtatagaaaaggaattaaaacctccccggccggaaagggccatttttaaagcatggtggggcccttcttgggggggccccccggggggggggggccacccccctttaagggggcaaagggaaggttggggtcacaaacggggggaaaaccggcaacctggggggggggggcccaaggactccaggggggcaccaagttggagcccaaggtccggatccactggggggggccaacaa

SEQ ID NO: 69434 - DNA, 434 bp, Oryza sativa
  Clone ID: PAT_MRT4530_70101C.1
atcattctaagcgtaggcggatgacgcctgagtacatagctcgatgcgctacttctcatatagaggcaataccaatccagggcatcttcttctttttgcttacgagcatggacaattaccaactctttactgcttgtagctgtggtggttcttactgcttgtgtctccggcgatctgttgtagcattatttgagatgtaagttaagctgattctgatcccttgcttgttttcaattgtaactcttcatatttaattgtacttgctaggtagtatggtggcattctatggcatgtaactcatcttttctgtattgattttagtcatgtaacatatcctgtacactagaatatttttttcctctggtttattcttttggtagctacatgcagcatggcattttttaagccaagaactgcatcatagcaccattgtc

SEQ ID NO: 69435 - DNA, 579 bp, Oryza sativa
  Clone ID: PAT_MRT4530_70102C.1
atggcggcgtcatcctccctgtctccttccctcctcctcggctgctccttcctcatcgcggccgccgtcctccttcgccgccatgacagcgccgtcgccaccaccaccaccaccacccacctccacttctacatgcacgacgcctacaccggcccggctcccaccgccatgcgcgtcgtctccggccgctccttgctgcagtccaccaccgacatcgtcgacggctcgtcgccgccgcggcagttcggggacatcgtggtgctgaacaacgcgctgacggaggggccggacgccggcagcgcgcgcgtgggcacggcgcaggggttcggggtgcgggtgtcggagggcgggttggtgacggacctgagcatgcacctggtgatggaggccggcgagcaccgcggcagctcggtggcgatcaagggccggatcgacgtcggcgtcggcgtgcgcgagtcggtggtcgtcggcggcaccggccggttccggctcgcgcgcgggtacatggccagcagcagctacgactacagcctcgccgccggcggcgtcgtcgagatccacgtctacctgcagcactag

SEQ ID NO: 69436 - DNA, 196 bp, Oryza sativa
  unsure (1)..(196): unsure at all n locations
  Clone ID: PAT_MRT4530_70103C.1
acgtagtcatagtacatacagagcttagnagaagagaagagancgtacgacgaaaaaccanngaagacaacntgaaccnntngaacngaatgaacactggtttttggaattnnnaagactttttacatgtttatctttttnngcatttgtttgtttgtattacgtatnccgttnttgcctgggnttnagagnggta

SEQ ID NO: 69437 - DNA, 465 bp, Oryza sativa
  Clone ID: PAT_MRT4530_70104C.1
atgttggcctctagggtgggcggtggggccagtgttgacggcggcatcagcggaaggcgaggtccggggccggcgttgatggcggcagcggcgagctgcggggttcgatggttcggggatgtgtgcggccggcggagtccagccccggcttcgatggtggcggtgagcactgagcagcaggggtccacagcggcgtgcggcatgctcggcgtcgacgaccatggcgagcggcggggtgtgacaccagacgaggtggtcgtggagagatcggacaccaagcaatgcggccgcggtggagttaggggcgttgccggccacgacgtcgaggtggccgtggagaggtcgagccagatgccacagcagcggcagcagcggcgagtcgttggactaggcgccggcgccggtggcaaggaagaatgcagtagcatcgatgaaggatattgggttgtgcatgatctgtattga

SEQ ID NO: 69438 - DNA, 411 bp, Oryza sativa
  Clone ID: PAT_MRT4530_70105C.1
cgcgttcggtttggctacgcgctgagatcaggtatttgaatgattaaatgagcagaaacgaacagttcatcttgtacaagctggaatcagagaatatggacgatcagactcgcgtactggatatgatcagatgttacatgtgagatcgcaggtaccagaacagttacgagacaccatcatgaactatcaaggatcatcctgtcctcagactcccatatgaacataccaccgtttggcgataagtatgtaatgtggagtagagataagttatgagcatcacatctaacttatgatgatcaagagtgattgacatgcggtttcagaatgtcactttgagagtgacagatgacgctgctgagaagaggtaatggaataacgtgattttaaaataagaagcaagtcgagattgtg

SEQ ID NO: 69439 - DNA, 291 bp, Oryza sativa
  Clone ID: PAT_MRT4530_70106C.1
atgagcttcacagttgagtatatatttttcacagataccgacaagaggaacctagcgctgcctccaaatatcgccgagttcatattcgtggaagctgactacgctagccgtcgattacattatccgtatgtgctcgccacatccgatccatcgattcgtggaattctcgagcgccggagagagacggctcttcttcgtggtagtgccatagctacacgtactactagcttttgtatggcccagcatggtatcctgcccacggccaaaccccagatcgatcgaccatctgaa

SEQ ID NO: 69440 - DNA, 2781 bp, Oryza sativa
  Clone ID: PAT_MRT4530_70107C.1
atggcggagacggtgttgagcatggcaaggtcgctggtggggaatgccatcacgaaggccggagaggcagctgctgcagagataagcttactgattggtgtgaacaaggagatctggaaaacgttaaccctaaactttccaaactggttattttcaaacacccacccccaccccccaaaaaaagaaacaaaactcctggtaccaagtgacgagctgaaaacgatgcaagcattcctgatgacagctgaagagatggagaaaaaacccaggctgttgaaagcgtgggtggagcaagtaagggatttatcttttgacattgaagattgcctcgctgagtttatggttcacgtggggagcaaaagcttgtcacaacagttgatgaagctcaaacatcgccatcgcattgccatccagattcgtgacctcaaatcaagagttgaagaagtgagcgataggaattcacggtactcattaatcagccctaacaccgatgagcatgacaccttgagggatgaatttcgctactggtcagctaagaacattgatgaggctgaacttgtgggttttgatgatgcaaaggaaagtatacttaatttgatcgatgtccatgctaaccatggtcttgctaaagtgatctttgtagttggcatgggcggtctagggaagacaagtcttgttaaaaaggtttaccatagtattaatattgttaataatttctcatgccgtgcttgggtcactgtgtcacagtcatttgtcaggacagagctcctgagaggactaatcaagcaacttttgggtggtgattcggaaaatgaacacttcaaaggtcttcagagcatgcaaaggaatgagaaagtggaagacctcgtggaagacttgaagcaaggtctaaaagagaaaaggtactttgttgttctagatgacatgtggagcatagatgcattgaattggcttaatgaatctgtttttcctgactctaataatggaggaagtcgcataatagtaaccacgagagatgccagcataattcaaaactgtgcttatccttcttatctgtaccgccttgaacccttaaaaacagatgatgctaaacaattgctgctgagaaaatcaaataaaagttatgaggacataaaagaggcaaggctgagaagcattttccccgaggattttccaataaaaaggaggtgtatggtaaatagatggatagccgagggttttgtggatgcaaagtttggaatggctatggaggatgttggaaatagttatttcgatgaactcatcaatagaagcatgattcaaccatgtaggttttatagtcatggagtagtacagtcctgtgtactccatgatatcatgcgtgatatcgcaatttctatttccgcagaggagaatttcgtattcatgacgaaagggtttgtctctggtattccacctgaaaacatccatcacctttctattgatgggagacaggattcatacctaagctttgatctaagccatgtccggtcattaagtttcttttacaatcctaaagagcaactagcttcactgtgctcaccacagctaaggatgctccgagtgttggatctagagtttagtctatgtcgtgtaacacagaacgacatcagtaacataggatcattttgccacttaaggtatctatctgtgaagaaaggttcatatatttaccatattccaagatccatcaggaaattgcaaggattgcaaactttaaacctgaaaagatcattaattactaaagtgcccgcagaagtcactgaacttcgtagtttccgcagtctccggtgtagcacccttggagtttacagtcacttcgaatttactaccccggagacaaatcctcggaggtggtggcggagttccgcaagggtgagcgtaccaaaaggaatagggagcctgaaggagttacagattcttgagcttgtggatatcgcacgaagcaacaagaaagcagtccacgagttgggggaacttactcagctgaaaaaattaggcgtggcaggggtcaccgagaggaatgtcagttatctctgtgaagcccttcagaagctttcttctctctgttcccttcgtgtggaggccaaacccttccgaggcctccacatgcttgagcagcttgcttccccacctcccttcctccacaccctcaaattgaaaggctcccttcatgaaatccccagttgggtcggaaagctcgagaagttggtaaaggttcagctagttttcaccaaactgaaggatactgaatccatacaagtactcggggaattgcccggcctcaaatgcctccgtcttatttaaaatgcctacattggaaaagagctagttctttgccatgggaagttccgagggctaaagactcttcgacttgactctttggaggagctgaaaaaggttacattcgaggagaggacctcgcccaagctggaaacaataaccattcaggattgcagctcggagttagcagtctgcggcacggttaacctccaaagcctcgagaaaattaagttttttgcaaaagggaaactggtgaagcgtcctgtggtgcaagcgggtcagagccaaagtgcgcatcatcgggaggacatcaaagctgcagagataatagagaaatctcaaacatcatcactagagaaaggcgagagttcacaatcaatacctaggcctgatgtccttcgtactcttccacccatctttgcaacaaccaagctgaagagaagtctgtcctgcccagcatcaacatctatcgtcatgtga

SEQ ID NO: 69441 - DNA, 426 bp, Oryza sativa
  Clone ID: PAT_MRT4530_70108C.1
ttatcaactcatagcatcccgcgactactggggtgactttttggcatggtcttgggaacagccgcgcccaagaagatgattacgaagattacgtgaatgtgcacgatctgaatatgatcatccatgtttacggacttgcgagccacgtgctatttatgaaaggctgaaggatgctgcttccccagatctaatggtgggttatttagaacaatttcttggtggggatgaaaaaaggcctgacctcccccctcgccttgatgaagggctgccactgtgcttaatatttggaggcgatggaagacacatggctgccttttcacctgacaatgacagtgcgggcaccagtctcactagtgagggcgtgccctgatcaatatgggaccgccttgttgctgtagagaacgcccaactgcgttaggcttggcg

SEQ ID NO: 69442 - DNA, 254 bp, Oryza sativa
  Clone ID: PAT_MRT4530_70109C.1
atgaagaagatcttgttcagcatgttctattcgatactggtaggagaagaacccgactcggtattcttaaaaaaagaggggaagcagaaccaagtcaagatgatatgggtcgccccttcttcttgcgccaaagatcttaccatttccgaaggaactggggctacatttcttttcaatttccattcaagagtttctatctgtttccacgcccttttttgagacctcgaaacatgaaatggacaaattccttctct

SEQ ID NO: 69443 - DNA, 152 bp, Oryza sativa
  Clone ID: PAT_MRT4530_7010C.1
gcgcgacatcttatccttttatcctataaaccacgctcttatacactgctacttatttggcgtttagttctcgcctccttactgtgcgtggtcaactcttacggatggtgacattctatccctcacatcttccatcgcccaactgtcattgc

SEQ ID NO: 69444 - DNA, 611 bp, Oryza sativa
  Clone ID: PAT_MRT4530_70110C.1
aaacgctggtcagcgccaatgcccgcctggttgattttcagtccacactggagcttgctggtcgttgggaaggtggagaagtggcatcagctgacggcatgcgctttgtcacaccagtgaagaccatcaactcaggatctaacagaaaatattttggttctggacgaggcatcacctggtataacttcgtatctgatcagtactctgggttccatggcattgtggtacccggtacattacgggattcgatttttgtactggaaggacttcttgagcagcagacagggctgaatccagttgaaatcatgacagacactgcgggtagcagcgatattattttcggtctgttctggctactggggtatcagttttccccccggcttgccgatgcaggtgaggcggtgttctggcgggtgaataaatcggcaaactacggagtactggataagttggcccgaggatatgcagatctgtcaaaagcggagagtcagtgggatgagatgatgcgaaccgctggttcgctgaagttgggtacaattcatgcgtcagaactcattcgctctttactgaaaagctcgcgcccatcaggactggcacaggcaattatggaa

SEQ ID NO: 69445 - DNA, 222 bp, Oryza sativa
  Clone ID: PAT_MRT4530_70111C.1
tacttcagccgaaaatatgcacctcctgcacgcctgatgagccttctccaatacctcgccggacaccggacgacacggacggtctcgggatgagtgccgacttgcgaggatatttgagaaggatgaatctccaaaatgttccacgaacatgattatggatgaacagggattatgctatgaaattaggaaaaaaatataaataaagtaccagtaatatatcac

SEQ ID NO: 69446 - DNA, 272 bp, Oryza sativa
  unsure (1)..(272): unsure at all n locations
  Clone ID: PAT_MRT4530_70112C.1
ggaagagtnnnctttaaaattcgcggagacgggggtagaacccgaaaaaccacaccgggaccaacaggggaacaactagtacgaataaagaaagctaaaaaacccccccaaaaataagagcaaaaaaataaagcccgaagaaatagtaatacgttaaaaataacaaaaagcaaaagagaagcaancnaaaaaaaaaaaaactagggggaaaaaaaagggagaaaaaccacagtaaaaaaagggcgaacaacccccaaagtccaaggaggaaa

SEQ ID NO: 69447 - DNA, 424 bp, Oryza sativa
  Clone ID: PAT_MRT4530_70113C.1
ctatatggggggctgcttcctgtcttatttatgccttggttttttttaaacggtgggtgtttttcatttagttagttttttttgctaagaacggggggaacctgtcttaggatcggggaacgaaaacaaccccccccagggggaaaacgggggggggttttttatactgccggccgggtcgccgttgaaagctccaagcttcgggggggccgtttggggccaattggaaaatccggggcggaatttgggtggaaacacagctagagagagcccccgccactatgcgcgtgggggccttaggggtttacccccgacccgggggcccacccagaaatctccagccggcccgcggggggggcccggtttcgcttaaggggggggccccaagggcccggcgaaggagctggcccacctttttcccggg

SEQ ID NO: 69448 - DNA, 303 bp, Oryza sativa
  Clone ID: PAT_MRT4530_70114C.1
atgtcgcacccctcgggctttcagggcgtgctaccccgaggccctcgcccggccaccacgtggcggggagagcaggcggggcgaaaaacactgctccgcgccttcaatgtgcggcgccccaaccgtcctgcgccgcaattaatgcggcgtgggagggacgcggagtgggggcaggtataccctgtcccattgacacgttgccaggggcgccccacgcgcatggtggccatgctgcttccggttgaagcaaaggatagcggtatgattagggccatgtgggcctcccctcccatggaggggtag

SEQ ID NO: 69449 - DNA, 242 bp, Oryza sativa
  Clone ID: PAT_MRT4530_70115C.1
gcacgaggcacacacacacatacacacacatcacacacacacacaccctctcctaaatgaagacaccaacagctctctctcgccggtgtgcaacaatggacatcgcttgctacaaccgcggcggctggaggatcatcaagcacaagtcgaccgccgcagcggcgatgccggccttctacccccggtcaccggcggccgtcgtcgtctgtcgcccccgccgccgcctgcccccgtgccttatt

SEQ ID NO: 69450 - DNA, 171 bp, Oryza sativa
  Clone ID: PAT_MRT4530_70116C.1
acggacgcccccgcggacgctgtcgttgtcaggaactcgtaggggcatgctccaccaaaaggggggaaacatggcgcagagtgacatgaaaaaggcgagtgagtaaagaaagtgactaaaatcggcccaggagctagacctaatggtggagaaactacaggagcttacttc

SEQ ID NO: 69451 - DNA, 636 bp, Oryza sativa
  Clone ID: PAT_MRT4530_70117C.1
atgacctcactgcccctctcatctctctcttcttcctccctcgtctctgctctcttcttcctcttcttcctccctcatctctcttctcttcttactctcacgacatgggaatcccaggtactgttgcagttggatggatggcgcgagcctctgggattttgcgaggaggtcatcgacaagcgaggatatgtcgaggccatcccaaccataagcgagatactcgtgctgtttacaggatctatgcgaggtagagggcctgcaaccgagatgtactgcctttacctcaacgacccatctggcgaaccatcaagcatcgtcgcatccatcgctcggcctgctatccagctcatcatggcactagttgtccctactgcttggcttgttccatgccgaagactggttcatgccatgccaaagaggaagaagatagcaatccccaaacttgagggtgtgacagggtgttttggcgcggtgatggttccagtgccatactgcgccctggacgtaggcgaagttcttatggtcgcggccacggatgaaggcgctttgcgcctgcccgaccacagcacctatcttagttgtgagccgcaaggccagcaccttggccagatcttagtgaaactgtgtaggagatga

SEQ ID NO: 69452 - DNA, 972 bp, Oryza sativa
  Clone ID: PAT_MRT4530_70118C.1
atggcaggagaagaagtcgaggaatcaacatcttcaccactagtgcagatgtatgaggttgattgggccctaattggagatgctcccgattggacccaagtaccgcaacgtgacgccggtggaacttgcctcatgacacacactgggggtactcccgttcttcaagttccagtggcgtccctccatcctcatggatgcgtcactcggtctcctctcgtggggatttgggtgagctcactcggagggtgtgcgctcttgtgctgcaagccggagagatacaacatgcgcttgaagatcacatcatgcagactcaagagggttcaatcctcaccccggaccttgagcaaaaagcaagcttgggggagaggcctctcccccgctaagggagaagcatgtgtcccatgggtgtcgggcgtatggagtataaggcgcaacaaggaagttcccgaccaaaactgggggccagaggggccggcccaagttcggccaaaccaggggttcggtgatatacaggtgttgctggatagttggtctggtcagaccgagcaggtgttgccggtcagaccgatgtgtatcgagcggtcagaccggccagcccgcgatctgaccggccgactctgtgtggagagtattgccggtgatggatcgggagtcgacttggagataaggcgacgtcggacgaatggcggcatcgcggcggtcagaacaacggcagcttcagaccgaagattcaatctcggtcagactgacggcttccagacgcttggaagaggcaagaaggaagacaatggtggagagaagaccaaggacaacaagtccaagaatggtgagaatgaagatgaagataaaggaaagaacatcactggtgtctgcttcatggcatgtgatgaatcggattcagagtgtgaagacaatgataccggtagtagtgcctcggtcagaccggacaccggtcagaccggcggttcataa

SEQ ID NO: 69453 - DNA, 1362 bp, Oryza sativa
  Clone ID: PAT_MRT4530_70119C.1
atggccatctataatgagacctggttcgagttcctccatctattctcggtctatggcgactggggaggcagcatgcaaaagcggggagcgggggttagaaggattaaggatatgtgtgggtgggttcctggatccggcgcagaggtgtgctggggcggccatcggctggcagccggctggatccagtgcgggtgggggctctgctcctaccgacatgcagcggcggcggcgaccgacgacggtggtgtctcccctctcccggcgttgccatcgacagcgaaagcagcggccatgccatccttgagaataattaagtcaatatcagacaagtcaaagtacattgttgtactagaactacgtgggctggcgattgaaaaagtgccagatgctgttggatgccttttcaacctacgctatttgggtttgcgccattcgaaggtgaagtttctccccaagtccgtggagaggctctccaacttattgacgttggatattttcaactcctacatacaagaactgcctcaaggaatagtcaagctgaagagtctgaggcacttacttgttgagagaatcaatgatccgtcatggagggattttagaagtcgccacggtgtttgcatcccaaagggtgctgtggtcgggcaggcgcaaagcgccttcatccgtggccgcgaccataagaacttcgcctacgtccagggcgcagtatggcactggaaccatcaccgcgccaaaacaccctgtcacaccctcaagtttggggattgctatctgaagcacgcgcacgccagccctctacctcgcatagatcctgtaaacttaagagaagcggcgcaaatggagcacgagtatctcgcttatggttgggatggcctcgacatatcctcgcttgtcgatgacctcctcgcaaaatcccagaggctcgcgccatccatccaactgcaacagtacctgggattcccatgtcgtgagacgccgtcgtcttctccgcccggcgccgccgtcgtcagttcgccaccacccgcgtcggcgcccgtgtcagccgcgccggcgtccgtccgtcaccggcatcgtccatcctcgtcggcgtccatgatggcgcgtgcggtgctggcagtggacgacaatgatggcggcgacggcgaacggacgacgccgcggctgacatgggtgcaggcgcgggcggtggacgatgatgatgccggcgacggacggacactggcgtggctgacactggctctagcgcgggcggtggcggactccctccctccgtgcccacggcacaccgtggacgacgacgacgatgacggtggacgacaaggatggacgatgccggtgacggatggacgcctgcgcggctga

SEQ ID NO: 69454 - DNA, 6018 bp, Oryza sativa
  Clone ID: PAT_MRT4530_7011C.1
atggccgagaaacaagcaccactaccatcaagcctaggctccgttaaaggcaaagcaccaaagccggggttgactgacatcattgatgacaatgtcctgccgatcgatcttgagaagttcacacctgaccagaagcaggagtttgaagcaatgatgcagcaggcacgggatcagtatctaagctcgttcatgcaaacccgcaagggaactctggttcagaagtacaagatgaaactagttgctgatacccctggaaccggttcttctaataatggagaggtaaaacaagctccagatggctcggctcagccaagcaacaaaggtgctaccagtggttctgtaggaaatcaagacgataaccctcaagaagtgcacggagctccaggtgatattgctcaagggccgcaaggaggaaatcttagtcagaatatcgagctagcacaagattttttcaacaactttcaagatcgggttgattatgcggtgcatcatgctttgatcaatcagtccgggatcttagtcaatacattgtcaaacatgattaagacgatagccgatggctcaatagctgagcatcaggccacaggcccggtctacttgcaaggaggcgttttccaaattatcgaactttggtcaccgatgctcagccagtcgtgcaggcagctccatctatcgcacctgcgactcaaccaacagcgccagcatcaacgcctttacttgctgcatcggccacggcgactgcagcagcagccgatccagcaggcaccaccaattcagccggtggtgcagccggtccaacagcaggtcgtacagccagcacagcagacaccaccaattcagccggtggtgcagccggtccaacagcaggtcgtgcagccagcgcagcagtcactaccaattcagccggtagtgcagccgatccagcaacaggttgagcagccagctcagcaagcaccatcaacacagcagcatctccaaccgatccagcaaacaccgccgaggcaacggcttcagccgatccaacagactccggtacggcagcaggtcgctcagccgattcagcactcggggtcggctaatgcatcggttgggtttgcagcacctggggggcaacctgcgcagcagtttgtgaatcaagttgtcccagaacatttggttcatcatgcgcaaccagatggcactgtgatatctcagatggttcctgaacatttggtacgtaatattcagccgaatttgcataactaccaagggggcaacttaggctatcagtatcagcctccatccccgcaagcccaatatcagccagggggatcggcccagcaacagttcgctccccagtttggtcagtttgagtccatgcagcagcaaccgcaaggagcagctcagcaacgaccgtgggctgatgtgattgccgatgtaatgagggagcaatttagtcttagaccaaaagagaccgggagtttgtatcggcagccttatcccgagtggtttgaaagggttcctctacccaatcggtttaaaattccggatttctccaagttttcaggacaagagggcgtatcgacttatgagcacatcagccgataccttgctcagtgtggtgaagcatcggctgtggacgctttgagagttaggatgttccgattatctttgtccgggtcagcttttacttggttttcatctttgtcgtatgggtcggtcaatagttgggccgatttagagaagcaatttcacagctatttctacagtggggtccacgagatgaagttgtctgacttgacagcgatcaaacagcggtatgatgaacccgcacatgagtacattcagaggttcagagagatgaggaacaagtgcttcagcttaagtttgaccgatgcccagttagccgatttggccttccagggtatgattcctccgatcagggagaagttctcgtctgaagacttcgatagcttatcacatctgatacaaaaggtaaccttgcatgagcataggttggctgatgtcaggagaagctctaagaaggttaatcatgtttgtccgtatatgtacagatcagacgacgaagatgacgattctgaaatagctgcagccgaatgggtgaggagcaaaaaggttataccgtgtcaatgggtgaaaagtcctggaaaggaacagaaatatgattttgatatcactaaagccgataagatcttcgatttgctgctccgagaaaagcagattcaactccctgccggtcatacaatcccatcggctgaggagctaggcaagaagagatattgtaagtggcataattctggatctcattctactaacgattgcaaggtctttagacagcagatccaggtggccatcgaagggggaaagattaagtttgacgattccaagaagccaatgaaggttgatgggaatccttttcccgtcaatatggtgcatacagcaagtcaagcagccgatggagctcgtacgaagggtttccaagtgcattcggctaagattattaataagtatcaaaggagatatgataagcagcaggggagacgttatgaagagaatgacaatggttttgatcctcattgggattgcgagttctttagattctgctggaatgaaggaatgaggttgccatctattgaaaactgtcctgggtgtagtgacgtcattgagaactcaagccgaccacataataggggtgatcggccaagacagacaagactccctgttcatcaaagattgggtccgatgggtcaagaccatggtcaagaagacgagctgactaggaagaatcaatggtgtccctctggtattttcacaaagaaccagaagaggagggtccagagattgaggagcagggaacgttttcaggaggtcgaagaggaaatcaatcatcggctgaagaaaccaaaaccgaggcaggtgtggcgcgttaagaatcaagctcccgcagccgataatgctacagccgatgaagcgaagaggttggcaaaaggaaagagcgttgttacagcaccaaccaacatggtctttacgctgccagccgaattcggaatcaaccaggccgatgttgatgaagtagaggaagaatcggccaagttggtcctatcatcggagcaggcggtatttgagaagcctgagggaacggaaaatcggcatcttaaaccattgtatgtaaatggctacgtcaatgggaagccgatgtctaaaatgatggtcgatggtggggctgcggtgaatttgatgccttacgctacattcaggaagctgggtaggaatgctgaggatctcatcaagacaaatatggtgctcaaagattttggcggtaatccatcagagaccaaaggtgttttaaatgtggagctaacagttggcagcaagactattcctactacgttttttgtcatcgatgggaagggttcgtacagtttgcttcttggaagagattggattcatgccaattgttgcaccccttcaactatgcatcagtgcttgattcagtggcaaggtgacaagatagaggttgtgccagctgacagccaattgaagatggagaacccaagctattactttgagggcgttgtggagggttcggatatctgcgctaaggatacagtagatgatctctatgataagcatggtcaaggttttatgttggctgatgatttggaagaaattgatataggtccaggtgatcggccaaggccgacattcattagcaaaggtttgtctttagagtttataaccaagttgatagagctcctaaaagagtttagagattgcttcgcttgggactattatgaaatgcccggactcagccgatcgatcgtcgaacatcggctacctatcaaaccaggggttagaccgcgtcaacaacctccgaggagatgtaaagccgatatgctcgaacctgttaaggctgagattaaacgattgtatgatgctggttttattcgtccttgccgatatgcagagtgggtttctagcatagttccagttattaaaaagaatggcaaggtcagggtgtgtattgattttcgagatttgaataaagcgacaccgaaggacgaatatccaatgccagtagccgatcagctggtcgatgccgcgtcagggaacaagattttgagttttatggatgggaacgcaggttacaatcagatctttatggctgaggaagatatacataaaacggcctttagatgtcctggtgcaatcggcttatttgaatgggttgttatgactttcggcctaaagagtgctggagcaacatatcaaagggccatgaactatatatatcatgatttgatcggctcgttggtcgaagtttatattgacgatgtggttgttaaatccaaagaagttgctgatcatatagccgatttaagaaaagtcttcgagagaaccaggaagtatggcttgaagatgaatctgacaaaatgtgctttcggcgtatcggctggccagtttttgggatttcttgttcatgaaagagggattgagggggcatgttttgagtttgcctatactattaaaccgtatgcgactaataatcaagctgaatatgaggcagtgcttaaagggttgcaattactcaaggaagttgaagccgatactgttgaaatcatgggggattctttgctagtaatcagccagttagcaggcgaatatgaatgcaagaatgatacattgatggtttataatgagaagtgcttggaactaatgaaagagtttcgactggttactttgaagcatgtatctcgagaacaaaatcttgaagctaaccatttggctcaaggggcatcggggtataagtcgatgatcaaagatgttaaggttgagattgcagcaatgacagccgatgattggaggtacgatgtgcatcagtacttgagcaatccatctcaatcggcttccagaaaattacgatataaggcattgaagtatacgttgctagatgatgagctctattatcggacgattgatggggtattacttaagtgtttgagtgccgatcaagctaaggttgcaatcggtgaagttcaagaggggatttgtggtactcatcaatcggctcacaagatgaagtggttgcttcggcgtacaggatacttttggccgacgatgttggaggattgtttcagatattataagggttgtcaagattttcagaagtttggagcaattcaacgagcatcagcgtcggctatgaatcctataattaaaccatggccattcagaggttggggaattgatatgatcggcatgataaacccaccatcaagcaaggggcataaatttatattggtggcgaccgattatttcaccaaatgggtagaggcaattcctttgaagaaagttgattcgggggatgccattcagtttgttcaagagcatatcatctatcgatttggtcttcctcaaactattactacggatcagggttcaatattcgtgtccgatgagtttgttcagtttgctgatagcgtgggtgtcaagttgttgaattcttcaccttattatgcacaagctaatgggcaagccgaggcgtctaataagagtttgattaagttgatcaagcgaaagatttctgattatcttcggcagtggcatactcgattggccaaagcattatggtcttatagtatggcttgtcatgggtcgatccaagttcctccttacaaacttgtctatggacatgaagctgttttgccatgggaagttagaatcggctctcgacgaacggagttgcaaaatgatttgacagccgatgtgtattacaatcttatggccgatgagagggaggatttggttcagtcacgattgcgagcccttgcgaaggttactaaggataaggaacgtgttgctcggcattataataagaaagtggtgcctaaggatttttcagagggcgaacttgtatggaagttgattttgccgattggtactcgtgatagtaaattcggcaagtggtcgccgaattgggaaggtgtagcacccgtatttttattttcatttatttaa

SEQ ID NO: 69455 - DNA, 177 bp, Oryza sativa
  Clone ID: PAT_MRT4530_70120C.1
atggcattcatgctagcaggaggattctttgtaaagtgtagatggaagttcttcttaaaaattcagttgcaggggatgtcaaatttgcactttgtactgtttgcaagggaccttcacccttctacttatactaagattgctctttcatctcatcctgaggtttttgattgggccaaa

SEQ ID NO: 69456 - DNA, 669 bp, Oryza sativa
  Clone ID: PAT_MRT4530_70121C.1
atgggcaacggcggcggtgccagtggcagccgcggctgtggcctaaggcaccagcggcaacgcccgtcagtgtggaggcagaggcctcggagctcgtcgcagcggcggcgtcagtggctgctgtggcacggtgtgaggaggcgcggtggtgcgttcggcagcagtggctgcggttgcggtgaccacggtcgccggaggcatggcggcctcggacggctagttgagggcgtggcaaacggctacatcgggccggcgcggcatcgtttggaggaggggtcggagaccggcttggcgcagagtggcgcagccgatgacagcggaggccggctcggcgcgagaggcgcgagcggcggagatggaggccggcttggcgcgagaggcgcgtccggtggagggaggccggattggcgcgagaggcgcgtccggtggagggaggccggattggcgcgagaggcgcatccggtggaggaggccggcttgacgcgagaggcgcggccggcggtggaagagacgacctctgtgcgaggaggagctgctggtgggtgtggcgcggtcttcgacgcacgaagactggccggcggaggacgccagtgcaggggtcccgcatgtcggcagagctggagaggtggtggagcatcggtgcgtcagccgaggattcacaggtggtga

SEQ ID NO: 69457 - DNA, 840 bp, Oryza sativa
  Clone ID: PAT_MRT4530_70122C.1
atggcggcgacccctcttagcgcgggagaggcggcgaacggcggcggccaatgccggcaaggagacggcggatctggcttcaccttcgccgaatctggccatcccctggccagagtgggtgctggtggcggaggaggccgcggcgcggcgacgcgacaaggccggcgacgccggcacgacgaggcggcggcgacggcacggcgacgcgacggcgacgacttgcacggcagccggcggcggccgccccgacgcgacggcggcgcgaggcttgggaacgacggtgtcggcggcgcggctggtgatgggcaatggtggcggtgccagtggcagccgcggctgcagcctgaggcagtagcggcaacgcccgtcggtgcggaggcagaggcctcggagctcgtcgcagcggcggcgtcagcggctgctgtggcacgcagtggctgcggttgcggtgaccacggtcgccggaggcatggtggcctcggacgactggctgagggcgtggcagacggctacatcggaccggcgcagcattgtttggaggaggggtcggagaccggcttggcacagagtggcatagccgatgacagcggaggccggctcggtgcgagaggcgcgagcggcggagatggaggccagcttggcgcgagaggcgcgaccggcggtggaggaggcgaccttggtgcgaggaggagcggccggtgggtatggcgtggtctttggcgcacgaagactggctggcgggagacgccagtgcaggggtcccgtatgtcggcagagctggagaggtggtggagcaccggtgcgtcagccaaggatttgcaggtggtgagcagcgggtga

SEQ ID NO: 69458 - DNA, 201 bp, Oryza sativa
  unsure (1)..(201): unsure at all n locations
  Clone ID: PAT_MRT4530_70123C.1
gagaaggaggagaaggagcagaagctcaaggtgaagnaggcgatcgagaaggggaacatggacggngcgcggatctacgcngagaacgcnatctgcaagcgtaccgagcacatgaactacttctgcttngtntccngcctngacgctgtagtccgcgcgcnttgananccaggngaagatgcaggtcatcnncaagtccat

SEQ ID NO: 69459 - DNA, 801 bp, Oryza sativa
  Clone ID: PAT_MRT4530_70124C.1
tcagcgcgggagaggcgacgaacggcggcggttggggagcggcggcggaggccgatcccggcgaggagacggcggatctggcatcaccttcgccggatctggccatcccctggccggatccggctggtgtgggcgctggtggcgaaggaggccgcggtgcggcgacgcgtcaagggcggcggcgatggcgtagcgtcggcagcggaggcggcggcgacggcgcggcgacgactcgcacggcagccggcggcagccgcggcggcggcgagatgcacgcgggcggcgacggcggctgcacggcggccctggtggcagcgggccgagcgacggcagctgcacggcggtgacggcggcgcgaggctcgcggacggcggcgaccagcggcgcggctggtgaagggcaacggcggcggtgccagtggcagccgcggctgcggccggcttggcgcagagtggcgcagccgatgatagcggaggccggctcggcgcgagaggcgcgagcggcggagatggaggccagcttggcgcgagaggcgcggccgatggagggaggccggattggcgcaggaggcgcgtccggtggaggaggccggcttggcgcgagaggcgcggccgacggtggaggaggcgacctcggtgcgaggaggagctgccggtgggtgtggcgcggtcttcggcgcatgaagactggctggcggaggacgccggtgcaggggccccacatgtcggtagagctgcagaggtggtggagcatcggtgcatcagccaaggacatcttgtctgtgttcctttgtcagtctag

SEQ ID NO: 69460 - DNA, 558 bp, Oryza sativa
  Clone ID: PAT_MRT4530_70125C.1
atgccaagctcggcagcgaagcgtgtgaggtggagctcgagtgtgtggctggaccccgacgacaacaatgcggtcaccttgaggttcgacaacggcactgaagcgtggcgctactggtgcgcgagctcctacggcggccaatgggcaccaaagctgagctggcgtgagctgctggacggagtcaccgcaagccgccaccaccgcgcccgcacagcttttgtgccttgctacaccgcccgcacggccgccggcggaggacggtgcggcaacgccggcgtaggtcagctcaagcagcgtgtactcgagctcgacgctggtggggtcctcagcgtaggcgaaataagggtaggcgttgacgaggacagcgagccggtgcaggcgtggaagtcaaggatggggcagagcagcaagaggaggtccagcagcgctgacgacgtcgcgtcggctgccgccgggagcagcaatgaaaacatggctccggcctctgcgccctgcctcgcctcgcagacgccgctccggccgtcggtggcgccgcgccccgcctcacctcgcagatag

SEQ ID NO: 69461 - DNA, 843 bp, Oryza sativa
  Clone ID: PAT_MRT4530_70126C.1
atggagcaacccctctacctccacaggttggtccaggcgaactggacgaggatgtgccgtcgaggcagattctgcttccactgccggtcccccttctgccaccattgctgccccgagcattgggatcgtcaccatccggcaggaggtcgcggccgagtcgctacgattgggttgctcggaagtggagaccccgcggcgttcgccaagtaccccgtgggtcgctgggggtacaattggaactatatacagagagtgaaagactggaatcgggattggatcctgttgaaccccaggatgacaccattacaagggcgtggtcgaacctgcgttaactgcaatcagaaaatcggggagtcttcggcgaggtactgctgtttaatgtgcaagcataaccatgtccaccagggcaaagggagggacatgattcaggcacttgcagcaggaaattacttccagattcatcgccctgatcgtttctgcaccatatgcatgtcgtccttctgttcagcttgctgcgctgagcacattgagcgacaccatccagaaaaggctaacgctcatggcgaccagatcattgaggttgttcacgtagatgcttgggcagcggttgcgccgtctgtgctagtccccgaggatgtccttcatggtgttcaggtcgtgcatgctggtggtggagctctggtttaccctgtcatgaggttagaagctcctcctgcagttcagcatgtgggcgacgtcccttggcagcataactgcggcgcacccggttgccatgagatgattctggtgcaagcacagttctgttgtttgcgttgcaaggctgcagttcattgggcagcttag

SEQ ID NO: 69462 - DNA, 180 bp, Oryza sativa
  Clone ID: PAT_MRT4530_70127C.1
atggaggagaaccttcccaacaagcggcgcaacccggcggccagtctcaccgacgagctcatcgtcgaggtcctccgccgcctccccgtccgctccgtgtgccagttcaatcatgttgggctacggacagatcccgagctcacaactgcattacaaaagggaaacggaagccaggactag

SEQ ID NO: 69463 - DNA, 1182 bp, Oryza sativa
  Clone ID: PAT_MRT4530_70128C.1
atggagctggaggggagggcaaggccgctgctgatgctcaaggagtggctggagctggagtccagcgcggagctctcccgcgacggcttcgggtgctacccgcggcggcagctcgccgcggagctccggggaggaggaggagggagcggcaggcggaggaacggcgccgtgatcgagagggtgtcggccgcggtgagggccgctctgttgatccggccgtcgtcgtcagcgcgggagggaggagaggccgcgctgtccaagagcttctcgaggaggctggggcgcgggttctggaggaagcggagaggggagggggatgaggtgaacagtagggtggatagctgctctgcggctgccgttagcggaagggatgatggctcgtcgccggcaatgtcgcctaggaggaggagctgggagggtcgccacgcaggtggcgtcgccggccgtcagagccatgaaactcagaaacaggttgcgagtaaaatggattgcgaggcgacgtgccacttggacgaagagctcgaacaggggcagcggcggagcccagtttctgtcatggacttcctcagccaggatgaagaagacgacgacggtgaggtcgaagacggcaacggcaacagcgagtacgacgacgtagacgactcgatcgcgtcgccaacgttccagcaaagtctatccaacattcgaagagtaggtcagcagctactgcagaaaattcgacaattcgagcagctagctgagcttgacgcatccgatgtggatgacgccaccttggccaaggaggatgttgtctgccacgtggcggattccgactccatggaagatgacaccgaagaagcgtttgtgcaggacctggtcgaccttctagaagcaaactctcctgggtccacccgctgcttccagaagcttctaatagatttcttctacgacgggttgccaccttggcagggagaaagattggacggtccagatagagcgaagttgctgctggagattgccaaggcatggttggatgatcaggatttctcgtcgaggtttgatggaaaggcggaggtggaggagattgagcggatcgggcggtggagatgcttcaaggaggtcggacaggagctgctggccgttgatttggagggcgaaatcttctggtctttggttgctgaaatggttggagagttgggttga

SEQ ID NO: 69464 - DNA, 1308 bp, Oryza sativa
  Clone ID: PAT_MRT4530_70129C.1
tcatttctgtgtaagcgttgaagcaccatcaccacccctcagtgaaagtaatgggccaccatagaatctcttgccaactagagcagagtccaggaatagtactacaacagtaatatcatcgtgaaagtgtctcctgaccccgcgatcaatctttttcaagtctgagtacctcatttctcttttttttgctgcctctcgcagagccgcttttattagtcttcttgcaataccatttcttggcgcacagttaactatatccacagcctcctgattggtcaggtgctcccatagcccatctgaggcaaatatcacaaattggtcttctgtacacagtttatgtacttctatggatggttctggagaaagaattggtttgtggaagggttctgaaagccggaatctcgccaaaagaggctctcggttaaattcagtactttttaggtaagcatcgcctaacgttctggaaacctgaataaggcctttgacacgccaaacgttgtgctttaggaccacgattcgtggatcgtctgggtgaaactgtcttaattcctcccttacagactcaatgcttgcgttatgctcggctgacagctgaaccgccttaataacacccctttcaagtctccctagaacagcacgggaatcaccagtatttgctacataaagaactccttcattgatgatgccaaccaaacagcaggaaccaacggaggcaagctgcggtttgatgagccattgcttccttacaagattgagaaacccttcctccgtggcagcataggatttgcgaatgacatcaactgaaacagtttgctgttccgtagcaaatttctttagattggggaagaaatgttgtgcgatgaaatgagcagtctccgggccaccatggccatcgtagatgccgacaaaagtggtggaggaggagtgggagagaagaagaggggcagcttcgacctggctggcatcctcgagaaggttgtttgcctgcacgagggccatagagaagtcgccgcaagcgtgcctcccggtgtccttgtaccagagcaatccatccctggtgccgccgacggcgagctggtggtcgggcttgaagcaggggcgcacaatccgcatgaccgtctgcccaaccatgttgcacttgcaccaggaaacctaggtagtaagaaagatccaaggaggagaggcttgacgaagaagatggaggagactatcgatcaagattgcaagaagcaggagcttggtggtcaagggattgggggttggggtctggccccaagaaagaagaagaaattaagaggcggtgcatga

SEQ ID NO: 69465 - DNA, 228 bp, Oryza sativa
  Clone ID: PAT_MRT4530_7012C.1
atgggtcccacgcggccagagacatcaacgttcgcgaagctgcgtcgccgtacgactcgcggatgggccaaggagccttccttccttttctcccgccttgggcccaggcgcccagccggcgatggtggcgacgctgacaccggccggaggacgacgcccgccggcgacgcgcgcgccgacaatggcgaggacgagttaaccggcggagcaatggcgccgatgaggtga

SEQ ID NO: 69466 - DNA, 234 bp, Oryza sativa
  unsure (1)..(234): unsure at all n locations
  Clone ID: PAT_MRT4530_70130C.1
gcacgaggctctacagcagctcactcactgctcaacaatggcgacggcgaggttgatcctcctgctcacggtgtgcgtgcggcgtgcgtgcgtggctcnctgctgcttctgcagcgcccaggaggtgatcgtgggcggcgtcggcgagcagctggcgacggcgccgccggccgcgcccgctccctcaccgccgccgccgtactgcggcagcgtgaggacggcggtggaggcgca

SEQ ID NO: 69467 - DNA, 185 bp, Oryza sativa
  unsure (1)..(185): unsure at all n locations
  Clone ID: PAT_MRT4530_70131C.1
aggcatatgtaacatgatgttcttgttcatccnctttttttcttttccaaaacaacagatcaaatgaatggnnccaaaggnagtngaaggcgtaaaaggaatngcaaaaggnnaatcaagntangcangngatggnacngnttaggttnaccaacccatcctnacnaccnacaccaccancnacc

SEQ ID NO: 69468 - DNA, 740 bp, Oryza sativa
  Clone ID: PAT_MRT4530_70132C.1
cccacgcgtccggtgcaacatggttgggcagacggtcatgcggattgtgcgcccctgcttcaagcccgaccaccagctcgccgtcggcggcaccagggatggattgctctggtacaaggacaccgggaggcacgcttgcggcgacttctctatggccctcgtgcaggcaaacaaccttctcgaggatgccagccaggtcgaagctgcccctcttcttctctcccactcctcctccaccacttttgtcggcatctacgatggccatggtggcccggagactgctcatttcatcgcacaacatttcttccccaatctaaagagtatgttcattcctctatttctctcaatactactactactactacaatctaaagagtatgttgcttccctgcagaatttgctacggaacagcaaactgtttcagttgatgtcattcgcaaatcctatgctgccacggaggaagggtttctcaatcttgtaaggaagcaatggctcatcaaaccgcagcttgcctccgttggttcctgctgtttggttggcatcatcaatgaaggagttctttatgtagcaaatactggtgattcccgtgctgctttagggagacttgaaaggggtgttattaaagcggttcagctgtcagccgagcataacgcaagcattgagtctgtaagggaggaattaagacagtttcacccagacgatccacgaatcgtggtcctaaagcacaacgtttggcgtgt

SEQ ID NO: 69469 - DNA, 374 bp, Oryza sativa
  unsure (1)..(374): unsure at all n locations
  Clone ID: PAT_MRT4530_70133C.1
aagaggccattcttctcttctccaccacctactctctctctctctctctctctcgctctctctcatctcctgccttctctctaggatcgccgccatccaccacataccacgctttttactgccgcacacataagagcacaggaggcggaggaagaagaagagtagagagagaaagatagagagaggagcaggagacgcattcagtttcatccaggtgagagagaggcttcaagttcctacgnctnctgctctgccatgtccantcgttgaaagggtatggacctancttggnacaggntacgancgangttactgncaancttnnatacgnangntnnaccccntncaagantcgggatnggttanatgtttta

SEQ ID NO: 69470 - DNA, 525 bp, Oryza sativa
  unsure (1)..(525): unsure at all n locations
  Clone ID: PAT_MRT4530_70134C.1
cccacgcttccnanaaggcgggattggcagctgagtccacagcacaggcgccggcgcagccgcacttcgtcctcgcccctctcgcggcgcacggtcacctcatccccatggtcgatctcgcgggcctcctcgccgcgcatggcgcacgcgccagcctcgtcacgacgccgctgaacgccacgtggctgcgcggcgtcgccggcaaggccgcgcgcgagaagctgcccctcgagatcgtggagctcccgttctcgccggccgtggccggcctgccgccggactaccagagcgccgacaagctctcggagaacgagcagttcacgccctttgtcaaagccatgcgcggcctcgacgcgcccttcgaggcctacgtgcgcgctctggagcggcgcccgagctgcatcatctccgactggtgcaacacgtgggccgccggagtcgcccggagcctcggcatcccgcggctcttcttccacggccgtcgtgcttctactcgctctgcgacctcaacgccgtcgtgcacgg

SEQ ID NO: 69471 - DNA, 699 bp, Oryza sativa
  Clone ID: PAT_MRT4530_70135C.1
atgacgccggcggggaggaaaaggggaaaaggaagggggaaaaggggcttgcccctttgccgatttgggaaagaggaggaggggagcgggggcgacgcggcagagggagggggggcgctgcctccgtcccttggcggcttgcgcgcggagtggcgggggccgggcgatgacgacggcgatgacggcggcggtttggagcggagcggcgacactggcgacaggcgcgggcaggcgctgacgacggcggcgaccgagcggaaattcatgtccgtggaggtggcgcgcccggggaaggatggcgcattccagcggatggcgacgaggcgggagtaccggccttattaccaggtgttcgccgtggccatgcccatccttgtccgcctcatgctctccaccctcgtcatcgaccgttacggcggttgggttggcaatgtggcatggatggtggtggcgcaggttgggaagaacgggtcggcggcgacggcgacggcgtacgcggtggcagtggtaggcgttcacgtgcctgcacacggcagggttcgtgtggtcatgagtgccactgcggtgggtggcgccgtgcgagggagatatttcccggtggacatccggtcggcggagcaggcgatgaccgtgtccatcgtgtccaggggcgatgagcgacgacgaaacgaaccaaccgaagtgactgatcgagattga

SEQ ID NO: 69472 - DNA, 519 bp, Oryza sativa
  Clone ID: PAT_MRT4530_70136C.1
aaaaactattgaaatttaaaagagagaggagcagccgagtcggccatggcgcggtcgccggcggcgaggaagccctcggcggcgcagaccgtcgcggtgacgctggcgctggcgctcgactccgcggggctcctcttactcctgttccacctctccccgtccagccccaccccgcacccgcacccgcaccgccgcctccgcctccgcggcgcgcgcgcctccccctccccgcgcggccagatcccgttcgaccccgtcatcgcgggcctcgagcgccgccgcgacgaccgcgagtgggagcgcctcgccgccgcggggctgcacgcgccctgggtcgaggcggggcccgtccccgaggactacatcgacggcggcggcggcttcggcgccgaccccgacgaggactacatcaacgacgccgtgcggttcaacctgacgcggggggtggaggcgctgttccccaagatcgacgtcgaccccgccgacggggccgagacgcccgccgagctgaccgcctgg

SEQ ID NO: 69473 - DNA, 424 bp, Oryza sativa
  unsure (1)..(424): unsure at all n locations
  Clone ID: PAT_MRT4530_70137C.1
gtacaatgacgagaattgcctccctatttacatttgaactgcattgcgcatacgcaacgagtgcatatttacatagaaatgtatattcgcatgagcacaggcgcatgtacccacacgtcaaaaggtcgataaaagatgaacaagcaggtactgcaaaagacaaccgtggaagtagtagtacgtgattggtaccgcaaaatgagtgaacatcctacgaaataacatcttccgatcgaccttgtnaacaagaaagaaagaaagtagagaggcagctcaggacacctccacgaccaaaagagaagaaagaagctactactgggctcgtccacgggcacggggtgggtggtctgtcaacagtcgaataagcttgtcggatctccccattgcatctcttgacgaattcactttttcttcctttctggga

SEQ ID NO: 69474 - DNA, 273 bp, Oryza sativa
  Clone ID: PAT_MRT4530_70138C.1
atgccacgacgtcagcggtccgaccaggcgggcgcgcaaacggcgacaagcgccgagtggcctggacctcgtcggtgggaggggcgatgccaagccgacgcttcccgtcttcggcaagggacggtggaggagtactccaggacagcgcgtgcacggggaacccgacgcgactgcgagaaggtgaaggagtggaggtgccgcttcccagaaagttccggtgagcttaggggcttcaagtccgggccagctttgaacttcaagctgactacataa

SEQ ID NO: 69475 - DNA, 319 bp, Oryza sativa
  unsure (1)..(319): unsure at all n locations
  Clone ID: PAT_MRT4530_70139C.1
accaacctgggctgcggattcggctcgagannattcctgggggaacgacnnattnnttaatcnctgcttntcttntcganaataaccctganaaaaagagaggacccntatccnagnggatgacctgttttatcactgtnacanctgtcttttttgacatttggaaagaccgccacttgtggcgtcctcctcccccgtctccaccgccctcctcccgacnctgcccttcccttgttcttatccaaaaccgcatccaaaaatctcgccacgaanccnccgccnccgccncccangtgganatcnngggtngacnacncct

SEQ ID NO: 69476 - DNA, 5964 bp, Oryza sativa
  Clone ID: PAT_MRT4530_7013C.1
atggccgagaagccaccgctgtcgccatcctcgactagcccaagccttgttaaagaaaagatccagaagttggggttgactgacgtcaatgaaggaaacgtcgtgcccatcgatccagagaaattcacacctgagcagaagaaggattttgaagcaatgttgcagaaagcccgggatcagttcttaaactcattcatgcagacccgcaagggaacattagttcagaagtataaagtaaaggtagttgccaatgatcctaggaccagttcttccaaaggtgaagacgggaaacaagctccagatggctcggctcaactgagtgacaaaggtgctaccggcggttctctaggaagtcaaggtgacaactctcaaggggtccatggagttcaaggcgatggagtgcatggagttcaaggtgatggtgctcaggggttgcaagggggaaatcttaatcagaatagtgatgcggcacaagattttttcaataatttccaagaccaggtcgactatgctgtgcaccatgctttgatcaatcagtctggggtgttagtcaataccttatcaaacatgatgaagtcaatagccgatggatcaatagctgagcatcaggctgcaggcccagtttatttgcaaggaggtgtctttccaaattatcggcctttgatcactgatgcccagccatctattcaggtagtttcccccgtcgcaccattagctcagccgacggcgccggcatcgactcccttacctgctccgtcagcattggcaccaggccagctggtgaaccctcagttgttaatgagagagcagccacagcatagtgggcaggttgtgaatcggccgacgcaagatcaggttgctgccatgtttctgccgcctcaacctgctgttgatccaatacagcagcagccgattcaacagacactcccgattcagcaggttgtacaaccagtccagcaacaagttgtgcaaccagtccagcaaacgccaccaaggcaacagcctccgcggccgattcagcaaacgccgttaagacagcaaatcgttcagccgattcagcaccaagcctgcgcatcggctgggtttgtgacgcctggtggacagcctgtacaacaatttttaaatcaagtcgtcccagaacacttggttcaccatgtacagccggatggcacaataatgcctcaagttgttcccgagcatttggcacagactggaagcttatatcggcagccttaccctgagtggtttaagagagttcctctccccaatcggttcaaagttccagacttctccaaattttcgggacaagatggtatgtcaacttatgagcacattagccgatttttagctcagtgtggtgaagcatcggctgtggacgctctgagggttaggttgttccggttatctttgtctggatcggcttttacttggttttcttctttgctgtatgggtcgatcaatagttgggccgatttggagaagcaattccacagctatttctacagtggggttcatgagatgaagttatctgacttgacagcgattaagcagcggcatgatgaacccgtgcacgagtatattcagagattcagggagatgaggaacaagtgcttcagcttgagtttaactgacgctcagttagccgatctagcctttcaggatgatgatgaggatgactctgagatagctacagccgaatgggtgaggagtaaaaaggtcataccgtgccaatgggtaaagagttctggaaaggaagagaagtatgattttgatattattaaagttgacaagatttttgatctgctactccgagagaagcaaattcaactccctgctggtcatacgattccatcggctgaggaattaggcaaaaagagatattgcaaatggcataattctgggtcccattctactaacgattgcaaggtgtttagacaacagattcaggtggccattgagggaggcaagattaagtttgatgattccaaaaagccgatgagggtcgatggtaacccatttcccgttaacatggtacacacagctggccgaacaaccgatacggggcgcatgaggggttatcaagtaagttcggctagaattataaacaaatatcaaaggaaatacgacaagcaacaggaaaggcatcatgaagaagataatggtggctttgatcctcattggggctgtgagttctttaggttctgttggaatgaaggtatgaggttaccatctatcgaggattgtcctggatgcagtgatgttgcagggggttcaagccgattatacgatggaggcaattggccaaaacagacaagagtgcatgtccatcagagattgggcccagtaaaccaacatggtgatttggaagatgacgaaaataagaagactcaatggtgtcctcctggtatttttacgaagaatcagaaaagaagggttcaaagattgaggagtagggaacgcttccaggaggtcgagcaagaaattaatcatcggctgaagaaagcaaaaccgaggcaggagtggcgtgttaagaatcaggctcctgtagccgacgatgttgcaactgatgaggcaaagaggttggcaaaaggaaagagtgttgtgacggcaccagttaacatggtttttaccttgccagccgaattcgggatcgatcaagccgatgtcgacgaggtggaagaggaatcggctaagttggttctatcaccagagcaggcggtgttcgagaagcctgaggggacagagaatcggcatcttaaaccattgtatataaatggttatgtcaatgggaagccgatgtctaaaatgatggttgatggtgggaccgcggtgaatttgatgccttatgctacgttcaggaagctgggtagaaatgccgaggatctcatcaagaaaaatatggtgctcaaggactttggtggcaatccatcggaaaccaaaggtgttctaaatgtggagctgacagtcggcagtaagactattcctaccacgttttttgtcatcgataggaagggttcttacagcttgttgcttggaagggattggattcacgccaattgttgtattccttcaactatgcatcaatgcttgactcagtggcaaggcgacaaaatagagatcgtaccagccgacaggcagttgaagatggagaacccaagctattattttgagggcgtcgtggagggtttaagtatctacactaaggatacggtagatgatctcgatgacaagcaaggtcaaggttttatgtcggccgatgatttggaagaaatatatataggtccaagcgatcggccaaggccaacatttattagtaagaatttgtctccagaatttagaaccaagctgatagagctcttaaaagagtttagagattgcttcgcttgggagtattacgagatgcctggactcagccgatcaattgtagaacatcggctacctatcaagttaggggttaggccgcaccagcagcctccaaggagatgcaaagccgatatgcttgaacctgtcaaagctgagattaaacatttatatgatgctggttttattcgtccttgccgatatgctgagtgggtttctagcatagttcctgtcatcaagaagaacggcaaggtgagggtatgcattgattttagagatctgaataaagctaaaccgaaagatgaatatccaatgccagtagccgttcagctggttgatgctacgtcagggaacagaattttgagttttatggatggaaacacaatgtataatcaaatttttatggctgaagaagatatccataagacagcttttagatgtcctggtgcaatcgtcttatttgaatgggttgttatgactttcggcttgaagagtgctggagctacatatcaacgggccatgaattatatttatcatgatctaatcggctggctggttgaggtctatattgatgatgtggttgttaaatctaaggaagtaaaagaccacatagccgatttaagaaaagttttcgaggggaccaggaaatatggcttgaagatgaatccgacaaagtgtgcttttggtgtatcggctggccagttcttggaatttcttgtccatgagaggggaattgagataactcagagaagtatcaatgcgatcaaaaagattaagcctccggaaaacaagaccaaattgcaggagatgatcggcaagactaattttgttcgaaggtttatttctaatttgtccggaaaattagaaccttttacaccattgttgagattgaaggccgatcagcagtttacttggggggcagagcagcaaaaggctttggatgatattaaaggatacctaagttcccctcctgttttgattcctccacagaaagggataccttttagattgtatctgtcggccggtgagaagtcaatcggctcagtcctgattcaggagttggatggaaaagaacgagttgtattttatctcagtcgtcggctcttggatgcagagactagatattctcctgtggagaagttatgcttatgtttatatttttcatgcacaaggttaaggcattatttactgtccaatgaatgtgctattatatgcaaggccgacgttgttaggtacatgttatcggctccaatattgaaaggaagggttggaaagtggatattttccttaactgagtttgatctttggtatgagtctccgaagacgattaagggacaagctatagccgattttattgtggaacatcgtgatgattcaatcggctcggttgaaatggtgccatggactttattctttgatggatcggtgtgtactcatggttgtggtatcggcctagttataatttcccctaggggggcatgtttcgagtttgcttatactattaaaccttatgcgactaataatcaagctgagtatgaagcagtgcttaaagggttgcaattgcttaaggaagttgaagccgatgctattgaaatcatgggagattctttgctggtaatcagtcaattggcaggggagtatgaatgcaagaatgatacgttaatagtttataatgagaagtgtcaagaactgatgaaggaatttcggctggttactttaaggcatgtatctcgagaacaaaatattgaaactaattatttagcccaaggggcatcggggtataagccgatgatcaaagatgttaaggttgaaattgcagcaataacagccgatgattggagtatggtggcgactgattatttcaccaagtgggtggaggccattcctttgaagaaagttgattctgtggatgcaattcaatttgttcaagaacatataatctaccgatttggtattcctcaaactattacaactgatcaaggttcaatcttcgtgtccgatgagtttgttcggtttgccgatagcgtgggtatcaaattgttgaattcttcaccatattatgcacaagctaatgggcaggccgaggcatctaacaagagcttgatcaaattaattaagcggaagatttctaattatcctcggcaatggcatactcggttggccaaagcattgtggtcttatcggatggcttgtcatggatcaattcaagttcctccttataagcttgtttatggacatgaagttgttttgccatgggaagttagaatcggctctagaaggatagaattgcaagacggtttgacagccgatgagtattataaccttatggccgatgagagggaggacttggttcaatggcgtttacgagcccttgctaaggttaccaaagataaggaacgagtagctaggcatcataacaagaaaatagtgcctaaggatttttcggaaggtgaacttgtatggaagttgattttgtcgattggaactcgggataacaagttcggcaagtggtcaccaaattgggaaggaacgtttcaaatctataaagttgtgtctaaaggggcatatatgttgcaagggcttgatggtgaggtttatggatga

SEQ ID NO: 69477 - DNA, 177 bp, Oryza sativa
  Clone ID: PAT_MRT4530_70140C.1
gaatgactagtgtatggttgttttcatgatttgggattgaaattactcctggccggttgtttaaattgcaccatgacgtgtgctctgtgacttaagtagctgagtaccaatggaattgtctagttaccatgttgtggaattgtctcgttataaattgttatgcaactggcgattcac

SEQ ID NO: 69478 - DNA, 243 bp, Oryza sativa
  Clone ID: PAT_MRT4530_70141C.1
atgttgcatggccgcatcgtcaccatcaagctcccgtcgctccaccgctgccgcccgaccgcggccatcaccgctgcttctcccggccggctgctcgcagtgccagtgttggtaactatcgcggtggatatctactacactgcgtatgtttgcaaccaccttgctgcgagtatgctaatccacggagatggctcaattggactgcggaagcgcactggagacagcatcggcgcctgccgatga

SEQ ID NO: 69479 - DNA, 537 bp, Oryza sativa
  Clone ID: PAT_MRT4530_70142C.1
ctcttgcgccgccgccgccgccaccgccgccgcactctgcaaccgcgccgcgtggagggagggaaggacgaaggaggaaggagatggagcgggtcggcggcggggagaagcagctggaggactgcaccgtgtccaatgctctcggcacctggttcttctcagttgctggtgctcttgttgctattcctgtggggataaagaagaaatccttggcaccactggttttctttggcactactggaactatgcttgatatcatcatgggcattagccaatgcgagcgggagcatgctgagcggcagatgaagcttttagaagctcaaaacctttctgccaatgcttcagcagatggtgaaaactgatcaagttctttgattattaggacaagcaaaatgcagctgttgtttttcgtaacttactagttgatctgtaattggcatgatcttctgctcttgtacaaatttgtccatccaaaatacggaaatcttgatattttaaatattctccaataagtatattgagcagtggttaatcctt

SEQ ID NO: 69480 - DNA, 178 bp, Oryza sativa
  Clone ID: PAT_MRT4530_70143C.1
atggagatctcgcttcattggtgggagaatgcccgcgcgcccatgccacccacccagctgcagctacgctacagccgtagctacaacaactgcagcgggctgtttgagtgggctgtgcgcaacagccttgcacaatccaaaataggggtgaaaacggagcggattcaggcggatagtg

SEQ ID NO: 69481 - DNA, 427 bp, Oryza sativa
  Clone ID: PAT_MRT4530_70144C.1
cctttcaataagaaagtgtggaattgtacacaccaaggaaggcacccaccagtataggacgtttccttcgaagtgggggctcccccagagttttgctcgcgtgcgccaaatgtatgcctcgcccccacccgatatgccctcccagtggtagtttactgtgccagatgtatgcccggacttgcgcccccataggtgtgttgggattttagggaaaaaaattgtcgaaattgtgcacagtggggtgctttcggaatgaagttgcgcatgtgaattagccgctggtgtggtaagtgttgtaagtgggttgagaaatggatttgcagactgctgcatgacctggtgatgtatgtggtgccatgaaatgctggaaatgcgatgttttgggttggccctgtgccatggttcccaaaaaaaaaaaaaaaaaaaa

SEQ ID NO: 69482 - DNA, 1902 bp, Oryza sativa
  unsure (1)..(1902): unsure at all n locations
  Clone ID: PAT_MRT4530_70145C.1
acgaggaaactatcttctccacgaaagactatctcctcctcctcctctccccatcagctccgccgctcgccgctcgccgccgaccgccgtccgccgccggtcaccctcccccccttccatggtacaccatgcttctggcagcggcaactgccacagcagcgccggtgtcgtctagctctagcttcttcgccgcgacgacaagagccaccaccacccgctcctctgcccagctccagctctcgctgccacgccggtgtcgatcctggtggggcaatgggaaagcacgccggagcagccgccgccgcagccaccattgctgggccgggggcggcgccgcgacgccggaggaccacatggacgagctgccgccggggagaggccgctaccacccgttcgaggagatcgccgagaagctccaggtcgacgacggcgagcccgcccacctcaccgacgccgagtccgcacgaaccatcgtcgaggtgaacagcaaggcgacggtgatgatctcgacgctgatcgacgagggcgtgcacgagaggatcatcctgccggagttcccctacctcaccgatgagaacggagatatttacttcgaggtcgacaacgacgacgccctcctggagagcatcatgggagacgacaagactgcgcatgttatcatagggcttgacaacactcaggtctttgctgacttggatctggcagcggcatctgcgactgagtttgctcaagaagacgatgacgacgacgatgatgatgacgactcggatgatgaggagagtgactttgacgatgactttgatggggagggtgtgtttgcagtcgatgacgacgatggcgatgaggatggagaagacgaagatctgcctagatggacagatctagaaaccatgaattcctgccatccattgtactttgcaaggatgattgcagagacctcaaccaagtctagtatagactggttggacagaccacctgcaagccttgttgttgagggtcaactgagaccagcctttgctgaagagagcaccatggtttcaaggcatttatcaaatgatgaaccacggaaagataacaaggagagtggtgctacatttttcaaggttgaggttctgagcattgagctgatcactgcatatggaactgagccaaaggtaaagataggggaataccggaaagctaggccagatatcattgcgcattctgcaccgaacataatatcgcgcttgagagctggtggagacaagataagccaggctctgaaatcactctgctggaggtgcaaggccatccaaatagaggaggcagctgtcattggagtggactgccttgggtttgacttgagagtgtgctcaggaacacaagtgcagacactgagatttgcgttccctgcaaaggccacttcagagtttggtgcagagaagcaaatacacgaacttctgtttcctaggatacagcaagagggacagtcaccacaaactagacagaaagagtcttgatgtaattcggaggagataatttattcatttggtaggaattactagctaaaataaaatatatgccacatgtcctttttcttccatttatccatggggtagaatttttagattccagttttgtgtcattgtagattgattttatgtatcaatctaccaaagtatttcaaaattctttagacctgttgaggaaagcacagataagagaagcactgtaggagcctctgaatatttggatggcaatcgatacaaataagacgtgccagcaagttcagtagtcaatttataatccaganaacagcaaagcaatgttacattagatggtttgtgtgaaccaaattgtncacaaattcttcttgagcgaatcagtctcaagttacactagtcnagtngtcagcatcacctg

SEQ ID NO: 69483 - DNA, 2490 bp, Oryza sativa
  Clone ID: PAT_MRT4530_70146C.1
atgcccttccgaccgcgcctcccgctccccctcctcctcctcctcctgcctcacctccggcgccgccgctcctccccccgcccgcccgtgcccgcgtggagaccgctctcgtattatccctcggcggcggccgcggcggcggaggtgacggagtccgaggaggacgcggcggctgttggcagggacacccgagcccctccctccatcggcgggattgcacggggagcgcctagggttggctgcaatggcgggggggctgccgatgacgaggaggtcgagaggaaggcccgcgctgtcgcgcggatcaagctctgccatgagcttctgcgggagaggaggtggcgcgcgatgcgggcagccttggcgcagctggtgactgagcaaggatatattgtttttccagaggcattatcaattgatcattaccatataaaaaacagatctgggtctgcagctgctctctgtgacatcttatggaacagattcagagagtgtgattccaacggttgtgtatgggatgctctagcgaacagttatgctagagctcagatggttcatgatgccctttacgttcttagtaaaatgagcagcctaaacatgcaaatctcggtgttcacctatgacagtttattgcacggcttaaggatgacagacgtggcattggagctttttgaagaaatggagtcttgtggtgtctctcccagtgaatattcgcatagtattattattaatggcctctgtaagcaagataaggttggagaagctttatctttccttcaggaagctaggaaggagggaaagtttaaacccttgggaatgacctttaacattcttatgtctgcattgtgtaattgggggtttgttcagtctgcaaaatcatttttatgcctgatgctgaaatatggattagtccctgacaggtataccttttctacccttatacacggtctatgtaaagtaggttcaatggaggaagcattggatcttttcgagagagtgacaaaagaaggaatggaacttgagattgtgacctacaatagccttatcaatgggtaccgattgcttggtttaacaaaagaaattcctaaaatcatccagatgatgagaggccaaggtgttgaacctgatcttgttacatatactatacttattgctggtcactgcgaaagtggtgatgttgaagaaggaatgaaggtaaggaaggatgtcctagaccaaggtttgcagttgaatattgtcacatatagtgtccttctcaatgctctcttcaaaaaaggcatgttctgcgaaattgacaacctactcggcgagatctacaatattggtttggatatggatgttatcgcatattccatccttatccatgggtattgcaagctaggggaaattgaaaaggctcttcaagtatgtaatgcaatgtgcagttctcagagggtaatgccaacatcactgaaccatttttctattcttctaggactttgcaagaaaggattgttagttgaagcaaggtggtatttggaaaatgtagctagaaaatatcagccaactgatgtagtgttctataatgtcgttattgatggttatgcaaaacttggtgatattgtaaatgctgttcgtttgtatgatcagatcactgtagctggtatgcacccaaccattgtcacatgcaattctcttctatatgggtattgtaaaattggggatctgcaacttgccgagagctattttagggctattcagctaagtggacttctaccaacagcagtgacatacactaccttgatggatgcactctctgaagctggagaagttaataccatgctaagtctttttgatgaaatggttgcaaagaggatcaaggcaaatgcagtaacttacagtgtcattgttaaagggctttgtaagcagctcagatttgatgaggctatcaatgttctcaaagatatggatagcaaaggtattaatgctgacccgataacttacaatacccttatacaaggtttctgtgaatcagaaaacgttcagatggctttccacatacatgacatcatgttatgccgtggccttgtgccgacacctgttacttataacttgcttattaatgtgctgtgtttgaagggaaaagttattcaagcagaaatacttttggagtccctcagagaaaatggcattaagttgagaaaatttgcgtacacaacacttatcaaagctcagtgcgcaaaaggaatgcctatcaatgctgttttgttagttggtaagcttctagatgcaggatttgaagcttctattgaagatttcagtgcagcaatcaatcgactttgcaaaagacaatttgccaaagaagcctttatgtttgtcccgattatgctatctgttggtatttacccagatactcaaatatattgtgtgctaggcagagctctgcagaaaaatagtgagcttgtctatctacccatattaaatgcacttgctgttaaaactggtatttaa

SEQ ID NO: 69484 - DNA, 429 bp, Oryza sativa
  Clone ID: PAT_MRT4530_70147C.1
atggtgtctctccttctctccgcccatcgcctcctttccctctcccccggcctcccaccaacggtgcgcggcctcctcctttccgttgccatatccaacgcctccacgagtttggggatggccagatctacaccctctgttgctccctcttggtcttcaccttgctatggcccgttggccaccgtgagctcggagttggatcctgccatccctactatggcggaggcaccgactactagatccacgtgtcatgatgatgaaggcgaccaccagcagcgtcgtggctccttcccgtgcgtggcaagaggatttttatggctttctttgttgatttcttacttgttgatattggttgtaaaaacgatattggttatcccttttatgctgaaatgggtatctagtgcttgggtagtagatgatcctttgtga

SEQ ID NO: 69485 - DNA, 188 bp, Oryza sativa
  Clone ID: PAT_MRT4530_70148C.1
tttgcagaggtacttgcttgggcgaaggaaaagagaccgagctaacgaattcatggatgatcaaagaaattgattggagaacaaaccaagaccttctccaagcccacttccatcttaccgcgtcacttttggtccatagaagacaagagataaagttctacacgttttggattcggattcgggcctcc

SEQ ID NO: 69486 - DNA, 3789 bp, Oryza sativa
  Clone ID: PAT_MRT4530_70149C.1
atggaggccgctgacaagtcgcagaaacgtggcagtggcttgcagaagttggggagcgccgtgtgccggatgccggtgcggccaaagccaaatgttcagctgctatttgttgaactaaagaaagttgtggggttgcaatgggaatggaaagtaaagcagcttaatgacaaagagtttttaatcaactttccatcggatgatgtgagaagtaaaatatccacttgcaagagctttgattttgagacctctctaatcaaggctagtgtggtggagacaggtatgacagaagaggctgttgatgagctagttgctgtttgggtcaaagtatatggcataccaaagattgctaggaatgaggatgctattaagtccattgctgagttggtgggggaatttgaagctctagatggtgctagtatcagaagagatggtccaatcagagtgagagttgcttgtaaggaccctagggaattacacttcgggatgcatgtctatatcaacaaagtgggatacttaatcagatgggagccagaagggtattcgtctattgagaatagaccaattcaccctgatgacgatgacaaagatgacaaagacgagaatgacggcaatgaagacatgaatgttgatgaggattacaagatgcaaagccctactagaggtagacagaaccagaatacaggtgcttcatcaaggggtggacactctgcgccacctgcttacaaaggcaaggaatataagagtggttatgtcaagaagattgcctctaagaaaacctctactatctcatcctcagaactggttttggagaaagaaaaaaagaaagagttagtgtcactacagcaggaaccaaagcacacagagtcaactgagctggtgttgtgggagaaaaagatggagatagtccctatggaacaagaatcccaggaaattgacttctctctatctgctcctctgcactctcaagagaaggagttttctgggaagattgatgctgctttgtgggatgatgagttggagaaatgtgcaatacctactgattcagatatagaaagactaagagaggaagaagacaaggaggaagaaatcagttttcaagaggtttcacacagaaagaaagggaagagcaaatcaacagaacctgcaatctcatctaggatgagcctcaggaatagagagatggcaaccattccagtcactaagagagctgagatcctaacacagaagaagaacttggagagtccggctcaggtgtcgcgatttgatttggcctgtatattactatgtgcagggttccctgcacctgagccggactcgaacttggagacaccagctgagttgaatgctatagcggtagctgctaatattaatctaggtaatagtgatgctgaaataaattctaacattgagacatttagagctaaggagttagtgcaggcctctctagctgcagccagatggaaaatagaatctgaggaaaaagagttgaaagagaaacagttagaggagatggtcaataaagagatatcacaaatagaggagaaccctgatgaggttcctgcgcataagaagagagatgagactaagaaagagagttttaatagtagagagctgaattcttaccaaggggcaaaagagttcttttggtgctggaaagcatccagaggggcgtcaggaggtattcttataggagttaatcaagaggttgcagaggttactaatacacatgtaggggcttatttcctgagttgtgagataaaatgcaagagagataatgaatcctgggaagtgatttctgtttatggtccagttgacaacagtttgagagagagttttctagaggagttaaattggcatttacaattcagacagctccctgtggttgtaggaggagattttaacttgtatagatttgctagtgagaaatcaaacaataacttagattttaggtccatggagaagtttaattctttcattgctaacttagaattaagagagctgtttagaagtggtcccacatttacatggactaacaaacaagagattcctgttcaagtggtcttagatagagtactggtcagcacagattgggatgacaagttccctacctctcttctttcctctatcttgagagttggttctgatcacaccccactccttttagatactaatgagctagatgtgaaggggtgtagttatttcaaatttgagtcagcatggctgatccaagaaaactttgtggagatggtgagattgaagatgacccccagagatgactcttacattttagaatactggaacaaaaaactggttcctctgaggagatttttaaaaggctggtggataaatgtacaaagagatgctaggattaagaaggtagtgctgaaaaatcagttagaagaatgggacttgcaggctgaacaaagagatttgtcatgtgaagaatggaatgagagatatgcaaaagagactgaacttgaacatatatatgagttggaggagctcttatggcataaaagaggtggaggccaatggctactggagggagatagaaacacggaatttttccacagagttgctaatggtagaagaaggaaatgcactattgtttcattagaagaggatggacgcttgataactaataaagatgaactctctgatcacattgtgggttactataaagagctgtttagagctgatactccatctaacatacacttatctcaaggggtttgggaggagagtttttcacttactaatgatgagaagctaaatctcatcagaccttttactagagtagagctggacaaagtgatcagagaagccaagactaatactgcacctggccctgatgggttcaatgtacacttttatagaaccttttgggctgaagtgagagaggacttatttgagatgctcattctcctctacaatggggaacttgatctaaagagattgaactttggtgtgatatctttgattcccaagaaaagtgacccttctgacattagacacttcagacatatatgtgtgctgaatgactgttttaaattcattagtaaagtggttactaatagattcacagaggtggccaactccgtgatctcacccacacagacagctttcattccaggaaggtttattttggagggatgtgtgattgttcatgaggtgctgcatgagttaaaacttaggagcgataaagggatcatttggaaactagattttgagaaagcgtatgatagagtgtcctggaatttcctctttgaagtcatggagaggaagggtttcccagatagatggctgaaatgggtggaagcttgtgtcactgggggtaaagtgtgtgtcaacataaatggggagagaagtaatttttttagaacgtataggggtttgagacagggggatcccctctccccattgctgtttaatatggttagtgatgctctggcagttatgcttgacaaagctaaaggtgcttttcccatgaaatacctggcccttccaattagcccagaaaaattcttaaccatgattttgattttctgggacataaattggaaaagagattgggaacttgggaagcaaatacactttcatatgctggcagagctatccaaattaatgcttgcttatcatccatcccctcctatgcaatgggcttctaccaattacctgaagtggaggaaactctgtcgtgctgaggaagaagggaaactggaacaatttgctgagaagatgaaggagctgacctttaatctgaaaccgagaagaactggagtagggtga

SEQ ID NO: 69487 - DNA, 1641 bp, Oryza sativa
  Clone ID: PAT_MRT4530_7014C.1
atggcgatggcggtggagggtgcgggtgcgggggtggtggtgagcgagccggaggtggtgtcgataccgccgacgccgagggggatgtcgacgccggatgccgcggcgactccggcgccggcagcgggcggggacgcggccacgcccgggaggcgggggggggaggggccgcggggttagctgggggagggggcagaccggtcgcggctgagcgggcaggacccgtgggtgcccatccccgcagcccgcatcgctgacgcccgctacgccgccttccacacactcaaggcaggccgcgtcttccacgcccacctcctccccctcgctttacccgcccttggaccgagtagccggggcataacatcacttactgttgcttattttttgcatctgtactcattatggattgtaatcaagctccctcaggctgcaccacgagcgaggtacagcagatatggggagctggtacaagctatatttgctgatgtaattatttcctctggtaacacaaaactcaaaacatgcaatgttgctaagattctctctgccgatctgatccatttgactggagaaaaactgggaatgtggctatctcttttcccaactatttatctgtcggcaggcagtgcaactgcgttgatccttgttggaggggagaccatgaagctcttttaccaaatagtttgcggcccaatctgttcaccgagtccgatttcgacgatcgaatggtacttggtgttcacatccttggccatagtcctttcccagcttccgaatctcaactcgatagccggcgtttcactcatcggtggcaccaccgcaataacatactgtaccatgtcctgggttctctcggtcagccaaccgcagcctccaacagtctcttatgaaccacaagcatacacttctcttggttcatctttgttctccaccttgaatgctcttggaataatagcatttgcattcagggggcacaatcttgcacttgaaatacaggtgccacagggagggatgctgacggcgctctacgccttccacagccacgacatcccccggggcctccttgctgcgacgttcctccttgtcgtgttcaactgcctgagcagcttccagatatactccatgccggttttcgacagctttgaggctgcctacacgggccggaccaaccggccttgctcggtctgggtgagatcaggcttcagggtgttctacggcttcctctcgctgttcatcagcgtcgcgctgccgttcctctccagcctcgccggcctgcttggggggctgacattgccggtcaccttcgcctacccgtgcttcatgtggatctgcatcaagaagcctgagaggttcagctcaggatggtacctgaactgggggcttgggctgcttggcactgcattcagcctggctctctgtgtgggtggtgtctggagcatcatcagcagtgggatgaagttcaagttcttcaagcccccaagctagattgaccagcaatttccagtatcaaacttgcaaaatcagtacaaattctggtgtgtttgtgatattttcagacaatggaaaagcatatcccatctggcctccgcattgtgggtgtgcttgtcatatggttatatgaatgatatatgatgatgatat

SEQ ID NO: 69488 - DNA, 702 bp, Oryza sativa
  Clone ID: PAT_MRT4530_70150C.1
atggccttcgcctctctcccagtgggcgaacgagtggatggacacgccgaccacggcaccagcagcaatgagcaagaggaaggcgaggcgccagccaggaattcccaagaacgaggtgggcgccatgagaaggccaagagaagtgcgacccacggcgccgaacttgcccgcccccatgagccacccgaacaccacgcccctgctcgtgccatcgacggagttggcgacgaaggtgtagacggtagatcgctggatctgcaacgccagcctgagtgcccgacaatgttcaacgccgcgaacttatttgagatgctcatcctcctctacaatggggaacttgatctaaagagattgaactttggtgtgatatctttgattcccaagaaaagaaggtttattttggaaggatgtgtgattgttcatgaggtgctacatgagttaaaacttaggagggataaagggatcatttggaaactagattttgagaaagcgtatgatagagtgtcctggaatttcctctttgaagtcatggagaggaagggtttcccagatagatggctgaaatgggtggaagcttgtgtcactgggggtaaatggaggaaactctgtcgtgctgaggaagaagggaaactggaacaatttgctgaaaagatgaaggagctgacctctaatatgaaaccgagaagaactggagtaggctga

SEQ ID NO: 69489 - DNA, 1923 bp, Oryza sativa
  Clone ID: PAT_MRT4530_70151C.1
atggagaagtttaattctttcattgctaacttagaattaagagagctgtctagaagtggtcccacatttacatggactaacaaacaagagattcctgttcaagtggtcttagatagcgtactggtcagcacagattgggatgacaagttccctacctctcttctttcctctatcttgagagttggttctgatcacaacccactccttttagatactaatgagctagatgtcaagaggtgtagttatttcaaatttgagtcagcatggctgatccaagaaagctttgtggagatggtgagattgaagatgacccccagagacgactcttacattctagaatactggaacaaaaaactggttgctctgaggagatttttaaaaggctggtggataaatgtacaaagagatgctaggattaagaaggagctcttatggaataaaagaggtgaaggccaatggctactggagggagatagaaacacggaatttttccacagagttgctaatggtagaagaaggaaatgcactattgtttcattagaagaggatggacgcttgataactaataaagatgaactctctgatcacattgtgggttactataaagagctgtttagagctgatactccatctaacatacacttatctcaaggggtttgggaggagagtttttcacttactaatgatgataagctaaatctcatcagaccttttactagagtagagctagacaaagtgatcagagaagccaagactaacattgcacctggccctgatgggttcaatgtacacttttatagaaccttttgggctgaagtgagagaggacttatttgagatgctcattctcctctacaatgggaaacttgatctaaagagattgaactttggtgtgatatctttgattcccaagaaaagtgacccttctgacattagacacttcagacctatatgtgtgctgaatgactgttttaaattcattagtaaagtagttaccaatagattcacagaggtggccaactccgtgatctcacccacacagacagctttcattccaggaaggtttattttggagggatgtgtgattgttcatgaggtgctgcatgagttaaaacttcgaagggataaagggatcatttggaaactagattttgagaaagcgtatgatagagtgtcctggaatttcctctttgaagtcatcgagaggaagggtttcccagatagatggctgaaatgggtggaagcttgtgtcactggggttaaagtgtgtgtcaacataaatggggagagaagtaatttttttagaacgtataggggtttgagacaggggggtcccctctccccattgctgtttaatatggttagtgatgctctggcagttatgcttgacaaagctaaagaaattggaagagagattgggaacttgggaaacaaatacactttcatgctggcagagctgtccaaattaatgcttgcttatcatccatcccctcctatgcaatgggcttctaccaattaccggaagtggaggaaactctgttgtgctgaggaagaagggaaactggaacaatttgctgagaagatgaaggagctgacctctaatctgaaaccgagaagaactggagtaggtggttttggagatgattggaatttaacaggtgatctacaggtgactcgatgcctcgggagagtatttgcggtgatggatcgggagtcgacttggcggaacggcagtctaaccggcaactcaacggcggtcagaccggcggcagacttgcggtcagaccggcggcggcgacatgagctggcaagaaatctcggcggttcgaccgatcgatctacatcggttagaccgacattcttcaggcagtcagtccggcgcttttacttcggccagaccgcgattcatcgaatttgggggtaa

SEQ ID NO: 69490 - DNA, 324 bp, Oryza sativa
  Clone ID: PAT_MRT4530_70152C.1
gtggcagtgttggcacggtgacccaaggagtgatcaggtcagaaaagctccagaacttcatgataccatctgcccaaaattttccacggtttttgtacacggaaacagattacacgggttcagtaattccacggtcctagtttgcacccttgtagccagcttttcagtgaatattaacttcattttgtcgttcagtatttagtccaagtacaagaccatcagacagtaaattcatttgttggagaggagtatcagggcaagaaattacagttcttttctgtgaaaaaagatatgtttttcacacaaaaaaaaaaaaaaaaaaaa

SEQ ID NO: 69491 - DNA, 4168 bp, Oryza sativa
  Clone ID: PAT_MRT4530_70153C.1
acacaacttctgagaaactatagttgtagaatccagaaaatgaactagaagttagaagctgggattctcacaagctaacttttcacccactgcttctcgtaatcttattttggtcctgaatcctaataaatgtaaaaacttgcattcattttgcacccctaaatataaaaatggagtcactggcaaactaccctcaagattatttttttttagaaaggttaccggtgccctcaagattcagattccatcaccatttcagctgttcaagttgatatcagcgtaatcggctggtccgtagggtaccaaccaatctgccagcaaccacttcttcctccgtcgttgaacccccatgtcttggcacagccgatcactgcacagcacgctcaccggcccaatgcaagatcgacggaaacggccgggggaataccgtttcatgtacttgtcccattcatctatgtcctcctccatctcctttacgcttggcaatctgaagcttccatggaggaaatgtgccagccacttggacagtagctcggacacgcagaggttcgaccagctttcagcgtagccgatgatcgccagctgtgggatcctaggatggatgcattgcctgaagtgtggaactatgctggaaggtgggccggccacgatttctctgaacaatggcgatttgaacatctccctgatcttctggtcgccattgaaccctgtagcgaagatcaccacgtcgctctttatggtctctgaagacgagtcgccttccacgaccaggccttccttgcagaagctgaatctcttcgatttcttcagaacgatgcttccttcctccaccttgtcgtagaacttgtccggtagcttcatcacagagcatgagcacatggcctccatgaaatcctcgtccggcaccatgccgtgcttctccatgggcagagcccatttgtagtagctctcaacaaacttggcgaagagccatctcagtggtgataagaggatggctagaaagctaaggatcaagccatccccaggcttgtgaagcaagatctgggacaaacggttgatgtagaacaccggaaccgggacgccccaagcgtacaagtccggcacgatccatcgcttcgtgcgtagcactatcgtgcacggatgcgacgccccattggcgtctgcgcactcggcggcgatgtcgacggcggatttctggtagccgacgacggcgacgcgcttgcccttgacgagctgagccgccttcgcggcgcccatgttggagtagtccatggagtggatcgccgtgccggcgaacgcctctggccctttgtccggtggaaatctcggcatgttggggaagccgctgaaccgtccgatgcacagcaccacgaaatccgcgacgtgcagataatatgaaaccgagtaggagtagttatttgtgcttgcctcaatgttgtggccgctctgcacagtgagccgccactcgccgcggccggtgccgaacgcctcgccattgccggcccagtgctcccaggccatgacctcctcctccccgccggcggcggcgtactccatgccggcgacgcggcagccgaagcggacgcactccagcacgccgaagcgctccgcgtacgagcgcaggtaggccgtcacctggtcgtggtccgggtacaggtcggtgacgcccggcggccacgggaagtcggagtactcgaagtaggggcgcggcgtctggagccgcgtggaggcgatggtgcgcgcccacacgccgccgacggcgccggccccgtcggcctcgaagacgacgggccggaagccgcgctccagcgcgtgcttgcacgcggcgaggccgctcacgccggcgccgacgatggccaccctcttcttgatcttctccattcgagatcgatcgccccggagctaaagcttacaagtgtaatgagacggtacactgtcgatctgcttgggaacttatttgagatgctcatcctcctctacaatggggaacttgatctaaagagattgaactttggtgtgatatctttgattcccaagaaaagtgacccttctgacattagacacttcagacctatatgcgtgctgaatgacaaatttaaattcattagtaaagtagttaccaatagattcacagaggtggccaactccgtgatctcacccgcacagacagctttcattccaggaaggtttattttggaaggatgtgtgattgttcatgaggtgctacatgagttaaaacttaggagggataaagggatcatttggaaactagattttgagaaagcgtatgatagagtgtcctggaatttcctctttgaagtcatggagaggaagggtttcccagatagatggctgaaatgggtggaagcttgtgtcactgggggtaaagtgtgtgtcaacataaatggggagagaagtaatttttttagaacgtataggggtgtgagacagggggatcccctctctccattgctgtttaatatggttagtgatgctctggcagttatgcttgacaaagctaaaggtaatggtgttttgactggtttagtccctgaaatttttcctgggggtatcactcacctacaatatgctgatgatactgtggtgtttattccttttgatgaaaatcaaatcctagcaactaaatttatcctatactgttttgaggatacggctggtatgaaaatcaattaccataaaagcgaggtgttcactgtggggttggaaaaagaggaaacagatagagttgctcagatgttgaactgccctgtaggtgcttttcccatgaaatacctgggccttccaattagcccagaaaaaattcttaaccatgattttgattttttgggacagaaattggaaaagagattgggaacttaggaaacaaatacactttcacatgctggtagagctgtccaaattaatgcttgcttatcatccatcctctcctatgcaatgggcttctaccaattaccggaaggtatacataagaggtttgactctattagagggaggtattactgggctggaaataaaaaaaagagggaaataccatatggtgaagtgggatgacatagcttttcctaaggattttggtgggctaggattcactgaaactaggaagatgaatgctgccttaattgctaaatggatcatgaaactggaatctgaggaccatagcccatgtatagagttgctgaggaggaagtatttacagaatagtggggtgtttcaagttactctaggggattgctctcaattttggaagggggttctcaattccagaaaatggttcatgttgggggctgagtggaagttaggtagaggtgaccatatttctttctggcatgatttttgggttgggtcatgtcctctgacagtgagattttataggatctttgagatcagtaactaacaagacattctggttagagtggtgttaaaggaaggatataactgcttatcctttagaagatcttttggtccagatgaagtagaggagtggaatgagttgaaaactgttattttaaatactaagttggaagataggcaagatctgctctgttgggggtctcaattcaaacaagagttttactacgaaatctatgtatagagctatgtgtttcagagggattgttgataaggagatggagaaaatttggaaagcgccatgtccaatgaaaatcaaacatttcttatggctggctcatagagatcgtattcaatatgctgaacaattgcaaaagaaaggatggggaggggagatgttaattgtagcctgtgtggagattttgagtctactaatcacatcctttttgtatgccctatggctcgctttgtgtgatgttggtgtagagatgttctgaactagccttaccctcctaaaaatcttgatgagttttttctcttatgcaaccatagctctgcatttattaatgatagattacatattatgttgctagctgccatttgctggtgtttgtggctgacaagaaacaacatggttttcagaaaaactctactttactcaccactaactttgccgtttcaaattatttctttgttgttgcagtggaggaaactctgtcgtgctgaggaagaagggaaactggaacaatttgctgaaaagatgaaggagctgacctctaatatgaaaccgagaagaact

SEQ ID NO: 69492 - DNA, 1482 bp, Oryza sativa
  Clone ID: PAT_MRT4530_70154C.1
atggaggcggacatggatatgccagatccggaggagctcgagtggatggagagccacgggctcctcccggaggaggaagaggagtacgcctacttcgacgaccccgaggacgaggggttcctccctgccgccgccggagcggaccagccgcggcgttccccgcaggagaccaccgctgccccctcgaaacctgcagatgaagtgtcggaaggcaatttgaagcggcctccccctccgcctccgccggagcagggggaggagaggagcaagcggaggaatgtggatcgtgaggattccggggatggggacgaggactggctgcggtactcgccgcctcctgttgttgaagttgtcgccgagaagacaatctcgcggttcgcgtcggacatccggggggactgtatgtctgtcaccgcgcccaatggtgagagggtttatgcgaaggttgcaacagacgggttggatgggggaggaatcgggggaactagacaaaggactcgcatttccaaaccaaatttcaattacaaggggcttctctcagaatcctttcattcgctgacaagtcgtgctgagcaagaggctctagcaaagaccatgttgattgcagtaggtcataagctaaatgcagtatatcttactgatccatattttgcaatggttatgaaggcattgcaggagagtgcagaaacacaaaatcttgagagttgcccagtgactccgctagttacagagcaactttgggtggaaaaatactcaccaaattctttcacagagctgttaagtgatgaacacacaaacagggaggtacttctgtggctaaaacagtgggactcctgtgtgtttggatcccacgttcgtgctacaggtgatgatgttttgtctgccttacgccgacattcttctgctattcaaaagaattcaagtaacagaaatttcttctccaagagtaagggaggtcctggtatgagtcaagacaacatgctccaaaatgcacatggtagcaactcagaggatttgacaagctcctttaacaagaggcccacgactgataatgcaccagaacaaaaggtgttactactatgtggtccacctgggcttggcaagacaacacttgcccatgttgcagctaaacattgtggctaccatgttgtggagataaatgcgagtgatgatcgttctgcttcatccattgaaccgaaaattcttgatgtcattcagatgaactcaatcatgtctgattcgaaacccaagtgtctggtaattgatgaaattgatggagcacttggtgatggcaaaggtgcagtcgagatcaatgctgaaaagaacaacagttctaacagcagcactagtgctgaagatactcaagtacgaaagtcctcaaagaaaggtcacaaaataccaaaactgatgagacctgtaatttgtatatgcaatgatctttatgctccagctctgagacaacttcgccaagtagctaagtaa

SEQ ID NO: 69493 - DNA, 106 bp, Oryza sativa
  Clone ID: PAT_MRT4530_70156C.1
tcgttgatacttcttcagtgaatctgcctagtagtactagataagatatgcttccttttcagcaagtttaggtatctaattcttgatgttaggtagcatcatgtat

SEQ ID NO: 69494 - DNA, 333 bp, Oryza sativa
  Clone ID: PAT_MRT4530_70157C.1
atgccctcgccggcggcggccgcggccgcgctcgcgaccgtccttgccggcggcggcggcgcccgcacccgccaagcgaccgtcctcgccggcagccgcgcccctccgcgacctccccgcgagcgtcctcaccagcagcagctgcgcccgcgcccgcgcccgcgagcgctccgtgacaggtggcggccgcgcccgctcctcgcgctcgcgactgtcctcgccggcggcggcctcatcctctcaccgctcgccagcgcctcatcgtcctcgccgctcgtcttctcactgtgcagacgtgagccgctcgccttctcactctgcagacgtgagtga

SEQ ID NO: 69495 - DNA, 474 bp, Oryza sativa
  Clone ID: PAT_MRT4530_70158C.1
atgacctacattctcctccgcgcgcgcgagaccccggctggtacggtgcgcgcagggtgtgcgtgcgtgcataatacagatgagagaggagagggttgggggaaaaggcaaaggagggacagagaggaggtagctagatgcatgagagagagggaattagaccggctggccaaaagcgtacgtgtggaggagggggaggaggaggaggagggtggagtggagatggggcaacctgattcgatcgcgaggacgtcccaccacaccacaccacaccacaccgccccacctgcaacacgcacaacaccctactacttggcagcacgattgatcgcctgtcagtcagtcgtctctcgcggatggatcgagtcgcggggggtggcggctgggctggctgcggtgtgcgcgcgcgtgcgtgaccgcgtgagatggggatggatttgggagagagagggacttttagatatgaggtcaccg

SEQ ID NO: 69496 - DNA, 402 bp, Oryza sativa
  Clone ID: PAT_MRT4530_70159C.1
atggaacccgtctgcgtgtgctccttcaacccggcaaccaagcaccaccgtgctcctccatctgtccgttgtgccgctgccgccgccattggagaggctaatggtgttggagaagttggttggccagacgatgtcgcacttggcattttcaagcagctatggcgagatgagaatggtcgggtaccgccattgtctggcggcggagcagctaaggtgtactgcgacgtagaattgtggttaaatctcagaacaatccatcagagttcagatgataaatcagaggatggtgaggctctgctggtgagtgcaggcctcatggtgaccaaagcagattcatttgcacgagctcttagagaaatcctgctagcttccaaaaatctagcaacagcatactctgcatag

SEQ ID NO: 69497 - DNA, 6465 bp, Oryza sativa
  Clone ID: PAT_MRT4530_7015C.1
atggccgagaaagcagtgccaccaagcccaggctccgttagaggcaaagcgccaaagccagggttgaccgacatcattgaggacaatgtcctgccggttgatcccgacaagttcacacttgaccagaagcaggagttggaagcaatgatgcaacaagcgcgagatcagtatctgagctcattcatgcaaactcggaagggaacgctggttcagaagtacaagatgaagctagtcgccgatatccctggaaccggaaatcaaggcgataaccttccagagatgcttggagctctaagtcgtattgcccaagaactacaaggaggaaatttcagtcaagatattcaggagtctttcaacaactttcaggatcgggttgactacgcggtgcaccatgctttgatcaatcaatccggggtattagtcaacacactgtcaaacatgatgaagacgatagccgatggctcgatagctgagcatcaggctacaggcctggtctacttgccaggaggtgtttttccaagctatcgaaccttaatcactgatgctcaaccagttgtgcaggcagctccacctatcgcacccgtggctcaatcaacagcatcagcatcaacacccttacctgctgcatcggctaccgcggcagctcagccgatgaaccctcgattactaatgagggaatattcacagcctgctggacagacctcgaatcagccaactcaagatcaggttgctgctttgtttctcccaccaccaccagttgttgatccggcgcaacagcagccgatccagcaggcaccaccaattcagctggtggtgcagtcgatccagcaacaagtcgtgcagccaacgcagcaggcaccatcaactcagctggtggtgcaacagatccaacagcaggtcgcgcagccagcgcaccaagcaccaccaactcagccggtggtgcaaccgatccaaccgcaggccgtacagccaatgcagcaggcaccgctaattcagccgatggtacatccggcccaacaacaagttgcgcagccggttcaacaagcgccgttaacccagcagcatctccaaccaatccagcaaacgccaccaaggcaacggcttcagccgattcaacagactccggtacggcaacagccgatccagcacttggggtcagccaatgcatcggctgggttcgcagcacttggggggcaacctgcgcagcaagttgtgaatcaagccaccccagaacatttggttcatcacgtacaaccggacggcaccgtgataccccagatggttcctgagcacttgtttaagcccatgcagcagcaatcgcatggagcaggtcagcaacgaccatgggccgatgtgattgccgacgtaatgagggagcaatttgggctcaggccaaaagagactgggagtttgtatcggcaaccttatcccgagtggttcgagagggttcctcttcccaatcggtttaaaattccagatttctccaagttttcaggacaagagggcgtgtcaacttatgagtacatcagccgatatcttgctcagtgtggagaagcatcggctgtggacgccttgagagttaggatgttccgattatctttgtccggatcagcttttacctggttctcatctttgccatatgggtcggtcaatagttgggccgatttagagaagcagttccacagctatttctacagcggggtccacaaaatgaagttgtccgatttaacagcaatcaaacagcggtatgatgagcctgtacacgagtatattcagaggttcagagagatgaggaacaagtgcttcagcttaagtttgaccgatgcccagttagccgatttggctttccagggtatgatccctccaatcagggagaagttctcatccgaagacttcgatagcctatcacatttgatacaaaaggtaaccttgcatgagcataggtcggttgacgtcaggaggagctctaaaaaggttaaccacgtttgcccgtatatgtatggatcggacgatgaagatgatgactctgagatagctgcagccgagtgggtaaggagcaaaaaggttataccgtgtcaatgggtttttagacagcaaatccaagtggctatcgaagggggaaagattaagtttgacgattccaagaagccgatgaaggtcgatgggaatccttttcccgtcaatatggtgcatacagcaagtcaagcagccgatggacctcgttcaaagggtttccaagtacattcggctagaattattgataaatatcaaaggaggtatgataagcaccaggggagacgttatgaggagaacgacaatggttttgatcctcattgggattgtgagttcttcagattctgctggaacgaaagaatgaggttgccatctattgaaaactgtcctgggtgtagtgatgtcattgagagctcaagccgaccacataataggggtgatcggccaagacagacaagactccctgttcatcaaaggttgggtccgatgggtcaagatcatggtcgagaagacgagccgaccaggaagaatcaatggtgtccttctggtattttcacaaagaaccagaaaaggagggtccagagattgaggagcagggaacattttcaggaggttgaagaggaaatcaatcatcggctgaagaaaccaagaccgaggcaggtgtggcgcgttaagagtcaagctcctgcagccgatgatgctacagccgatgaagcgaagaggttggcaaaaggaaagagtgttgttacagcaccaatcaacatggtctttacgctgccaaccgaattcggaattagtcaggccgatgtcgatgaagtggaagaagaatcggccaagctagtcctatcatcggagcaggcggtatttgagaagcccaagggaacggagaatcggcatcttaagccattgtatgtaaatggctacgtcaatgggaagccgatgtctaaaatgatggtcgatggtggggctgcggtgaatttgatgccttatgctacgttcaggaagctgggtaggaatgccgaggatctcatcaagacaaatgtggtgctcaaagattttggcagtaacccatcagaaaccaaaggtgttttaaatgtggagttgacagtcggcaacaaaactattcctaccacgttttttgtcattgatgggaagggttcatatagtttattgcttggaagagattggattcatgccaattgttgtatcccttcaactatgcatcagtgcttgattcagtggcaaggtgacaagatagaggttgtgccagccgacagatggagaatccaagctattactttgagggcgttgtggagggttcagcagggtcaaggttttatgtcggccgatgatttggaagaaattgatataggtccaggtgatctgccaaggccgacattcattagcaaaggtttgtcttcggagttcagaaccaagttgatagaactcctaaaagagtttagagattgcttcgcttgggaatattatgagatgcccggactcagccgatcgatcgtcgaacatcggctacctatcaaaccaggagttagaccacgtcagcaacctccaaggagatgtaaagccgatatgctcgaacctgttaaggctgagattaaacgattgtacgatgctggttttattcgtccctgccgatatgcagagtgggtctctagcatagttccagttattaaaaagaatggcaaggtcagggtgtgtattgattttcgatatttgaataaagcgacaccgaaggacgaatatccaatgccagtagctgatcagctggtcgatgccgcattaggaaacaagattttgcgttttatggatgggaacgcaggttataatcagatctttatggctgaggaagatatacataaaacggcctttagatgtcctggtgcaatcggcttatttgaatgggttattatgactttcggcctgaagagtgctggagcgacatatcagcgggccatgaactatatatatcatgatctgatcggctcattggtcgaagtttatattgacgatgtggttgtcaagtccaaaaaagttgctgatcacatagccgatttaagaaaagtcttcgagagaaccaggaaatatggcttgaagatgaatccgacaaaatgtgcttttggtgtatcggctggcaagtttttgggatttcttgttcatgaaagagggatcgaggtaactcagcggagcattaacgcaatccaaagaattaaacccccgaaaaataaaaccgagttacaagagatgatcggaaagttggaacctttcacgcctttattgaggttgagagccgatcagcaatttacttggggggcagagcagcaaaaagctttggataatatcaaggaatatcttagctctcctcctgttttgatttccccacagaagggaataccgttccgattgtatttatcggccggtgagaagtcaatcggctcagttctggttcaggagctggaagggaaggagcgagttgtgttctatcttagtcgacggctcctggatgctgagactcggtattctcccgtggagaagttatgcttgtgcctttatttttcgtgtacgaggttgaggcattatctattacctaatgagtgcactgttatatgcaaagccgatgtagtcagatacatgctgtcggctccgatattaaagggacgagttggaaaatggatattttctttatccgagtttgatcttcattgtggacaagctatagccgatttcattgtggaacatcgtgatgattcaatcggctcggttgaaatagtgccatggactttattctttgatggatcggtctgtacccatggttgtggcatcggcttagttataatttcccctcggggggcatgttttgagtttgcttatactattaaaccatatgcaactaataatcaagctgaatatgaggcagtgctcaaggggttgcagttactcaaggaagttgaagccgatattattgaaatcatgggggattctttgctagtaatcagccagttggcaggcgaatatgaatgcaagaatgatacattgctggtttataatgagaagtgcctagagctaatgaaagagtttcggctggttactttgaagcatgtatctcgagaccaaaatcttgaagctaatgatttggctcaaggggcatcgggatataagccgatgatcaaggatgtgaaggttgagattgcagcaatatcagccgatgattggaggtacgatgtgcatcagtatttgagcaatccttctcgattggcttctaggaaattacgatataaggcgttgaagtatacattgctggatgacgagctctattatcggacgattgatggggctaaggttgcaatcggtgaagttcatgagggaatctgtggtactcatcaatcggctcacaagatgaaatggttgcttcgatgtacaggatatttttggccgacgatgttggaggattgtttccgatattataagggttgtcaagattgtcagaagtttggagcaattcgacgagcaccggcgtcggctatgaatcctataatcaaaccatggccgttcagaggttggggaattgatatgattggcatgataaacccaccatcaagcaaaggacataaatttatattggtggcgaccgattatttcaccaaatgggtagaagcaattcccttgaagaaagttgattcgggagatgccattcagtttgttaaagagcatatagtctatcaatttggtcttcctcaaactattactacggatcagggttccatattcgtgtccgatgagtttgttcagtttgctgatagcgtgggtatcaagttgttgaattcttcaccttattatgcacaagctaatgggcaagccgaggcgtccaataagagtttgatcaagttgatcaagcggaagatttccgattatcctcggcagtggcatactcgtttggctgaagcattatggtcttataggatggcttgtcatggattgatccaagttcctccttacaaactcgtctatggacatgaggctgttctgccttgggaagttagaatcggctctcgccgaacggagttgcaaaatgatttgacagccgatgagtattacaatcttatggccgatgagagggaggatttggttcagtcacgtttgcgagcccttgcgaaggttactaaggataaggaacgagttgctcggcattataataagaaagttgtgcctaaggatttttcagagggtgaacttgtctggaagttgatattgccgattggtactcgtgatagtaaattcggcaagtggtcgccgaattgggagggaccgttccagattcataaagttgtttctaagggagcatatatgttgcaagggcttgatggtgaagtttatggacgagcgcttaatggtaaatacttgaagaagtactatccgagtatatggatcaattcctga

SEQ ID NO: 69498 - DNA, 289 bp, Oryza sativa
  Clone ID: PAT_MRT4530_70160C.1
ctgcaggctcagtcgcgcgccagagcctgatctgtccagagtcacgagcctgaacaccgcaactcctacgccccctctctaccaccgcatatcgcatgtcaaactcgacactcaagagtgttgaccctccagtatcgacagcactccctggcgattccttccagctgctgcctgaagcttcgaaagcgggtcaggcagaagatgcgctcttcgaggaacaggtacaagccgtaaaggactggtgggcgtcaccacggtacaaaggtatcaagcgcccatactctgccga

SEQ ID NO: 69499 - DNA, 262 bp, Oryza sativa
  unsure (1)..(262): unsure at all n locations
  Clone ID: PAT_MRT4530_70161C.1
tttcgattcctctcctctcctctccttccaccgcctaacgaaccactcgccatcaaagccnnnagagagcgcgccatggcggcgcanggncggtggccgacgtcgacgctggcggcggtggcagtcgccgtagtagtactactggcggcgtcggcagcgacgaggcggaggcgcagtcggcgcgtcggggcgcgngngccagcggggccggtgctggaccaggcgtgcctaacggcgctgctgaacatntcggactgcctga

SEQ ID NO: 69500 - DNA, 240 bp, Oryza sativa
  Clone ID: PAT_MRT4530_70162C.1
aacaacaagaaagaaaatatcctgtgctcgtacaaattagtaatagaaatatctaatctctcccaggaaatagtactacttcctgctaatggttgagtagtgggcactgacaggcgatcagctaccggccttcttgttgtcgacatcggagcagggttagcctttcattgatcatatattggccgcataccgcttagctaaccatggcgcggccagactgaaccatacacgtccttcttt

SEQ ID NO: 69501 - DNA, 659 bp, Oryza sativa
  Clone ID: PAT_MRT4530_70163C.1
gtctgtcatatcatcaattagactgcaaaaattcaatccaggaacagtttctacaccagatagtaatagtagcacccttgaaattgggattttattcactataacaataaacattttatttggtttcaaaaaagaaaagaaaataaaataaacatctagtggtgctaggttgaatagttggatagaccaatcattgaagcgccatccttctctcaacaagaagtaggacaaggacctcctcagcttctttgcttcatgttctcttttcaacattttcctttcaactttgatcttttttatggtgaatgtattcccaacttctcatccacaaaggagtcatcttctgttgactggctagtatggctgtcaattaccagctagagtatcaatccagtctggttcacccattaccaaggaaaaaaaacagagagagaaggttctacagtttcatggcctacaaaaaagaacaggcggaagatagaagcttctaaactttctttttgtgtgatgcaaactgtagtctgatctggggagcattccacccaattcaaaaggaatgaataaaaatccctactcacattttaagtgaacccagaaaaaaggaggcaatatttcttgacaggaatttcaaaaggatgggccaaaattcatttctcttg

SEQ ID NO: 69502 - DNA, 405 bp, Oryza sativa
  Clone ID: PAT_MRT4530_70164C.1
gggagggcccatttaaaattcaactaataacagatccaatcagaatacaacagaattcaaacaatatttcatttaaaattcaacctaataacaggaaatttgaaaacagaaaacaaagcaattttttaaaacattgaagggaaacactccttggttttgggcctccactcatagcaaaaaggggatggaattacataagggcctttttggtgaggggcaaagggaatttttgggtacaacttaaacatggcttttggagatgggcttataaaaaatttcccaattaccctaatataaggttatcaaccatttagggcccgggatcttaaaatttatttcaaccatttaccggttttgagctgcaaattggaaacttccacacatccaaagaaccaacctggaaaa

SEQ ID NO: 69503 - DNA, 3397 bp, Oryza sativa
  Clone ID: PAT_MRT4530_70165C.1
cggtgccggaggccccgggtcgacccacgcgtccgttccattcggtgcctctgcccggagccgaactccgacgccttatcgactcactcaccaagtgctcgacgcaattccccaccggggagcccgcccgccatgccggagagcaacggcgccgcgtgcggcgcggcggagaaggtgaagccggcggccagccccgcgtcggaggagccggccgccatcgccggtaacatctccttccacgcgcagtacagcccccacttctcgccgctcgcgttcggccccgagcaggccttctactccaccgccgagagcgtccgcgatcacctcgtccagagatggaacgagacgtacttgcatttccacaagacggatccgaagcagacgtactacctctccatggagtacctgcagggccgcgcgctcaccaacgccgtcggcaacctcggcatcaccggcgcctacgcggaggccgtgaagaagttcgggtacgagctcgaggccctcgtcgggcaggaaaaagatgcagctctgggaaatggtggcttgggtaggctcgcatcttgctttttggattcgatggcaacactaaatttgcctgcttggggatatggtctgcggtaccgatatggtctattcaaacaatgcatcaccaaggaaggccaggaagaaattgctgaagattggcttgagaagttcagcccatgggaaattgtcaggcatgacattgtatacccaatcagattttttggccacgttgagattttgccagatggatctcgtaaatgggtggggggagaagttctcaatgctttagcatatgatgtgccaattcctgggtacaagacaaaaaatgcaatcagtcttcgtctttgggacgcaaaagctagtgcggaggattttaacttatttcaattcaatgatggccagtatgagtccgctgctcaacttcatgctagggcacaacagatatgtgccgttctctatcccggtgatgctacagaagaaggaaagcttctcagactgaagcaacagtatttcctttgcagtgcatcgcttcaggatatttttttcaggtttaaagaaaggaaagctgacagagtttctgggaaatggagtgagttccctgcaaaagttgctgttcaattgaatgacactcacccaactcttgcgattcctgagctgatgaggctactcatggatgtggagggacttggttgggatgaagcatgggatatcacaaataaaacaattgcctacaccaatcacactgttcttcctgaagcccttgagaaatggtcgcagattgtaatgaggaaattacttccacgacacatggaaattatcgaggaaattgacaagcggttcaaggaaatggtaatctccacccggaaggaaatggagggaaagattgactccatgagaatcttagacaactcaaatcctcagaagccagtagtgcgcatggcaaatttgtgcgtagtgtctgcccatacggtgaatggagtggctgagttacacagcaacattttgaaggaagagctttttgcagactatctctctatatggcccaacaaatttcagaacaaaacaaatggaattacacctcgtagatggctccgtttctgcaacccagagttgagtgaaatagtaacaaaatggctaaaaacagatcagtggacaagcaaccttgatcttcttaccggacttcggaaatttgcagatgatgaaaagcttcatgctgagtgggcatcagctaagttggctagcaaaaaacgcctagccaagcatgtgttggatgtgacaggtgttacaatcgacccaaatagcctttttgatatacaaattaaacgcattcatgagtacaagagacagctgctaaacattttgggagctgtttacagatacaagaagttaaagggaatgagtgcagaggagagacaaaaagttacgccacgcactgtcatgatagggggaaaagcattcgcgacttacaccaatgccaaaagaatagtaaaattggtaaatgatgttggtgctgtggtgaacaatgatcctgatgttaataaatacctaaaggtggtgttcattcccaactacaatgtatctgtggccgaggtgctcattcctgggagtgaactgtcacagcacatcagtaccgcaggcatggaagcaagtggaacgagtaatatgaaattctctctgaatggttgtgttatcattggtactcttgatggagctaatgttgagataagagaggaagtgggacaagaaaatttcttcctttttggtgccaaggcagatcaagttgctgggctgaggaaggatagagagaatggcttgttcaaaccagacccacgttttgaagaagccaagcagcttataaggagtggtgcttttggcacctatgactatgctcccctcttggattctcttgaaggaaattctggatttggtcgtggtgattatttcctcgttggctatgatttcccaagctatattgatgcacaggcccaggttgatgaagcctacaaggataagaaaaaatggatcaagatgtctatactgaacacagctggaagtggcaaattcagcagcgaccgtactatcgctcagtatgcaaaggaaatatggggcattactgctagccctgtctcctaaatacgagatgcaccaagacgaagctcatcaagatggacgctatattatgcaataataaggattagataacgatccacggtgaataacacttgcttccgttgtaagctggagcgcggagaacccagcaacgagtgaagctggcactttgaagtgcgctggaaaacgcaaccctcttttgctttatgctaatatatatgtatttggtctggaacaaggtacttgtgagatgtactggatggaatcttccgtcacaaaataaaacgattcaaatttttggttaaaaaaaaaaaaaaaaaaaaaaaaaaaaaattgcccgccgcgtcgcgctcacgagatcccagaagaggacgcacggcggagcgggagcggaagctagcaagcaagcaagcaaagcaagcggccacgaagccatggcggcgccgtcctccctcgcgtcgtcctcgcacctgtcccgccgcgccaccgccgcggcgtcgccgtcgatccctcctccttctccccctcctcctccgcagcggctccggtgcggctgggtcggacgcgcggcgccgccgacgcggcgcgcgccaggtgtttgctccgtggtctcgcccagcaagccaggtgttgctgctgttgacgtgccggccgcgacgattcctgacgcggcggcgaccggcgtcggcgtcgccgagcgcatttcggtgtcgtcgctgctggaggttgtggcggacgacttgctcaagcttaacaacaacct

SEQ ID NO: 69504 - DNA, 466 bp, Oryza sativa
  unsure (1)..(466): unsure at all n locations
  Clone ID: PAT_MRT4530_70166C.1
gggggccgggtttttaggcaaacatgaaaaaaagaggcattacagttagatcgacacacagttagcatacttcacgtggagatgtcacgaagcaaactgtagcggcccaacgcctaggaggaaagacagtcattacaagagacgcggcagaacggtagggggggggggtccccccttttttgctaagaagcatagccgaccacgacaacgggtagagcgcgaagaaaggaggccccccctccgaactgactgcagacagcatatgcagaaaggcgttgaaggatgcccatgcaaagaaaagacgtgaagactgcaacagcactgaaaaggacagtgggaccaacacaacccgaggtgggggaagactaccatgnaagacactcctaccacgatgagccaccaccaaggaggtgcccttgaccaccgaccacggacataacagcgcgtgcgatgaccgaacaacgag

SEQ ID NO: 69505 - DNA, 270 bp, Oryza sativa
  Clone ID: PAT_MRT4530_70167C.1
atgttgtctgtgagctgcccgagagtgtacatgagcaggaaggcgctggatttcggtcagctggcctcctgccggtgccgttgggctggccggtccggcatgcgggtggcgccgaggcggcgcatgccatgccttgctgcagttgatgtgccagcagaggcgatttctagtgcgagaacaacaacaatgatccctgagcgaatttctgtttcttcacttttggaggttgtctccgacgacctgctgaaactcaacaataatctgaaatcg

SEQ ID NO: 69506 - DNA, 1751 bp, Oryza sativa
  Clone ID: PAT_MRT4530_70168C.1
atggcggcgccgtcctccctcgcgtcgtcctcgcacctgtcccgccgcgccaccgccgcggcgtcgccgtcgatccctcctccttctccccctcctcctccgcagcggctccggtgcggctgggtcggacgcgcggcgccgccgacgcggcgcgcgccaggtgtttgctccgtggtctcgcccagcaagccaggttctctctctgcggctcctctgctggtttgccttgctctcggcggcggcggtgttgggcgggtgaggctgagcagttgggtgtgctttggtgtaggtgttgctgctgttgacgtgccggccgcgacgattcctgacgcggcggcgaccggcgtcggcgtcgccgagcgcatttcggtgtcgtcgctgctggaggttgtggcggacgacttgctcaagcttaacaacaacctcaaatcggtgagcttcaccttttcctcccaaagtttgcatcattctgttcagcttgttcatgatacaaaaaatccagttttagtttctgcggctgaacaaatatttggtgccggtggaaaaagattaagaccggcactagtttttctggtatccagagcaactgctgaattggctggtttattggaactaactacagaacaccaacgtttggcagagatcatagagatgatccacactgcaagtttaatacatgacgacgtcatagatgatagtgggatgcgaagagggaaagaaactattcatcagctatatggaacacgggtggctgtacttgctggtgattttatgtttgcacaatcttcttggttccttgcgaaccttgaaaacatcgaagttattaagctcatcagtcaggtgatcaaggactttgccagtggtgaaataaaacaagcatctactctttttgactgtgacatcacccttgatgattacttgctcaagagctattacaagactgcttctctgattgcagcaagcacaaggtctgctgcaatattcagtggtgtaagcaccactatatgcgaacaaatgtatgaatacggaaggaatctcgggctctcgttccaggtagtagatgatattcttgactttacccaatcagctgagcaacttgggaaaccagcagggagtgacttagcaaagggaaacctgacagctccagtcatattcgctttgcaagatgaacccaaactaagggagataatcgattctgagttcagtgaaagtgattcattggctactgcaatcgacttggttcacagaagtggtggaataagaagggcgcaggagcttgcaaaggagaaaggtgacttggctctccaaaatttgcagtgccttcccaagagccagttcagaagtacccttgagaacgtggtgaaatataatcttcagaggattgactgatggattcacttgattcctctgaatcacttgatttctctgaatataagatgctcgcacccatgtgggttagtagctcccaaagaagttcatcttgctagaataatgtcgatcttgggaagatgattacaagcagcaactttttgttgtggatccaccaccaacatgtatcatagcatcctattttgcagtttatgtaactacaaggcagataaaggaactaaggaagcatagtgtatatttcatagtagtttcagcttcttgatacacgaaatagtatttttttcccctcccctttctgccatttcatttgtcattggagaacgactatgaattaattaacatgattatactttatagccagc

SEQ ID NO: 69507 - DNA, 198 bp, Oryza sativa
  Clone ID: PAT_MRT4530_70169C.1
atgaaggtaaatctggataactcgcggctctacgccggcctcagctacgcctgctacgcgtcatcggccacctccccgtccaccaacggccacgtccccatctcgccggacatcccctacctcggcgcggtgttccacaccggcaactggacgaacaccgcgggcggttcacactactacagatccgggcttcagtga

SEQ ID NO: 69508 - DNA, 529 bp, Oryza sativa
  unsure (1)..(529): unsure at all n locations
  Clone ID: PAT_MRT4530_7016C.1
ctcaactcgatagccggcgtttcactcatcggtggcaccaccgcaataacatactgtaccatgtcctgggttctctcggtcagccaaccgcagcctccaacagtctcttatgaaccacaagcatacacttctcttggttcatctttgttctccaccttgaatgctcttggaataatagcatttgcattcagggggcacaatcttgcacttgaaatacaggcgacaatgccgtcgactttcaaacatccagcacatgtcccgatgtggcgcggggccaaagtcgcatatgccctgattgcaatgtgcctcttccctgtcgcgatcggaggttactgggcctatggaaacatggtgccacagggagggatgctgacggcgctctacgccttccacagccacgacatcccccggggcctccttgtggngacgttcctccttgggcgtgttcaactgcctgagcagcttccagatatactcatgcccgggntttcgacagctttgaggctgcctacacgggccggaccaaccg

SEQ ID NO: 69509 - DNA, 1461 bp, Oryza sativa
  Clone ID: PAT_MRT4530_70170C.1
cttccttccttccaaaaaggaagaggggaaaaaaaatctatagccaccaaattgagcaagattctcacacgaaaccaatcacaagctagcattcgtttaatttcttggctgctattgtccggggaagaggttcttggtgtccaaagaatttgtcggttctagggagctccaagttgctgtagcttcatttcttggttctttgggttcttggattggcggtactgattgtgggagatgttgtctgtgagctgcccgagagtgtacatgagcaggaaggcgctggatttcggtcagctggcctcctgccggtgccgttgggctggccggtccggcatgcgggtggcgccgaggcggcgcatgccatgtgtttgtttcgtggcctcaccgagccagccaggccttgctgcagttgatgtgccagcagaggcgatttctagtgcgagaacaacaacaatgatccctgagcgaatttctgtttcttcacttttggaggttgtcttcgacgacctgctgaaactcaacaataatctgaaatcgcttgttggtgcagaaaatccagttttagtttctgcggcagaacaaattttcggtgctggtggaaaaaggttaagaccagcattagtttttctggtgtccagagcaactgctgaattagctggtttgttggagcttactacagagcatcaacgcctggcagagatcatagagatgattcacacagcaagtttaatacatgatgatgtcatagatgatagtggcatgaggagagggaaagaaactattcatcagctatatggaacacgggtggccgtacttgctggtgattttatgtttgcacaatcttcttggttcctagcgaacttagaaaacatcgaagttattaagctcatcagccagatgatgtgttcacaggtgatcaaggactttgccagtggtgagataaaacaagcatctactctttttgactgcgacgtcacccttgatgattacttgctcaagagctattataaaaccgcttcgttgctcgcctcaagcacaagatctgctgcaatattcagtggtgtaagcaccactatatgcgaacaaatgtatgaatacggcaggaatctcgggctctcgttccaggtagtagatgatattcttgactttacccaatcagctgagcaacttgggaaaccagcagggagtgacttagcaaagggaaacctgacagctccagtcatattcgctttgcaagatgaacccaaactaagggagataatcgattctgagttcagtgaaagtgattcattggctactgcaatcgacttggttcacagaagtggtggaataagaagggcgcaggagcttgcaaaggagaaaggtgacttggctctccaaaatttgcagtgccttcccaagagccagttcagaagtacccttgagaacgtggtgaaatataatcttcagaggattgactga

SEQ ID NO: 69510 - DNA, 402 bp, Oryza sativa
  Clone ID: PAT_MRT4530_70171C.1
aattcggcacgagccacgaccagctacagacgcagtagatcgatcgatcaaccactctccaactctccattcgttctgttacatactcatcctacatcgacaacgtctccagtgcctgcgcgacattgatattcagcagggggccgggcccgagcctgtaagaactcgatcaatcgaatcatatcctcacagataatctgaaggcatcagaaagcaaatcaagggattatcaagtagggctccagaagaaattgagtttaatccagcattaaaaaagagattgggtttcttggcattgcttctggtggcttcaatgccagtcgtccaggtgctactcataggtgttgttggagctttttcggttcttggttacagcaacatttttaacttcaagggtttaag

SEQ ID NO: 69511 - DNA, 1062 bp, Oryza sativa
  Clone ID: PAT_MRT4530_70172C.1
gcacgagggaactagtctcgagtttttttttttttttttttttttgatctcataatctctcgtagcatacaaaatttaagttgatgatttgtagtagtatgtacaaaacgaatagtacatgcaagttaggagttgctcctggtaacatgcatggatgaaacagtctctatgatctgcacacatatcgatcagaccacgtccaagattacaagttgttcatacaacatgtccagttattcatctgataatctctcaccgtagctgttgctgcaattaagtggtaatttcatatccctgcagatctctcttccatctatctgaatatctcttgtgtagaagagaaattaacaaaccctgcatatgtatatgcaactatgcaagatctgatcccaaaatctaattaacaatttaccaatccatggccgtagctagcctcaactgatcacacatggaaccgtgtgaaaaccacaaaacaaacaaaatgaagatggcaaaaaaacacggatctatgtaatattccatggatctacaactacctaggctacatacatatatatatgccaatccacactgtttaatttaactttggcgtttgatgatgatgagcgatgcgtgcatgcatgcagttgatcatgaacgcagcggcagattcatctctcgaccatgttagtataggagtacacaacactagctggtggcggccactggagtgcgtgccgcgaagttggcgatggtcggccggcggtgcatcatcggagacctcgccggcgccgccgctgctgcctcggcggaagccggcgccgccgacgaacggaggcgatggcggcgcgccaccgcctgcagcgcctcgtccatgtccatctgctcctgcctgcagtcgtcgctgcagaacgctgcatcccctctgtacatgaagatgtcgcggtcgccggcgatgctgctcttgcagaggaagcacgactcgaggaagtggagacggcggccgccgccgccgccgccggcaccgggcttcacgcggtagaacctcgacgccacctccacatacctctcctcctcctccat

SEQ ID NO: 69512 - DNA, 274 bp, Oryza sativa
  Clone ID: PAT_MRT4530_70173C.1
cacgtaccgtaccggtctacccacgcgtacgacacgatcatgttacttggagagagctgatgaagcgcccaatactgtgactgtacacagtatattagaactgcagctgaccgagcataccaagtcacactgaaccggagttgacctcttctacgatcacaccctgaacctaactgatgccacttcaggctgccagttagctatcactcactcggacaacaggcaaatgctgattaagtccaagctcggagaaactaggacgtccgattcatcc

SEQ ID NO: 69513 - DNA, 3417 bp, Oryza sativa
  Clone ID: PAT_MRT4530_70174C.1
atggagctcgccctggcctccgcgaagccctcgccctcgcccgcgcccgcgcccctcctcttcgcgccgctcaagcccctccccctcctccgcttccctccccggacccggcgccccgcggggggcacgcggaccacggcggtggcgggcgcggcggcgctcggggcggtcagcgtcgcgggcgccgcggcggtgaactccgccgtgcccggggtcgccgcggcggggctgcacaactacgtcgccggctccgacgaccccaccaagctggagagcagcgaggtggaggccatcgcgagcaaatacggcgttagcacagaggatgcaaccttcaaggccgagctctgtgatttgtatggcaggtttgttttctcattaattcatccaggatatgaagaccttgaaggtactgaagttgagactattataaagtttaaaaaggcccttgggttgaatgatatagatgctgcaaatgtgcacatggagattgctaaacgcattgatcgcaatgctggtgtaggacaacagcaggcatttgaaaagcttatatttgtaacaaatcttgtgtttcgggatgcatatgaatacctacttcctccgggaactgaagatctcaaaggtgatgaggttcagaccattataaaatttaaaaatgctcttgggctcgatgatgtagatgctgcaaatatgcacatggagattggtaggcgcatatacagagaaaggctggaaacaagggaccgggatgccgacatggaacagcggcgggcatttcaaaaactcatatatgtatcaaatcttgtctttggggatgcatcaacattcctgcttccatggaaacgtctttttggggtcactgattctcagattgatattgctatgcgggaaaatgccaaaatcttatatgcatcacaactcaagtctattgggagaggtcttgacataggcacgcttatcgaagtaaggagagcacaacttgtcatacaaactttctgatgaagtatctaaagatgctctatagtgcctatgcaatggaggtactttcagatggacatcttaacgatgacaagcttgcggctttgaatcaactgaggaatatatttggactggcgaagtacgaagcagaagcaatcatcacagatgtcaaggctcgagtatttcagacctactaaattctttaacaatgagttggctgcgaccccaaagaaggcagagttcctccaagatatctgcgaagagttgcaatttgatcctctcaacttgcaagtaagatgcatgaaggtgccatcctgacaccttcccttgttccaccactagtttcacaacgtagctgccctgaccgccttgaaatctgggcaaattgagaactgggtttctcttggtggctctatctatatatatggtacttagagaaaataacattataatattgcaggccctattccttttcaatatctgcttatactatgtgtaaatacactctaatataataatattataataattagaggcctctattccccttggagcggatggagaactgaacaaggacgaagtggaagctttgatggcattccaagtgcgtctctgcattccacaagaaactgttgatgctgtccattcagaaatctgtggcaagttgtttgaaaaggttgtcgtggaagcaatttcatctgttgatggatatgacactaatagacgacaggctgttaagaaggcagcacaaggtctgaatttgaaaaacgagtctgtcatggccattttcagcaaagtggtacggaagttattcctgaactacattcagagagcaaaagcagctgggaaccgcattgaaactgcaaaagagctgaaaaagatgatatccttcaacacagtagttgtgagtgagcttttagctgacattaaaggagaaccaacaactgctgaacctcaaacatcagatgcaacctcagaacctgaagtcagcgagtctgagggggatgatgaatacgaatgggaacagctggagacattaaggaaaactaggcctgataaagagctcagagagaaactggcaaagtcaagccagaaagagataaccctcaaagatgacattccattgagagacagagctgagctgtatgaaacatatttggtgttctgtgtcactggggagacgaccaatgtttcatttggaacagcaatctccacaaagaaagataattcagagtatttattccccatgcaggctgcgcacctgctggggttcccccgcaaggaagctcagaatgttcacattaagatggcagaaaaggcatttgtgcaacaggctgaagtgattcttgctgatgggaagttaacagaggccaaggctgaccagcttgcaaagatacagaagcaagttggtcttcctactgagtatgcacagaaaataatcaagaatatcacaacaacaaagttgtcttctgcaattgaagcctctatttctcgaggacagattggtatacagcaggtccgaggattgaaagaagcaaattttcaattggacagcttgattgcagaaccacttcgagaaaacatttacaaaaaatccgttgaggagatcttttcgtcaggcacaggtgaatttgatgaagaggaagtgtatgtaaagatcccagctgatctcatcattaatgctgagaaggccaagtcgattgtccaggacattgcgaagattaggttggataacgcccttgtccaagctgttgctctgcttcggcagaagaagaaagatgaagtggtcgcatccttgaacgacttgcttgcatgcgacgcggctgtgcctgcttcgaagcccctatcatggcctacatcaggagagctggatgatctgtacggcatttacatgaagagcattccgaagcctgaaaagctgtcaaggttgcagtatctgcttggcataagcgacgagaaggccggccagattcgggatgccgcatcggcaggcacactatccgttgcaactgaagaggaggatgaattggtattctagggagggagatgtgaaggtctttttttgttaggtagccagcagagttgaggacctaccatacttggtgctgtggcgccaaccgctgctattgtagctaggcgctggcatatggttttgagaagcaacgcataatcctgacgtgcgttaactgtttgtatagacagaaattggcaccgaatttggtgacaaatctcttttgctgcatttttcattttcagaccatagcgagagctttttttttttgtattttttttcttccccttttcattatgtatcacagtcgccactgctacctcagtcataaaatccgattttgttgtagctcaactgcagcatatgatatgtaaaaaaaagtatgggtcattgtagccaaaaaaccctaaaaccctcaagccgcctcgtgc

SEQ ID NO: 69514 - DNA, 2049 bp, Oryza sativa
  Clone ID: PAT_MRT4530_70175C.1
atggagctctcgcttgcctccgcgaagccctcgcctcgcgccgccgccgccgccgcggcggcggcggcggcatcgtcgtcgctgctgtcgctgcgggggaggaggaggagggtgggggtggtgtgcgcggcggtgtcgtcgggggaggaggtgttcggggggaggagggagctggcgggggtgcagccgctggtggaggcgctgccgccggtggcgagggcggtggtggagctggcggtggtggccgcggcggcggcggcggggtacgtggtcgggctccgcgcggggggcacgcggaccacggcggtggcgggcgcggcggcgctcggggcggtcagcgtcgcgggcgccgcggcggtgaactccgccgtgcccggggtcgccgcggcggggctgcacaactacgtcgccggctccgacgaccccaccaagctggagagcagcgaggtggaggccatcgcgagcaaatacggcgttagcacagaggatgcaaccttcaaggccgagctctgtgatttgtatggcaggtttgttttctcattaattcatccaggatatgaagaccttgaaggtactgaagttgagactattataaagtttaaaaaggcccttgggttgaatgatatagatgctgcaaatgtgcacatggagattgctaaacgcattgatcgcaatgctggtgtaggacaacagcaggcatttgaaaagcttatatttgtaacaaatcttgtgtttcgggatgcatatgaatacctacttccatggaaacgtcttttcggggttcatgaatctcaggggtgtgttcatgtgatggcaggaacttcatctgactataacgcctctttgtcaattatgtcggtgcgagatagaagtttgactaagactttgatagacgatgttatgagggaaagtgccaagagtttatatgcatcattgctcaagtctattgggagaggtcttgacataggcacattaattgaagtaaggagatcacaactagcatataaactttctgatgagattgcttctgagatgttcagggagcatgcaaagaagttagttgaagaaaacatttcaacagccttgaacaacttgaataaccgaacacaggttgttgaagaagtgaaaagcatcctttcatttaatggtggagacagtgatcatgaaaagagggtagaggatctaaagatgctctatagtgcctatgcaatggaggtactttcagatggacatcttaacgatgacaagcttgcggctttgaatcaactgaggaatatatttggactggcgaagtacgaagcagaagcaatcatcacagatgtcaaggctcgagtatttcagacctactaaattctttaacaatgagttggctgcgaccccaaagaaggcagagttcctccaagatatctgcgaagagttgcaatttgatcctctcaacttgcaagtaagatgcatgaaggtgccatcctgacaccttcccttgttccaccactagtttcacaacgtagctgccctgaccgccttgaaatctgggcaaattgagaactgggtttctcttggtggctctatctatatatatggtacttagagaaaataacattataatattgcaggccctattccttttcaatatctgcttatactatgtgtaaatacactctaatataataatattataataattagaggcctctattcccctctggctggcttttgtatttagaggactgagagaactgggacagtactcactgattgttcatatttatgtattagttcatgtgttgtgtatactgtatacatagacatatttggttgtttttgggagtgtacatatctgaaattggtagcaatttttcatgcgatgtggtagaagatatactagttgagaatggcagctggaagaactggaatctgcatggaaattggttcagtttcaggctttcagcagcacaatacagacattcagtttgcacttgttcctgtttgggttatgtaatctgaagaaaggaagatggataattgatcatatagtactttgttccggtc

SEQ ID NO: 69515 - DNA, 1815 bp, Oryza sativa
  Clone ID: PAT_MRT4530_70176C.1
atggcaacgagctccaccgccaccatcatcgccgcctcctcctccccgcagccgcagcctctcttcctcctcctccggctaaggagcagggccagacccggggctcgcctgagagctgccgctgcccgctgctcctcctacaacggttgggccgacctcgccgccgagcccgacctccccttccccctccagccatctcatgccctgctcccgctccttctcctccccatcgctgccctctccctcccccgcctccctcccctccccctcctcgccgccgccttctccgccggattcgccaccaggcacctcgccccctctccctctcccacccactcccgtcgcctcgctgccctcctcgccgatcttgacgcccagctccgcgccctcagctcctcctcctcctccaccgccgacccgagtcttctcctcgacgtcgccaatcaactccgcgatgccgcccgcctagctgcccaaggcaccatgctcggggatgcggtcaaggaggccgccggttattttgctgccttcagctcgccacggaagaagcccaagactgctgcggcggcggcgctcagcctggaaacgcctagtcctcaggacgacggcaacggtggtctattggcttcagcaacaaatgctaccacgaaacgcactcaaggcaagccactggactcacctagtgctagtggtgggactaggactgggctgggtgacatgcttccattcgacatggatatccatccattggatgatgcagggttcagtgctcacagtaagcaagatgatgatgctgatgatggagtggagcgattagtgtccaagcacaggtatgggcgtcacaccgattcttttcaacaaggcagacttgccactgagtccatggagtcgcctttgctagagaggacgctcgaaattcgggacagatcctacaagttgaagattgagagctgccgcggtaacaagagtcaatcaaatgaagcacaacagaggccgtctcatcacactactacttctgataatatagatgatgaaagtaatgccgtggattcagatggcgacgagttcagccacaatgtcattgaggcagcagagattttgaggaaggcgagggaatgcatgatggccagagatgatgaagagactgcagatgcgctgctgtacaaatcagccaggcttctttccacagctgttgctttgaggccatcaagtttagtagcggtgggtcagctagggaacacctacctactccatggagagctcaagctcaaggttagtcgcgagctgagaacactcttggccaataccggtgctcttctaaatggaagagaccgcgtctcacggtccaggaagctggacagaagaatcttaagcagagaaaacatttcgtctgccttagttgatgtttgtgaagagtgtgaaagccttcttgttgaggctgggagaagctatcggatggccctatcgattgattctggtgacgtcaaggcactgtacaattggggactagcacttatctttcgtgcccagctacttgctgatatcggaccggaagcagcaattgatgctgaccgagtttatttggctgcaatcgataaatttgatgcgatgttgtccaaaagcaacacatatgctccggaagctctctacagatggggcattgcactgcagcagcgatcctatctccgttctggaaacaacaaggagaagatgaggctcctggagcaggcaaagagtatgtttgaagacgttctgtatgtagaagcagataacaagacgggagcacccggttgtattgttttggtgaagaaatag

SEQ ID NO: 69516 - DNA, 1218 bp, Oryza sativa
  Clone ID: PAT_MRT4530_70177C.1
aggatatgaagaccttgaaggtactgaagttgagactattataaagtttaaaaaggcccttgggttgaatgatatagatgctgcaaatgtgcacatggagattgctaaacgcattgatcgcaatgctggtgtaggacaacagcaggcatttgaaaagcttatatttgtaacaaatcttgtgtttcgggatgcatatgaatacctacttccatggaaacgtcttttcggggttcatgaatctcagatagacgatgttatgagggaaagtgccaagagtttatatgcatcattgctcaagtctattgggagaggtcttgacataggcacattaattgaagtaaggagatcacaactagcatataaactttctgatgagattgcttctgagatgttcagggagcatgcaaagaagttagttgaagaaaacatttcaacagccttgaacaacttgaataaccgaacacaggttgttgaagaagtgaaaagcatcctttcatttaatggtatgcttacagtactgagcaatttcccgggagaagaaagatttgtccgcgggcttgggcctattacattaggtggagacagtgatcatgaaaagagggtagaggatctaaagatgctctatagtgcctatgcaatggaggtactttcagatggacatcttaacgatgacaagcttgcggctttgaatcaactgaggaatatatttggactggcgaagtacgaagcagaagcaatcatcacagatgtcaaggctcgagtatttcagacctactaaattctttaacaatgagttggctgcgaccccaaagaaggcagagttcctccaagatatctgcgaagagttgcaatttgatcctctcaacttgcaagtaagatgcatgaaggtgccatcctgacaccttcccttgttccaccactagtttcacaacgtagctgccctgaccgccttgaaatctgggcaaattgagaactgggtttctcttggtggctctatctatatatatggtacttagagaaaataccattataatattgcaggccctattccttttcaatatctgcttatactatgtgtaaatcccctctaatataataatattataataattagaggcctctattcccctctggctggcttttgtatttagaggactgagagaactgggccagtactccctgattgttcatatttacgtcccagttcatgtgttgtgt

SEQ ID NO: 69517 - DNA, 363 bp, Oryza sativa
  Clone ID: PAT_MRT4530_70178C.1
atgtcccttttagagctaggagaacattctaagcttaaattctgttgcatcacaagttcagttacattccaacagggcaaccaaaacaggagtttgctgcgtaacacacattcgattcaggaaacaatccctgattcagcttttcttacgttcctttctgaccctgaaccatatcaacagcgactcaagaaaaggaaagctgtaatacggtgcccaaagcctccaaccttctcttacccaaataataatgatgatgatgataataataaactgtacgagaaatcaggtgtaactgaaaagcagagtccatggaacctcaccaatctcttcatcctcttttggtcaaaacaaggtcctgattaa

SEQ ID NO: 69518 - DNA, 450 bp, Oryza sativa
  Clone ID: PAT_MRT4530_70179C.1
atttcattatttgtttatttgtttttttttttttttggtccaggaaacactctgcccaagactacatttatttcaggtatatccaaggttttaagaggcccattggacggacagacctactgatattagagcgagacctggacctattacagatggaggaatacgaccactccttcgtttactttttttaagcagacaaaaagtgtttggaaggcggcctaacacctgctaatgccgtaaaaaaccccggaacagcgcgggaaaggctttctaatgcggaaaacgcctcataatttcttcacattatttcccacctatcacgaagtgcggggacctacatgggggacttttgatagggtttgtgccaaaaagcccttgaatcctatgtcttacttcaccgacccaaaattatatgcgtttgcctccctgaatactcacaaggcctaccct

SEQ ID NO: 69519 - DNA, 672 bp, Oryza sativa
  Clone ID: PAT_MRT4530_7017C.1
ttcccccaaatccaccctaccttgccgcgccgccgcgacaatccatagagatcgtcgagagaggagtccaccggagccatgaggagcggcggcgacgtcaggtccttcttccggcagcagaaggcccacgccgccggcggcgtcaagcccaccggcggcgtctccaagaaggcggcgctgccccgccaccaccacaagcccgcgtcgcagggtgcttttctcctcccggtttctcccgcccccgaaactgttcgatcgattgcgtctccgctgattcgattgttcggtttttttgcagcgacgccagatcgcgccgtcgacgacgcgaggaggcacgtcgaggaggcggaggaggaggaggggcgggagaggatggctcgggagttcgacatggacatgcggtacgggccctgcctcggcctcacccgcgcccagcgctggcgccgcgccgccgcgctcggcctcgccccgccgcccgccgtcatcgccgtctgctccgacgaccagccgtgcctctgggagggccgcgtctagcttccatctgccacgcctcgtggtgcttgcatcgacagttcatttcaaaccgctgcctgatgagtcagtgatcggtgccatcttgtgttcttattatctgaaatttatgatgttgttcttcttaaaaaaaaaaaaaaa

SEQ ID NO: 69520 - DNA, 119 bp, Oryza sativa
  Clone ID: PAT_MRT4530_70180C.1
gtacatttgctctgttgggatggctttttggcgaggggaggttttataggggataaattggatcttatcccctctgcctgctgcctcattcaaaacggcttccaacgccgaatcagatc

SEQ ID NO: 69521 - DNA, 1050 bp, Oryza sativa
  Clone ID: PAT_MRT4530_70181C.1
atggcgccttcgcgtccagtggctattgctgtcattctcttgtgcacgtttttggcgtttcaggcgatggcggcggacgcctacggcggcggcggcgacgacggcgtgacgacgcagatgttcgaggagtggatggccaagttcggcaagaagtacccgtgccacggcgagaaggagtaccggttcggcgtcttccgcgacaacgtccgcttcatccggagctaccggccaccggcgggctacaactccgccctgcgcgtcaaccagttcgccgacctcaccaacgacgagttcgtctccacccacaccggcgccaagccgccgtgccccaaggacgcgccccgcggggtggatcccatctggctgccgtgctgcatcgactggaggtacaagggcgccgtcaccgatgtcaaggaccagggcgcctgcgggtcttgctgggcgttcgcggcggtggcggcgatcgaggggctgacgcagatcaggacggggaagctgacgccgctatcggagcaggagctggtggactgcgacaccggcagctccgggtgcgccggcggccacaccgaccgcgcgttcgagctcgtcgccgcgaagggcggcatcacggcggagagcgggtaccggtacgaggggtaccgggggaagtgccgcgcggacgacgcgctgttcaaccacgcggcgcgcatcggcgggcaccgcgccgtgccgccgggcgacgagcggcagctggcgacggccgtggcgcggcagccggtgacggcgtacatcgacgcgagcgggccggcgttccagttctacggctccggcgtgttcccgggcccgtgcgggagcgggagcggcgcggccgcggcggcgcccacgaccaaccacgccgtgacgctggtcggctactgccaggacggcgcgtcggggaagaagtactgggtggccaagaactcgtggggcaagacgtggggcgagaagggatacatcctcctcgagaaggacgtcgcctcgccgcacggcacctgcggcgtcgccgtctcgcccttctaccccaccgtgtaa

SEQ ID NO: 69522 - DNA, 471 bp, Oryza sativa
  Clone ID: PAT_MRT4530_70182C.1
atgcccgagctgacgaacgcggcgatgccggcggccgaccacgcggcgtcgacggcgggccgcggactcccttcgacccagcttcagcggtggcgcggggccggcaggcgtcgatgccgcgaggcggggaggcacaagaaggtacccaagttccctgacaagactacggtcttggggtccctgggcaccctgatcggcaaactggaggctacagtatccaagcacgccgctcaggccgccaaggagatgcacaccgatcgatggacgagcacttgcgatgtccttgtgtgtatcaagctcacacaccccgagatcaacctggaagaggtgctatccaagagcggggcggagaagacacacgagggcataaaatactttcccgagtcagagctatctgtaggcggcgagtcagaacgagatcgagggtggcgcagcaagcgagctcgatggacaatgatggtgttgcgttga

SEQ ID NO: 69523 - DNA, 611 bp, Oryza sativa
  Clone ID: PAT_MRT4530_70183C.1
ggctaatttttcgttgcctgaaatgcgtcaagcaaagcgtccagaggatgcatgatccagtagttcgatcagcgcggttctccaaccagattcagaatgatttcaatacgagaactgctatattagtacgcttgttaatactccctccgtttcacaatgtaagctattttctatattcatattaatgctatatatatatatatacacacacacattgtgaaacggaggaagtagtgtactagcaagtaggccatgtgcccagttgctcacgcccgtccgcatcccaggctcgcgtgtggtgtggtcatccatcacgacggcacaacctaactactagttgaaataatcaccaaactaaatttaagagtaaactagagatcagccaaatttaaaacaatcaatcgccatgtagagattaaaatttgaaatatctagttattcttttggttcaacacgcatttacattccacatttctaaacttgaacgtaccatctacaagaatccatttaccattttcttcaaatatgggaggagaaaataagttgatttggaacatgcattttgaacatgaattttcgaatatattttaatcagcataattatttctact

SEQ ID NO: 69524 - DNA, 2112 bp, Oryza sativa
  Clone ID: PAT_MRT4530_70184C.1
atggccgcctcagccaaccgcgccgccgtcaacggcgccgccggcagcggcgagcctgaggcgagccgcgaccatgtcatcatcttcccgttcatggcgaaaggccacacgctccctctgcttcacttcgccgcggcgctgtcggtccaccacaagagcctccgcgtcaccctggtcaccaccccggcgaacctcgccttcgcccgccgccgcctgccggggtcggtgcacctcgtcgtgctcccgttcccgtcgctgcagccgccgctgctgccggccggcgtcgagtcgacggacgcgctcccttccatgtccctctacccggcgttcctgcgtgccacggcgctgctgcgtgagcccttcgcggagttcatggcgtcgctgtcctcctccccgccgctcgtggtcgtctccgacttcttcctcgggttcacgcacggcgttgcgtcggacgccggcgtcccccgcgtcgtgttccacggcatgtcctgtttctccatggccatatgcaagtcgctcgtcgtgagcccgcacgtcggcggcggcgccgccccctttcacgtctcccgcatgccggaacatgtcacgatcacgccggaggagatcccgcctacggtggcgagcttcgccgaccccgacaacccgattgcccggttcatgatcgagaacgtcgaatcgacggacgtccgcagctggggcgtcctcgtcaacagcttcgccgcggtggacggcgactacgtggcctccttcgaatcgttctaccagccgggagcccgcgcctggctggtgggcccgctcttcctcgcctccggcgacacgccggagcgggacgaggagaacgacgaccccgagggctgcctcgcgtggctcgacgagagggcatcgcggccggggtcggtggtgtacgtgtcgttcggcacgcaggcgcacgtcgccgacgagcagctcgacgagctggcgcgagggctggtgcggtccggccaccctttcctgtgggcggtgcggtcgaacacctggtcgccgccggtggacgtggggcccgaccaggggcgcgtcgtcagggggtgggtcccgcagcgcggcgtgctggcccacgaggcggtgggagggttcgtgagccactgcgggtggaactcggtcatggagagcctcgccgccgggaagcccgtgctggcgtggccgatgatggccgagcaggcgctgaacgcaaggcacgtcgtggacgtcgtcggcgccggcgtcaaggtggacgccgccgtcggctccgtcgccgtcgtcgggagcgcggaggtggaggagaaggtcaggagggtgatggacgccggcggcgaggaagggcggaggatgcggacgcaggccgcgtgggctcagcgcgcggcgaggtcggcggtgagcgacggcggcacgtcacgcgtggcgttgcagaaactgattggagacctgcaggaaagctactacccagcacccggcccacgtaagacaacctgcgtgtggcatcacactgactgtgtcgacggcacgtgctatgcgagaaaggggctcgttgccgaggtatccaagttcctcttcggccgcttcgccgccgaccatgccgctatcgccatcgccattgcaggagtcaaagtcgaagtcgccaccgtggcctacttcccccgcctgccgccgttcccctcatcctcccactgccgcgagccgccactgccctcgcccgcctgccctcccgccgtcgcccatgggctgtcgccgctgccgctcggccaccgacgacgtcacgatgccgggcgccgggtggtgcaggtggtggtggcgacggacggcgcgaaggagaagggagaggggagagaggcgaggggagtcgggggacgacgtgatggagagactgaccagacgggcggaagagaacggcggtggcggcaatgggaatcgatcggtggcggtgcgacggatgttccggcggtggcgcagaggagatcggtgaagcggctgtcgctggcgatgtgggcgagcaagagtgagcggtggcggcgggtggcgattagggtcgaggggtgggagcgggaggcggggcacgggttggggtgcgatcgactgtgcgaggatggagaggtgtag

SEQ ID NO: 69525 - DNA, 392 bp, Oryza sativa
  Clone ID: PAT_MRT4530_70185C.1
gcacgagggggtgacggaatggagtctctcgcccacatcgccggccacacaccgccgcggcgtggagaggtggagtcgccgccggcggaaagcggccccccggtccggcccttccaagacgaagccacgggcatgggtccagtggtgtgcctcaggtggcggctccctccttcgtggcggcggcggcggagatcgccggaggaccagcatttcttggcagtcgggataggtggcggcggtcggagtttggatcggcggcgcaaggaagagacgccgccgcggcatggggtgggagaggacgcggggcgctccagctccaaagcatgcgacctcaggcgaggttttcagatcaaagcatcgtggctgcaggctaaggggagcaaatcaaagca

SEQ ID NO: 69526 - DNA, 774 bp, Oryza sativa
  Clone ID: PAT_MRT4530_70186C.1
atgcttccggcggcgctgaggcctctccgccgcatccccctcgcgcgcctccggagccgcctcctctcctcctccgcctccggagagggcggccctcccgccgttgcctccaccgacgaagcggtgagggcggcgaagctgagggaggaggcgtacaagcaggtggctaacctcgactggtccagcaacgccgacttctggaaggccgtcgatattgtcaaaaccttgccacccaagcgcaaggaattcgggttatcactattttgttcacattcagttgtaaccaggaaacatgacaaatttgaaaaaacgaaactcgttcaatatcctgctgaccccgaactttatgaccttgtagtccctgccgtttatttggttgctcagtatgcacggagtgagatcaaaaggatggaggcagaagcagaagagaaaaagaaaaaggatgaggaactggagaaagaaaaacagcttgaagcagattctgttaaggatgagactgattcaaagctgtcagcagttttagtccggttagatacactggagggagttgttaatgagattgtggatgacaaaaggaaaggttccgcccctggtttttccaacaaggaggaagccacaaagaaaggtgagagacaaagcaattccactgatggccaggtagtgccagtcaagagtaaggacatcatcaatggtgctacaaacgcttcacccaattctacgcaacagagccctacagggaatggagacaaggcatcttctgaccccaagggttga

SEQ ID NO: 69527 - DNA, 332 bp, Oryza sativa
  Clone ID: PAT_MRT4530_70187C.1
acggaataccgctgtagcacttcaccttcgggtgaccccaaaaggatatcgaacttagggaacgtgtgaaatctacctaaggctaaaactattcaaggacaacaattaatgcgtggttctggctatagctctatgatgtatccgaatgtggaggattactaggacaggatttagggctgtcaccacctgccgtctacctctaacaaatccgtgggatatacaacaaacaaagtcgaaccctgggccccacctcttggcctcttctttggctaggaggctgacatgtgggccctgatggcggttatggcagttatgatccgttccatggcggt

SEQ ID NO: 69528 - DNA, 960 bp, Oryza sativa
  Clone ID: PAT_MRT4530_70188C.1
tagagtaggagtacagtcatgttgggctgcggacagatcccgagctcacaactgcattacaaaaggaaagcggaagccaagacttgggccaaacaacacaggcacgacttgagaactaggccgaaaccctaaaactcatcgtagccggcttgctcctggaagaactcctcatcagcaggatccgcttcatcttcttcagcaactggggggggggggttatttatatagagcaaggttttacccaagatgtttttcagattttaagtttgaagacgaccgttgatactcgtgcagagtgcacgatttccgaggcgcaactgggtggttacaagggaacatggtataacaattaacagaggaaggatcaaatgcaacaagctaggtaggtgtagcgcccgttccgtcgtggcgcctagcgggaaaactatctcttcctccgctccacccgcgcgccgcgcgcgcgtgcgcgagagccgcgccgtctgcgccgtccacgccacccggccccgctgccctgccgcgcctgcagccgcgcagccgctcggccccgcaagctagcgcgcgtgcccgagccgcgccgctcaaaccgccgcgcctcccgttgcaacccgcgcgcgcgtgcccgccttccgagctctgtctcgcctccgccgttcatcgccaagcgccgggagagccggtgcgttcgaggacgcggaaggggactccgggcgctcgtcatcctcctcttccccggcccgaggacggagagattactcccgcgccgtcggcctctcgtcacagcgcccctcctcatctcggtagtgcctccctccgttcttcctcctcgcccgttggctcgctccctctcattctccctcgtcatcccggtgtacgccccgtcgcccctcatcgtcgcaaggcgtcccggagaaaccgccgccgcccgccgtccattcgtggccgacgccttcgtcttcc

SEQ ID NO: 69529 - DNA, 1578 bp, Oryza sativa
  Clone ID: PAT_MRT4530_70189C.1
atggtccaacgttctctgcttaaaagcatcttcgctctcaccctccgccctcactggcgcaactggcgcagtgggacagggctcgccgatcaagtagatttagttcttctttacttatttacgattgccgatcgatatacagatgacatcggctcagatataaatgatatgatcaaatcaactggcacgctcacacatatgaaggcaagttttggacctgcactggagttaagcagatctcccaggcctcgtgttttctgtcaacacgtcgagcggcattgcgacggtgcccttgacgccccttgcggtcctctccccgcttccttcccgcgcgcgtcggcgacagccggcggcagcggcggtggactccccgcgcgcatcggtgtcagccggcggtggcggcgtactaccctcggcataggcgaaagccggcggaggtggtggaacttcccgcgcctgtcggcgacagctagcggcggcggtaggacttcccgcgcagcgtcggcgacaaccggcggtgggagagatctacacctagttaaggctctgataccattgttagatcttagtgtttgcctaggtgtggatctagagctttgcctgtgggtgctcccggggtcggcggcgtggacaacgtcgatgatgatggtgaggtcgaccggtggcgtggacggtgtaggcgacggcgatcccgacgcttcatctcgtctcgtcatcgaggtcgccggcggtgaggggcaggcaaagaacaagatggagctcgccgtaggcgcctcggacagcgccatgaggtcgctgctgggaaagctcggcagcctcctggcccaggagtacacgctcatcagcggcgttcgcagcgagatccaacccggggactggatggagcaggtgcgcgacgtcgcctacgacatcgaggactgcatcgacgacttcagccaccgcctcggcggccagccacgcggcgagggcctcctgtccggcctccgccgcgcgaggtacgccgtggccacgctctgggagcgccggggcatcgccgccagggtcgtcgacctcaagaaccgcgcgcagggcgtcggcgagcgccgcacgaggtacggtgtgaaggaccccggccggccggacgccgggaacgggaaggccgccagatccgccccttcctaccacgtcaacgaccgcccccagcctggtccgcagctcgtcggcgccgcggagtcggtggggatggaggacgccatcggcaagctcggggcatggctgaccgaggggctgcccgacctgagggtcctcgccgtcgtcggattcggcggcctcggcaagacgacgctggcattggcgctgcaccgcaagttcggggagaagttcgagtcccgggcgtgcgtgcaggcgtcgcagaagctcaatctcgcggcgctgctcagaagcatcctcaggcaagtcatgcctcaggtccctgacaaggagagcacagatggagactctcttgcagggatcgagagatggacagacaagcagcttaaggagaagctcacagcacatttggaacaaaagaggtactcctttcccccttcggctccatga

SEQ ID NO: 69530 - DNA, 202 bp, Oryza sativa
  Clone ID: PAT_MRT4530_7018C.1
cttggtgattagctgaacgaggatgcaatgcttgggaaacgggatggtatgaaggatgtgatcgaacatgtgaacaggcaatttaaagatccagacttgacaacttttgtatgtgttagtatcccggaattactttcattggatgaaacaaaaagattgtggcatgagttagcgtagcatgagatggatgaacatctttatt

SEQ ID NO: 69531 - DNA, 340 bp, Oryza sativa
  Clone ID: PAT_MRT4530_70190C.1
agtaggagtacagtcatgtgggctgcggacagatcccgagctctcaactgcattacaaaagggaagcggaagccaagacttggaccaaacttcacaggcgcgacttgggaactaggccgaaaccctaaaactcatcgtagccggcttgctcctggaagaactcctcatcagcgggatccgcttcatcttcttcagcaaactttacccacacgacattactaacccggatcacccagcccgtggggatcagccacgtcgggagacctccaagtgtgccaggaagcccaggggggtcctctccgacaccaccccggcgaatccacatgtctctcgacatcat

SEQ ID NO: 69532 - DNA, 750 bp, Oryza sativa
  Clone ID: PAT_MRT4530_70191C.1
atgaggagagaaggagccgacgccggatctggcaaggagccaccaccaccgccgctcgtggtgggggagggcgccgccacagccactcgccgcgagggaggctgccgcgtccgccgcttgcgggagggcaaggcattgctgccgccgtcgccgatgctcgcaggaggaagggcgctgccgttgctcgggggagaaggttgccgtcaccactgccgctgctcggtggggaaggctgctaccgtcgccatccgttgggcaccgccggtggggaggggcacgaaaagatcccgagctcacaactgcattacaaaagggaagcggaagccaagacttggaccaaacaacacaggcgcgacttgggaactaggccgaaaccctaaaactcaacgtagccggcttgctcctagaagaactcctcgtcagtgggatccgcttcatcttcttcagcaactggggggagttatttatatagagcaaggtttgttaacctctgcagagggggtacactttacccacacgacattactaacccggatcacccagcccgtggggatcagccacgtcgggagacctccaagctttcatgacaaggcatttccaaagccgacacaggtttaccatatgccgacgagaggggtcccagaccaacaacagattttaagtttgaaggcggccgtcgatactcgtgcagagtgcacgatttccgaggcgcaactgggtggttacaagggaacatggtataacaattaa

SEQ ID NO: 69533 - DNA, 408 bp, Oryza sativa
  unsure (1)..(408): unsure at all n locations
  Clone ID: PAT_MRT4530_70192C.1
agctgacgcgcgcgcgggggcgagggcaggaacccgtcgcgattgggcggacgacgaaccggtcgcgcgcgggcgcgttcgggaatcgtggtggatctgacgccaccaccgccgccgccgccgccgctcggttgctcctctcctcgccgcgccgtcgcgtgcgtcgccgtcgcctccttgcccctagcgggcggccgggcaattccccgcgcgcctgctcgatctgcctcggtggtcaatgcgggcgaggagatgagcggcgccgaggaggaggaggaggatntcncccccctttttttttgctctcttctttttatctcaaccccctctttttctgtggcgccctggtatgacttataaaaaaacttttttttttccccacactgaagaggctactgaatgtaggca

SEQ ID NO: 69534 - DNA, 203 bp, Oryza sativa
  Clone ID: PAT_MRT4530_70193C.1
tgtacgtggaaaaaaaccacaaaacgacgccctactagtaatatttacttggccctgctgcatcgcctccactagccatgggagactgcccacccccgtaatgcgagaccctgtgccccaccgccgatatctgccgcccgatcacgtatttcccagagatatcgatatgtccaaagccgaaaccgttgatggggaggaggagg

SEQ ID NO: 69535 - DNA, 517 bp, Oryza sativa
  Clone ID: PAT_MRT4530_70194C.1
gacatgttcatcctcattgctccccaaaatgctgttggaaactgtataattgatgacatgaaagcaatgactgatgctgctggtgacagacctgtgattcttgtaaatcctcgcttaaaggatatgcctggatcaagtggtgtaatgcaaacaatgggaagagacatgaggctaaaatatgctgcatcttttgagacttgttattccttccggcttctcttctatgctggctcattttatcctattatgggagctctaaggatggcttatcctaataaatatgagatttatcgaagggttgatgaacccaatggacaagaacgatatgttctcttagaggaatttgtggagaagccaactcctgatgaaatcaccaatgcattcagaccacgtaaaaacgaaaatgaaaagtcagcgtctggattctggggttttttgagtggtatattatgaggcaaacatttcagtaaaggctgagtttagtaaattctcccaggcatccaacatttatagagcg

SEQ ID NO: 69536 - DNA, 220 bp, Oryza sativa
  Clone ID: PAT_MRT4530_70195C.1
ttctctttctctgataataacttccccccctcgtaggttctcgaggacggcgcgcgctttttcgcggaggagacatccgcaggatcctaggatcactgggtagcttcggagcgtgatatacgacagcaggcggagagctaacgcggggatgatgagatcaataacgaataacatcgagcccaactagctagccggggttccaaacacaggttgttgtttg

SEQ ID NO: 69537 - DNA, 712 bp, Oryza sativa
  unsure (1)..(712): unsure at all n locations
  Clone ID: PAT_MRT4530_70196C.1
cctcgcgctcccctcgtcgtcgtcgcgcaaatggcggcctcctcctcctcctcgtcgccggccgcggcctccgctcccttcgccgcgccggggccccaccgccgccccggactcgcgctgcgcccctcgccgccgacgccgccttcctcctccttgtcctgctgccgcgcttcccccgccgccgcggccgtctcgtccgtctccgccaccgccgccccgaatcgcgggcccagggggatgggtcttcgttgccgggcatcggagggagcggcggcggcggcgcggaaggaggccccgctcaaggtgatgatctcgggtgcacccgcgtctgggaagggaacgcaatgccgcatgatcgtcgagaagtatggntttggttcacatatcaactggggatcttctgcgggccgaagtatcttctggcaccgaaataggcaagaaagcaaaagaatatatggacaatggtatgctagtcccggatcaagttgtgacagatatggtggtatcacgactatcacaacctgatgttagagaaagaggatggcttctcgatggttacccgagaagttatgcccaggcacaaagtctcgaaagtatgaaaatacgaccagatatattcattggtgctggaagttcctgatgatattctaatcgacagatgtgttggaagaaggttggatcctgagactggcaaatttaccacataaagaac

SEQ ID NO: 69538 - DNA, 3424 bp, Oryza sativa
  Clone ID: PAT_MRT4530_70197C.1
tcatccacgcgccgcccttgccgtcgatgtcaccgacggcttgcctactactacacctgccgtccgaaggcgaggaggtcggcggcgagcatgcacgaagaggaaggaggctgggaggccgtcaagggagatggggaggccgacggcgaacacacggggagaaggaggaggcggcgcgggagcatgccggggctccgagtccacctccacggcgcccaccaccgcaacgctcgcctctacaccaaccatcacggcgcctgcctccacctccgcgacacccggccctgtctccacctccatgtacacgggacgaggcgggaaagaagatccggcggccgacgacggcacgtgcgacctcggggttagaccatcggagaggcccgggaggtgtcggcggcggcgacgacacgtgagaagggaggcggcggcggctgcgatgcttgagagggagaggtggccggcagcgaagcaggggtggtggcgggcggagcgggcgccgcggcaggcgagcgcgcaggaataagctgtcttcggcgtcgttcccactctgctcaccgccgccggtgcgcggatccatccacccccgccctcgggcacttccggagttgggcggcgacggggcgtcgaccgcgtctcccttctcgggccggtggtagggatccttgcggagccgggcgggcggaaggcggcggcgacggggttatcgtcgcggttgatgccaatggaggagccatccggtgtcgaagcagcgacgccaatgccctcctccttctcctgcctcccgagcctctccgaccctgagctcgcatacgcggcgatgccctcccttctctcccgctccgaaggaatcgaggatgtcgtttccttccccacctcagcgcggttccaggcggaccgcgggtcccacgcctggccgccgcgggagctgagcggtgccacgtcagcgcgcgacgcgagctccaatccacatacaccttctcttccctccacacacacacgcccgcacactcctcgccgttcgcctcgcgctcccctcgtcgtcgtcgcgcaaatggcggcctcctcctcctcctcgtcgccggccgcggcctccgctcccttcgccgcgccggggccccaccgccgccccggactcgcgctgcgcccctcgccgccgacgccgccttcctcctccttgtcctgctgccgcgcttcccccgccgccgcggccgtctcgtccgtctccgccaccgccgccccgaatcgcgggcccagggggatgggtcttcgttgccgggcatcggagggagcggcggcggcggcgcggaaggaggccccgctcaaggtgatgatctcgggtgcacccgcgtctgggaagggaacgcaatgccgcatgatcgtcgagaagtatggtttggttcacatatcaactggggatcttctgcgggccgaagtatcttctggcaccgaaataggcaagaaagcaaaagaatatatggacaatggtatgctagtcccggatcaagttgtgacagatatggtggtatcacgactatcacaacctgatgttagagaaagaggatggcttctcgatggttacccgagaagttatgcccaggcacaaagtctcgaaagtatgaaaatacgaccagatatattcattgtgctggaaattgagctttacaatcagttcatcaaattcttagttcatgagaatattacaggatacttcaacaatgtatctacggttcctgatgatattctaatcgacagatgtgttggaagaaggttggatcctgagactggcaaaatttaccacataaagaacttccctccggagaatgatgaagtttctgctcgtcttgttacacgctctgatgatacatttgagaaggttaaatcacgtcttgatacttacaaacaaaattctgaagctgttatcccaacatactcagatttgctcaaccaggttggaggtcatctcagtctcaaaggtggaagaagaagccacaggaggaggcatatgcttgaggtaggaatggctatgcgtataggagggtggaaagagtttcgtgggattccaacaagattaaataacattccacattccagggaaatcaggaaatacttttacaatgatgtactagtagccaccagacatgctgttgaagacaaaaaaactcggttgcagatagatatcaacattcctgaacttaaccctgaaatggatgtttatcgcataggaaccctcatggaacttgtgcgagagctttctctttcctttgctgatgatggaaagcgtgtgaaggtttgcgttcaaggctccatgggacaaggtgcatttgctggtattccacttcagcttgctggaaccagaaaaattttggaaatcatggactggggtgaatatggggccaagggtaccttcattaattttggagcagtaggtgctagtgaggttgataaagaagatgacatgttcatcctcattgctccccaaaatgctgttggaaactgtataattgatgacatgaaagcaatgactgatgctgctggtgacagacctgtgattcttgtaaatcctcgcttaaaggggtgtggtgtgggtgtgcgggggtgggggagccgtggaggtggaaaagtcaacgggaaaaatagagtggttaagtatgcggctgacctgatgcctcattcttttgttggatacgggagagatggatggttcaggaggttgaagccagtgcaggaagtccagtggggcagatgtatttcattttcatatgttttatgtgggaagaggattgatttggatatgcctggatcaagtggtgtaatgcaaacaatgggaagagacatgaggctaaaatatgctgcatcttttgagacttgttattccttccggcttctcttctatgctggctcattttatcctattatgggagctctaaggatggcttatcctaataaatatgagatttatcgaagggttgatgaacccaatggacaagaacgatatgttctcttagaggaatttgtggagaagccaactcctgatgaaatcaccaatgcattcagaccacgtaaaaacgaaaatgaaaagtcagcgtctggattctggggttttttgagtggtatattatgaggcaaacatttcagtaaaggctgagtttagtaaattctcccaggcatccaacattcatagagcgaaatgcttgttttcctgttcctacactcgaccatttctaaattgatgtatagcttcatgtaccatattgataaatagtgggcaaaatttgctacagatatcgaaaaaacgtgtaattagctaacggacattgcaagatcgtgaaacggctgtaacacactccaaaaaccaaaaacgtataatttgctgatggacactatgagcaataataaaataatatatacatctgcttgaggagag

SEQ ID NO: 69539 - DNA, 226 bp, Oryza sativa
  Clone ID: PAT_MRT4530_70198C.1
acgccttcttttggacctgaagaaattgcttgtgtgacaaaatgtctattaacacgggaataccttgatttttttggggtgagtttgatttctgttactgtgaatgtgaaggaatccatgggcttatgcccttgttgatgtgcatctgtaaaggacagcattttttcccctttaactgctgcaacgttacatgtgcctgtgagtttaaaaaaaaaaaaaaaaaaaa

SEQ ID NO: 69540 - DNA, 303 bp, Oryza sativa
  Clone ID: PAT_MRT4530_70199C.1
gcgagagagagcatctagctagggagagaaaggaagagacgagaggagagagatggccactgcttatgctcccatggcgagcgcggcgtgatgaagagcagcttggtgtgctccaaaccgagggggcttgtcttgtgctttccttaccaagaaggccccctttacaagtaaaggccttccattttgaaaagccacctaccaaggggtgcaacccattaatgggcaaccctttattcggaggcttgaaaacgccgggaacttcaacccgctggtcggctgtgaccttttcaaccttccggggta

SEQ ID NO: 69541 - DNA, 927 bp, Oryza sativa
  unsure (1)..(927): unsure at all n locations
  Clone ID: PAT_MRT4530_7019C.1
ccggcgtcggctatgaatcctattattaaggcatggccgttcagaggttggggaattgatatgatcggcatgataaacccaccatcgagtaaaggacataaatttatattggtggtaactgattatttcaccaagtggtagaggcgattcctttgaagaaagttgattctggggatgnctattcaatttgttcgaagagcattataatctatcgatttggtcttcctcaaactattactacggatcaaggttcaatcttcgtgtccgatgagtttgttcagtttgccgatagcgtgggtatcaagttgttgaattcttcaccttattatgcgcaagctaatgggcaagccgaggcgtctaataaaagtttgatcaagttgattaagcggaaaatttctgattatcctcggcaatggcatacttggttggacgaaacattgtggtcttattggatggcttgtcatggatcgattcaggttcctccttacaaacttgtttatggaaatgaggctgttttgccgtgggaggttagaatcagctctcgacgaacggagttgcaaaacgatttaacagccgatgagtattacaatcttatggctgatgagagggaggattttgttcagtcacgattgcgagcccttgcgtaggttactaagggtaaaggaacgtgttgcccgacattataataagaaagtggtatctaaagattttttggaaggggaacttgtatggaagttgattttgccgattggtacccgtgatagtaaattcggcaagtggtcgccgaattgggaaggaccgttccaaattcataaggctgtgtctaagggggcatatatgttgcaagggcttgatggtgaagtttatgggcgagcgctcaatggcaaatatttgaagaaatattacccaagtgtttgggttaatgca

SEQ ID NO: 69542 - DNA, 366 bp, Oryza sativa
  unsure (1)..(366): unsure at all n locations
  Clone ID: PAT_MRT4530_701C.1
cggacttgtcagngacgtntgggctccntcctcctgtgcagccatcaaanncggggtcgtacgcaactnanatgcgaaaaaacgcgaggaaatcacgccaaaaaccgtagcaaatcccgtccccgaaatggttccntgtgccgtgagattntcccacacaaattccatacttcccctccacggccgcacccccaaatgccgcgtgtttatcgtcctgatctgggcgtgctacggccgtgcaaccctatactggcttntggnctcgtcgccggggaagtagggcggtggacgtcgtcgtcgtcgtcggagaggacgacgtngaaggaagccggaggtggggtngattaaagctcaacttcgacgggt

SEQ ID NO: 69543 - DNA, 380 bp, Oryza sativa
  Clone ID: PAT_MRT4530_70200C.1
ctcacatcttccgccgatcgccgtcgccgactgcgcatggcatgtggaagcgcgcgacctacgtgctcgtccagcaccgatgcgtcctcaccagacgctgccaggtgatcggcggaagcgatcttccgcgcgctctgtaattgtacacgctctgatgccgcgcaagccaggacgatggaagaggacgtgatgcctatctgcacaggactacagcgccatgagatcgacggatagctccaggggaagaagaggtttgatatggacgagacatgctggccatttggcaccaaggaagctgcagcgcgttatctaatcatactacaacaaatggattgatatatgtaccgactgcgtaggagaggacaagcaagatgacctga

SEQ ID NO: 69544 - DNA, 231 bp, Oryza sativa
  Clone ID: PAT_MRT4530_70201C.1
atgggaggtggtgaatttataggcgccgcgctgatcgaggtgtggaggtgggaagagaggatggtggagaagaagcgcacgcggaatacgcgcgaacgggggggattattcccgcgcaagttgcagctgcgcgcgttagctgctattgcgcggtttcgacggtggggatttgatcacacgtttctcgaccccttcacccttgagattggtgatctgcaggaggttccatga

SEQ ID NO: 69545 - DNA, 109 bp, Oryza sativa
  Clone ID: PAT_MRT4530_70202C.1
ggacttaaaagacagggccgctttttgaattaaccacgacgctcgggtaaagtcaaaccggtggcaaaacactggtacgaagtcacaattaatataagctgtccctgcc

SEQ ID NO: 69546 - DNA, 606 bp, Oryza sativa
  Clone ID: PAT_MRT4530_70203C.1
atgaagtgcactagggttcccgatcttccaaaaggttctgataaactacgatttgggcggagtcgcgacacaaatcgatccggcttcttgaacgcgcacgctcttgagccccgcaatcgcagcaccacgtctcctctggttatcacccgtgtcgaaacggcccaaaggcccaaatacggtgacgcagcaccgggacagattctggatgtcaacttgttcggtcgattcccattgactcggaaagaatttggacatgggactaaaaccattggaaagcttaagagcactaaactaaacttgagagaatatgagagagctttgcttggagtgtgtgttgaaatggagagagtgaggggtttatatagcctcccaatgacggttggaatggtcggaaataccctcgaaccgtcattgggggccaatctataccgtccaggagaaaccctgcatccaacagcgatgaggggggttcggccaaaccaggtgccggcccaaccagcccataatttggatggtggcctcctggacttctcccctcccctccatacgacggttgcaatgatagttgtggaggtcggtgcacctacaaccgccatccccaaccaa

SEQ ID NO: 69547 - DNA, 679 bp, Oryza sativa
  Clone ID: PAT_MRT4530_70204C.1
tggatcccgggctgcaggttatttgtgacaatccactgcaagggtttgtgcattacatttcctacagagtattccacaatgttctcttgcgtatgcttggttagttttacacttaatagtaaatttgactgtttttttatgtgaattagcttcttgtttaaggttaatgtgaactttatacaaatttgtgtatactagttcatcattgtttgcaagagctgctttttcattcatcttcttccgttgtatccaactgagttatgcacagtatatctaaatttctgtacctctatacggaagtaattaacaaaattaccaattaaccatagtgcaataccgatacatcgcacactatgggagcgcagttagaaattgtcttacctaattgcatatgcttcggtggaatatgactcggatctggcaaaagatgacagcacacagagaaaaaatcttgacagtacaattttggtcatttacctttcggtatcttttttggagcaagagaaatcagatttacctacatcagtgatacagttcatctatcttttcccctaatatcaacacaatattatttggtgccttttaggtccttgagaatattttcaggttacatctagaagttaatttttctttgatttaagaagtgagaaagatgtttagctattactaatatgccggt

SEQ ID NO: 69548 - DNA, 435 bp, Oryza sativa
  Clone ID: PAT_MRT4530_70205C.1
atgatggagttggtcatcgcgcgcgtcgcgccgtcgggggtagtggcacacggccagcacgtcgaacccggcccgcgcgggctccacgtccactatcgaccagccgccatgtggtttcccatcccaggtgcgccacgtacggcgccctcaaccttccccgcggccgccgccaggaagaccacgtcgtacgcggcgaggtcgatcgcgcgcctccagctccaggctggcgatggcggcgaggaggccggcgatcttctgaagcagggagaggtgaagttcctgagcagggggaggccgcacggcctccagcacggtgcccaagaggtggttgtgcgcgacatcgagctactccaccttctgcatcccgggcacctccggtgggagcgggccagcgagggagttgaagctaacgttgaagaatgtgacctcccatag

SEQ ID NO: 69549 - DNA, 223 bp, Oryza sativa
  Clone ID: PAT_MRT4530_70206C.1
ttgttggtgttcttttgagacacacatagtgtgggtgtacctccagctttaccgcttacacacaccagttccggcctatacgagagctaccttgatcttgggccttgtgcctgttagcttgctttgtggtggcggtttatcttcttccgatctgtaaaagccccgatcaagaaaggatccaacccacctaggaggactaacctgaaccttctaatgaatttaa

SEQ ID NO: 69550 - DNA, 263 bp, Oryza sativa
  Clone ID: PAT_MRT4530_70207C.1
gcaaaawgaggaaagwtcytgagtgktcccgcsrccawtggrrgrwccattttgcgtcttttgcycycccytggctywwtgsbsgccwdggcgsgccttctygggcsrttttcgsdwgtttttggggtgcccaarttytagggggccmwaatawcccabtcgsccdwgmsscccctttcyccgyyccvacgmmcamacrgkkggytcgbgacccccatwaataaggkktktckcsgggagcccsacyyattaagrcttcagga

SEQ ID NO: 69551 - DNA, 996 bp, Oryza sativa
  Clone ID: PAT_MRT4530_70208C.1
atgccactctcgtccctttttctgtcccctctctcacgccgtctctatttggtcctcatccccctccctcgacgcatcggacctcgcccacaaactgccgcgcccaagatgtccaggccgcagtcgcgctcgccactgcggcagacttcccgagtcggacgatgccaactctgggtccgcctcgccgtccctgccgtggagatcgaggacgtccgggtgagacagatcgattacggtgacggcaaggtcaacggcgagtgggcagaggaggctggacttgacaacaagggagtcgcaatcagagagctcgacagggatgaccatggcgtggaggataccaacggcgctggcctgctcgctgctcccggatatggctctacaacgtacccggacagcgaggactttagtgtacttgagggctgtcaccaactctacacccacctcaaacctactgtgggatacgaagcaacgccggaaattaactacccagacaccacgtctacacagaggtgtactactggacccacacgtaatggacaaggatcaagtgctacacaccacacaggtgtggtccgcaagtcattcaagcacattacatgtcctttcctaatcccaccccaaccacctaccacgccggggttcccgacgattctgccacgtgcatgtgtgatgtggctaaggcgggtgcaccacgcgggaggcaccccttgcccaaacaaactggcacaaatgaggccctccaaagggttacctaccctcacgactctccaacgtggtataaatgatcacagtgcaattagtactaagacaagctggtcccaaataaggcgtgtgatagtggtggctgaacccgcgcaggcggtggctgcaagtggcagcgagttcgtgacaccatgcatgcagcgttgcgacactggatggctcgatctattgcatgcatgtagagaacatcacatgcaagaaaaacatacattaaggactttatcctactgctaa

SEQ ID NO: 69552 - DNA, 321 bp, Oryza sativa
  Clone ID: PAT_MRT4530_70209C.1
atccacccctttttttaggtggtcatttgtggggtttaattacaagccacttactccatatggaagcaagataagagagtcaatttacagaccggtctcctttatttaagaaaaatggagggcacttggaatacgttcctaaaactttctctcattctctctttctctgatgaagcttagtccttctattttagatgaaactgcgatgatctggggaggtaagggctataacgatttgcttatgcaagccggaccacttggaaatgcacaggcagaactctttctgcgtaaggattcccggggctttaccttggacaaggg

SEQ ID NO: 69553 - DNA, 343 bp, Oryza sativa
  Clone ID: PAT_MRT4530_7020C.1
gccagctgggcacgacacggtttttcccgatctgggtaacgggcatggagcgccacgccattatatgtgatgttgagctctcctccttttggcccccccggcgtgtaccctttatgcttccggcgtctgtatgtgtgtgttgggaattgtgacccggatacccgatttcaccccaggagacaccgctatgagcccatgattacgcccagctctttatacgactccctatagggaagaactggtacgcctgccggttccggtccggaattcgccgggtcgacccccagcgtccgactagtgtctagatcgcgaacggctgcccctgttgtgtttgtgtggtttg

SEQ ID NO: 69554 - DNA, 327 bp, Oryza sativa
  Clone ID: PAT_MRT4530_70210C.1
atgccgcctggcctcctcttccccttcgacgacggcggcggcgacgacgatgacgtggacgacatgggccgcggcggctgcggcgttggcatcggcgtggagctgcgaggcggcggtggtggcggggagaaacttcccagattgtacaccaagaccagtgctcgtcgttgcttccaccacgcgtcgagctgcttcttccctgctaagccaaatccaaaggcgcatgcggcgacgacgacgcccgaaccttccgctgacgactacgcgcagaggcttcaaccggcgaccgtccgcgcaatcgggacagcgccgccgccctcgcagtag

SEQ ID NO: 69555 - DNA, 604 bp, Oryza sativa
  Clone ID: PAT_MRT4530_70211C.1
cgcgaggcggtggctgaaggggaggcggcgagcaacgggcggtgacggcggcctcccctctcccagatccgtcggaggggaggcgcggcaggcggcggcgcattgtggcgggcgacagcgtgcgaggggtggcgacggcggcgggcggcggcgggtagtggcggcctctcctccggcgggaggggaggtgcggcaggcggcggcgcatcgtggcgggcgacaggcggcggcctcccttccgccggatccggcaggaggagaggcggcgggcgaccggcggcggcggcggtctcccctccgccagatccggcgggaggggaggcggcgggcggcgggcgacgggttgcgatggtgcccgacggggggaaggcagcgggtggcagaatttgttgatgaactactcgcggttgcgggcgtcgacgaaggcgcgcagcacgtgagcagagaggaaggcgagccgtcgcggacgaacagggagcagtcatgcgaagcgcttcccaaaaaccttattgccgccttctcccggtgcaggacgtcgaaggcagaggttccggagacctgctttcccgatcgccggtgcacgctggcgagcgggatggagtag

SEQ ID NO: 69556 - DNA, 693 bp, Oryza sativa
  Clone ID: PAT_MRT4530_70212C.1
atggccgaggcccagaacggcgccgcggcggcgccgccgcccgccgaccacgccatcgccgccgccgttcctgcgccgccgccgactgatccgcgagaccagatggtgatcatgctgcagcagctgggcatggggaacctcgtgtgcaagctccggaagcaggtggacgcgtcggacgcgaagccgaaccagtcgcggctgcagctgacgtaccagctcgcgcgcggcctcgtcgagagcggcgacctcaccgacggcgagaagaggctcatccacggcggcgacggcgacgacgacgacctctccaagaagaagaagaagaagagctccggcctgaagctcgacggctacgaccgccatggccggaggtacggggcgatgaggttcggcagggtgggcagcgtggacggcaagaacggcaatggcctgtaccggctcaagagcttcggcaggttcgtcgccgccaacggcctcagggccggccacacggtggtcgcctgggtgttccggctgccgccgccgccgccgccggaggaggaggaggatgctccggcgaggttggcggtgatgctgctcgactacccttcgagcgatccggcgatggtggaggcgatggtggtgtgggaagacgatgtgctcgaaaagtttggcgccgcgagtggtattgtcaagatatctaatgcaggcaactaa

SEQ ID NO: 69557 - DNA, 586 bp, Oryza sativa
  Clone ID: PAT_MRT4530_70213C.1
tccgaatctgcgagagcggaagccaccgaggcggaggcgaggaggagggcgcaatggcggggaaggaggagggccggatcttcgtgggcggcctgtcgttccacaccgacgagcgcaagctggccgacgcgttccgccgcttcggcaaggtcgtcgacgcccagatcatgctggagagacacacccaacgccatcgtggtttttttttcgtgacattttcagatccagaggcagttgatagcgctattaaagaaatgcactgtcaagaattagatggcaggactatatcagtgaacaaggctgagcctaagatgaatacagatgacacaaggtatgaaagtggtggtggacgaggagagtatcgtggtggtagaggtgatggaccacccccaggcaattgctttgagtgtggccgtgctggtcattgggctcgtgattgccctaatcctggtggtggtcgttctgcgcgatactcttcttctagttcagcgctggtggcagaggagaccgtttttctggatcagataggtttggagaccgttacatggatgatcggtatgatggtgggtaccgggaaccctgtgat

SEQ ID NO: 69558 - DNA, 1320 bp, Oryza sativa
  Clone ID: PAT_MRT4530_70214C.1
atggcggggaaggaggagggccggatcttcgtgggcggcctgtcgttccacaccgacgagcgcaagctggccgacgcgttccgccgcttcggcaaggtcgtcgacgcccagtggttcggtagcttttgtggctcttttgtgaaccaggtgatactgatcatgctggagagacacacccaacgccatcgtggttttggcttcgtgacattttcagatccagaggcagttgatagcgctattaaagaaatgcactgtcaagaattagatggcaggactatatcagtgaacaaggctgagcctaagatgaatacagatgacacaaggtatgaaagtggtggtggacgaggagagtatcgtggtggtagaggtgatggaccacccccaggcaattgctttgagtgtggccgtgctggtcattgggctcgtgattgccctaatcctggtggtggtcgttctgcgcgatactcttcttctaagttcagcgctggtggcagaggagaccgtttttctggatcagataggtttggagaccgttacatggatgatcgttatgatggtgggtaccgtgaacctgttgatgtcagagacaggtatggtggaggccgtgaccgatatgctaatgatcgatacccatcaggtggtgaccgctatgttccagacagatatggaggtcccgatcgctatcagcctagtagttatggccgggaacgagaaagaagctacgagagggatggagtgcgtggcaatggcggctatgataggagtggcccaaggggtggtggaagctatgacagggatggcccaaggggtggtataagtggtggctatgacagggatggcccacgtggcggtggtgttgaccgttacggtggtggagggcctgctcgttatgatggaggaagctacagggacagatctgggccgtatgaccgccctagcagaggaggacgctttgatgatcgcttccagtgaagcctttcgcagaatcaagttatgtatttgcggtttaatgcttgcagtttcgcatggctgaatgtttagtgaatgctctggcacagttatatctattatgtattagaacctccagcactgttttgattctggcaaaaagtttatctatcagactgttttggattctgaaaaaaaaaaaaatgcactgaaaggttgtctgcctgatccccgtgccgctgaatgctttctgtggtttgtacatggtgattaaggcttgcatggtatcatcaatctaatctgcaaggattactacagaaacagtggctaaattatgccggcccagcacatttgtgagaaaccttagtatgc

SEQ ID NO: 69559 - DNA, 368 bp, Oryza sativa
  unsure (1)..(368): unsure at all n locations
  Clone ID: PAT_MRT4530_70215C.1
aacctaacgtcctccccaaacagacccaaaacccggagnaggcatatttgaaataacaggggggtcaaaaaacacgcactagacgctcctttacccagcaacaacccaaggccacgcctacggcactcgccataccgcgcagcaccgcaatgcacatggacacaagaccgacacaccccacgctcgtggcgcactagcgaagaacccccagcatatccaagagcacgcacacacaaccggatgcccaacaacactaccaagagagaatgagcccgagcttctacgagctgctgccctgggcgccgccgccgcaaagacgcccccaggcgtccccgacccactgaatgcactgcacgcggccgggaagg

SEQ ID NO: 69560 - DNA, 454 bp, Oryza sativa
  unsure (1)..(454): unsure at all n locations
  Clone ID: PAT_MRT4530_70216C.1
gganggggtnggggngcaanacctgcaagggggcaccagtgcaggggngtcctgtgntcctgcaangggaanaattnttgttgtccccggctgcatggaggattatngnatggatgcngtactgtcgatcagagtttgatcggaggcttaatttgcttgcattagnacccagcttanatgtaggcaggccttgccttttgttntgacgccnaaataaaaccgtnntngtngttgtcagtgtgngcgtgngtcgatcaangttggatggatccctagctagcttggatggatcatctatcatcatggggatctcatcangaantcctgctccatntcctcangcgtgccaggnttnttaanataatnnacctntgctttcatccnaaaaaaaaaaaaaaaaaaaaaaaaaaaaaaaaaaaaaaaaaaaaaaaaaaaaaaaaaaaaaaaaaaaaaa

SEQ ID NO: 69561 - DNA, 817 bp, Oryza sativa
  Clone ID: PAT_MRT4530_70217C.1
cccacgcgtccgcccacgcgtccgcccacgcgtccgccagcatctaggaagcgagaaggttcaaataattcagctagcagctctcccgatagtgacagtgatgttcatccttcaaactcagaagggtttcaatgttttcttcaggacttagctggagcggcggttgctcataatccttgtattgacgatgccaaagatgtagagtcactttgtgctgaatcgccacctcgaagtgaccacgattctgctccgaaggatcaatctctagctgacttatactggcctgattcacttggaccattggacttggacataccgtccgcgacataccatgctgatgacttactcctaggggacagccagaatagttggaaccgcatgatggcgaatagcctggatgcatttcgaaacctgtcgttcttcacggcagataagaatgactcgataccatccatcatgtagagctctgaatactggtgcttccttcatgcgcttgcgtggtgaaattgctacgttggctacgaaggtttaccgccaacgatgctgtgcatctcgctgaagaggctttatattgtccaagtgagctgtttgtggctagatccaacagctgcggacttgctgtgcgtttgcagtcaagagggacgcatgttgttgtaaagtagtaacataagagctgttcgtgctaacatgtatgtcgtgtaaattgtggtgttcctgtaaaaaaaaaaagctcacacaatcgcttggttacaataaagcttctcctgccgtgtaccagatcaattgcccaatgcttcatggccgcaatagttgtgtt

SEQ ID NO: 69562 - DNA, 1062 bp, Oryza sativa
  Clone ID: PAT_MRT4530_70218C.1
atggaggtgcttcacaccacgccgctcgcggtttatgtccagggaaggacatgtgcgcaaggcagcggtctaaaccgttcgacggctgctttcaatagggagatgatagacatggtgctcgggttgatggcggcggaagcgattggcgatccaatcggtggatcggacacttcgggcgggtggctcgaactttccggtgccggcgggattcaacgcaggccagctctggtcaacggaggcggcggtagctcgtacaaggatggtgtccgagggagcagttatgcgcatcacgcaggagggctgcacacaggggttctgagcaagatgtgcaagtaccatccaatggcacgtagcagcaactacatggtggctggtggctgggcaggcacggaaaccgaatccaatcaagcgccagaattggtagtcgaaactgtgttggtccgtctaagtagaggcatggcacagtacgtggagtcaagggaagaagttgtaaggatagcggagtctcttgtttacggtgagcctattgaaggcttgtcggggcggctcggcgtgagcggcgaaaaaggatcaactcaagtcttgtacacggagattcgagcaagtaacgaattcagttcggtctttgaaaactcaggaccgaatttcatccaaaaaattcggtctctgtctcagtctgaccgaatattttcacagccgctagagagaggagacggaggcgacgccgaggcggtgccggcgctggaggaggacacggcgttggaggtggaggcggaggtggagggcgctggcgctgggcggaggtggaggcggcgtgcagggcagcggcggcctgcggtagctccaccgacgccgtcggcgcaccccccaccagcacggctgcatgggggaggaggggatgtgtttgatgtctattgtatgtatattgggatttggaatgaggagtactggaagcaggaagatggtggtggagcatggggcagcgtcgaggaagacgacagacagcctgagatcaaattaaatttaccaagtcagccaaatttcagagactgcttcacctag

SEQ ID NO: 69563 - DNA, 795 bp, Oryza sativa
  Clone ID: PAT_MRT4530_70219C.1
cccccttccttaagcttggatcctctagagcggcgcgggactccgggaggttcatcagcttccggctgtgggtccgttccaggatcatcatccggggccgtgcaccgtggttggtaccgagcttgatcggccggtcacgcgggagcgagtaggattgcctcaagaactcggtgaagttgaccatggtgtagccgccgccggtgtcgtcgagggaggggtcgatggtgaactccttgcggctgccatagccgaccaccacgtgcgggtaacagcggacgacgccgcggtcgtcgtccttctccaggtcgacgatgtcgtgccgcgagatctggctgaagatcctccggtacttgtccacccagaagggcagcaggttgacgacgaggagctggacctcgccgccgaagcgacgcgcgccgatgaagagcgggacgagcacgtcggtgaagtcgtgccagtagttgccggtgagcccgccgagctcgatcaccatcgccgggacgttcagccgcgtcgtgcacggcggggcgtcctccgggttggggacgcacctcaccgtgacgggtttgaggccgtcgaggtacttccgggagtagggctttatcttccactcccgcggcgccgcgcgcggcgagaccagggtgaccgcggcggcgccggcgccgccgcactccctgcgctcgcgtgtcgccgtcgagcacccagatgtcgtacttgccgaacgacgtgtcgcagatcggcttggtgttggcaacattgtgaagtcgtccgcctgcagcccggggatccactagt

SEQ ID NO: 69564 - DNA, 5650 bp, Oryza sativa
  Clone ID: PAT_MRT4530_7021C.1
atagatacaattgccttctcaggactctatccatgcgcggcaaccatcttcaagcatatcaactcaacccgatgtcgtacactaagtcgtattgtcggaatcggctgtatcggcttacctagtctgactcggatccaaccgatcctgatcgtagccgatttggactccagccgattcttactctagatatgcttgggcaaaaatttgccgcaaagacttatggatcaaatcaactggcacgctaacacacccgaaggcgagttttggacctgcactggagttaagcagatctcgcaggcctcatgttttcagtcaacacgcttttggcacgtccagtgggacctttaagaagtcagccaacaattcttcctcatggccgagaaaccaccaccatcagcatccccagctagccctggctctgttaaggaaaagatgcagaagttattattgactgacgtcaatgaaggaaacatcgtgccaatcgatccagaaaaattcacacctgagcagaagaaagagtttgaagcaatgttgcagcaagcacgggatcagttcttgaactcattcatgcagacccgcaaggggacacttgttcagaagtacaaaataaaagtggttgctgatgatcctgggaccagttcttctaaggatggagatgggaaacaagctcgagacggctcggctcaaccgagtgacaaaggtgctaccgacggttctttaggaaatcaaggcgacaattctcaaggagtccatggagtgcaagatcacggagtgcatggaattgctgacgtaatgagggaacagtttgggcttaaaccaaaagagactggaagcttgtatcggcagccttaccctgagtggtttgagagagttcctcttcccaatcggttcaaagtcccagatttctccaaattttcgggacaagatggtgtgtcaacttatgagcacattagccgattcttagctcagtgtggtgaagcatcggctgtagatgctctgaaggttatgttgttccggttatctttgtctagattggcttttacttggttttcctctttgccatatgggtcgatcaatagttgggccgatttggagaagcaattccacagctatttctacagtggggttcatgagatgaaattatctgacttgatggcgattaagcagcggcatgatgaacctgtgcacgagtatattcagagattcagggagatgaggaacaaatgcttcagcttgagtttaactgatgcccagttagctgatctggccttttagggtatgattgctccgattagagagaaattctcgtctgaagactttgatagcttgtcacatctgatacagaaggtaaccttgcatgagcataggtctgtggaagtcaggaaaagctctaagaaggttaatcatgtttgtccttacatgtatgggtcggatgatgacgaggacgattctgaaatagctgcagccgaatgggtgaggagtaaaaaggtcataccgtgtcaatgggtaaaaagttctggaaatgaggagaagtatgattttgatattactaaagctgacaagatctttgatctgctactccgagagaagcaaattcaaattcctgctggtcatacaatcccatcggatgaggaattaggcaaaaagaggtattgcaaatggcataattctgggtcccattctactaacgattgcaaggtttttagacagcagattcaggtggccattgagggatgcaagattaggtttgatgattccaaaaagccgatgaaggtcgatggtaacccttttcctgttaatatggtgcatacagctggccaaacagccgatagggcccgtgcaaggggttttcaggtgaattcggctaagattatcaacaaatatcagaggaagtatgacaagcagcaggagaagcatcatgaagaatacgatgatggtatgaggttgccatctattgaaaactgccctgggtgcaatcggctaaggcagacaagagtttctgttcatcaaagattgggtccagtaaatcaagatcatggccaagaggacaatgtaatcaggaagaatcaatggtgtccttctagtattttcacgaagaatcagaagagaaggaaagcaaagccaaggcaggagtggcatgttaaaaatcaggttcctgtagccgataatgttgcagccgatgaggcaaagaggttggcaaaagggaagagtgttgtgactgcaccggttaacatggtctttaccttgctagccgaattcgggatcgatcaacccgatgtcgacgaggtggaagaggaatcagctaagttggttctgtcaccggaacaggcagtgtttgagaaacctgaggggacagagaatcagcatcttaaaccattgtatataaacggctatgtcaatggaagccgatgtctaaaatgatggttgatggtggggccgcggtaaatttgatgccttttgctatgttcaggaagttgggtagatatgctgaagatctcatcaagacaaatatggtgctcaaagactttggtggtaatccatcggagaccaaaggtgttctaaatgtggagctgacagtcggcagtaagactattcctacctcgttttttgtcatcgatgggaagggttcttacagcttgttgcttggaagggattggattcacgccaattgttgcattccttcaactatgcatcaatgtttgattcagtggcaaggcgacaagatagagatcgttccagccgacagccaattgaagatggagaacccaagctattattttgagggcgtcgtggagggttcaaatgtctacactaaggatacggtagatgatctcgatgacaagcaaggtcaaggtttcatgtcggctgatgatttggaagaaatagatataggtcctagcgatcggccaagaccgacatatattagtaagaacttatctccagaatttagaactaagctgatagagctcttgaaagagtttagagactgcttcgcttgggagtattttgagatgccaggactcagccgatcgattgtagaacatcggttacctatcaagccgatatgcttgaacatgtcaaagctaaaattaaacgattgtatgatgctggttttattcgtccttgccgatacgctgaatgggtttctaatctaaataaagccacaccgaaggatgaatacctaatgccagtagtcgatcagctggttgatgctgcgtcagggaacaaaattttgagttttatggatggtaacgcaggatataatcaaatctttgtggctgaagaagatattcataagacagcttttagatgccctggtgcaatcggcttatttgaatgggttgtcatgactttcggcttgaagagtgctggggctacatatcaaagagccatgaattacatatatcatgatctaatcggctggttggttgaagtctacatcaatgatgtggttgttaagtctaaagaagttgaggaccatatagccgatttgaggaaagttttcgagagaaccagaaaatatggcctgaagatgaatccgacaaaatgtgcttttggtgtatcggctggccagtttttgggatttcttgttcatgagagggggattgaggtgactcaaaggagtgttaatgctaatgcgatcaagaagattcagcccccggaaaacaagaccgaattgcaggagatgatcggcaagattaattttgttcgaaggtttatttctaatttatctggaaagttagaaccttttacaccattgttgagattgaaggccgatcagcaatttacttggggggcagaacaacagaaagctttagataatatcaaagaatatctcaactctcctcctgttttgattcctccacagcaagggataccttttagattgtatctgtcggccggtgagaagtcaatcggctcagtcttgattcaggagttggatggaaaagaacgagttgtattttatctcagtcgtcggctcttggatgctgaaactagatattcccctgtggagaagttatgcttgtgtctgtatttttcgtgtacagggttgaggcattatctactatccaacgagtgtactgttatatgcaaggccgacgttgtcaaatacatgttatcggctccaatattgaaaggaagggttggaaagtggatattttcattaaccgagtttgatcttcggtatgagtcgccgaaggcaattaagggacaagctatagccgattttattgtggaacaccgtgatgattcaatcgactcggttgaattagtgccatggactttattctttgatggatcggtgtgtactcatggttgtggtatcggcctagttatactttcccctaggggggcatgtttcgagtttgcttatactattaaaccgtatgtgactaataatcaagctgagtatgaggcagtgctcaaagggttgcaattactcaaggaagttgaagccgatgctattgaaatcatgggggattctttactggtaatcagtcaattggcaggagaatatgaatgtaagaatgatacgttaatggtttataataagaagtgacaagaattgatgaaggaatttcggtcggttactttgaagcatgtgtctcgagaacaaaatattgaagctaacgatttggcccaaggggcatcggggtataagtcgatgatcaaagatgttaaggttgaagttgcagcaatgacagccgatgattggaggtatgatgtgcatcagtatttgcataatccatcttaatcggcttctaggaaattaagatataaggcattaaaatatacactgttggatgatgagctttattatcgaacgattgatggagtattacttaagtgtttgagtgccgatcaggttaaagttgcagtcggcgaagttcatgaaagaatttgtggcactcatcaatcggctcataagatgaagtggttacttcggcgtgcagggtatttttggccgacaatgctggaggattgtttcagatattataagcggtgtcaagattgtcagaagtttagggcaatttagcgagcgccgacgttggctatgaatcttattattaagccatggccattcagaggttggggaattgatatgatcggtatgagaaacccaccatcaagtaaaggacataagtttatattggtgacgactgattatttcatcaagtgggtggaggcgattcctttgaagaaagttgattctagagatgcaattcaattcgttgaagaacatataatctaccgatttggtattcctcaagctattacaactgatcagggttcaatcttcgtgtccgacgagtttgttcagtttgccgatagcatgggtatcaaattattgaattcttcaccttattatgcacaagctaatgggcaagccgaggcatctaataaaagtttgatcaaattgattaagcagaaaatttctgattatcctcggcaatggcatactcggttggctgaagcgttgtggtcttataggatggcttgtcatggatcgatccaagtccctccttacaaacttgtttatgggcatgaggctgttttgccgtgggaagttagaatcggctctcgaagaacggagttactcaatggcaagtacttgaacaaatattacccaagtgtttgggttaacgca

SEQ ID NO: 69565 - DNA, 352 bp, Oryza sativa
  Clone ID: PAT_MRT4530_70220C.1
tttcattatcgaattctcatgtctcctcgtgcccaccaccaccagggtagggatggctgacaacgggccgggcaacaaggaggacctgctcatctggggtgcgggggttgtcgacatggccgagagccacctcgacgaggtgaagcgcatggtggctgcagttcctcgagccggtggtcaagatccagggcgccacactccgcgtcggccaggtggccgacgtcgcccaggccaaggacgccgccggggactccgcgcacctcgacttgggggtgcggccgatggtcaaggacaccacctagtgcgtcctgaggtggatcgacatcttctggcgcctgctcaaggagcggat

SEQ ID NO: 69566 - DNA, 639 bp, Oryza sativa
  unsure (1)..(639): unsure at all n locations
  Clone ID: PAT_MRT4530_70221C.1
ggcagcctcatcgtcatgcttcagcactagtagtagtagtgccaccatttctttgccctcgatctttccccagagagagagagagagagagagagagtcttgattgggggaggagagagggagagagagaaagagagaggtattcttcttgttcttgtgcttccacttgattcacttccaaatttgttcccctttcaagatattctttcatggggctgggttcctggattatggcgcttgcatgtgtcttggtagaagttgttgacttgcggctttgggttgggtgggtgtggatttgcttcttgcttgctcatgtccccccccccctccatgtcttccttcttctactttcagtttcagctggatctccgcatgatttggggtaagggggagcatagctatgtcccttggttcttggtttgttactctttctctgtatatgctgttctttggttcagaatttgttttgcatgaacaaagaagtacaactcgtatgaggctttcaggaatttaaggctgctgctttgattttgtctgtgggctagctagactgaggagtcttggcttcaccttttctttgctggatttggnggtctttcaagttcaaaatctggatggttttttcaggggcttaccccc

SEQ ID NO: 69567 - DNA, 594 bp, Oryza sativa
  Clone ID: PAT_MRT4530_70222C.1
gctataccatccagttacccgcctgattcttagtaccatgccttgaaactccccacaaccctgggttcctggctactcccgttcagcttctttgcctgatagaatatcaagaaacctgcacaacaatggaacctgtgcaggacccgtttagggttatgtcgaactcggaagtaagaggaccacttgcccttggtagcttcactttgtatgataaagcttcaagtaatcaggacagttatctgaggatccttcatctgccgcaaaaatttgcacaattgggactttaagaatgcacaagacccttgcattccccccgcccgtaaagtggtgtggatttgacaacgcaacatccctgttcctcgtgttgtgggtaaaattccgtggtgaatgcaaaaacataaggcttggaaaatggccctgtttgtatcctcaaggtggctttggaactgtaaattgatataagctctatgatccttagctaacagttagtaaacgtgcaaaaaaaagtgtggaggtatacccaaagatgtacccaaaagggtgaaataaggggaataaatgcatattttgggtcaaaaaaaaaaaaaaaaaaaa

SEQ ID NO: 69568 - DNA, 250 bp, Oryza sativa
  Clone ID: PAT_MRT4530_70223C.1
gtgccgccacgccgccgccttcgtgcgccgcgccgtcgccccggagccgccgcgccgtgcgtcaccgccttgcgccgccgttgagcccgagggagttgcggatccaagtgaaggccaagacccgcaagactttgagcaaggcaagtcatcactattccttgaacatgttgatcccaattgcgaaattgttttgtttacaaataaaattgcatgcaatgatgaacatcctacttgcgattatgccatgcct

SEQ ID NO: 69569 - DNA, 1793 bp, Oryza sativa
  Clone ID: PAT_MRT4530_70224C.1
tttggccttttttttttttttctttttttttttttgtctccacattattattcgacaaagtaatataatactgtaacaagtgaagctatgaaaaggacgtccggaagttaaaacgggcaaaataaaccccaaagcctgctttgggggatgcaagcctagcacgagtgtatggctcgactcaccaggaacacaaaacgattttcccagatgagatggtaagcatggaacgcttatagtatgtacacggtgcacaaacaccacacaggtgagcgctttcagtactgctgatccaggtaggcatctttctccgtcttgttctcgccactgaggtaccccacaaggcttccggaaacgtcggagacccaggagacgctgcgtgccagccaggccgaaggagtggtcggtgcttgagggctctccgctgctgcgatgctcttccgttcttcctcgagcaagatgtcaagccacctctgcaacatgtattctttcaccgcgtccacgcctttgttcacgatctccattggcggcatagaaaggggattttgctccaggttgagcttctctagcttatccagccgaccaaaattgtcgggaagagcatggatctggttgttgctgaggtcaagctcgcgcagattcagcaggtcaccgaaagaagcagggagatccttcaggtcactaaagttgctgctcaggttcagaatttcaagacttgaaagtttccctatggcagatggcagaccacatagttcattgaaatgtgcatccaggaggtacaatgatctcatctcgcagatagatgatggaagtgaccgcaacttgttcatatggacccagagtttccgcagatttaccagctcatacccaatgttggttggcagataagcgagcccgttgtagctcgcatcaagctcaattaatgacctgcactttgagatgctatctggcaatgaccttagcctgttgcttcccacattcagaatcctcaaattcaatagcagtccaatggaatcaggaagagaaatcaaggcattggaagcaagacgaagctcttcaagatgatcaagtcctcctatagcatctggaataacctcgagctgattgcgcgagacatcgagcacgcggagcccctggatcctcccgaacgcctccggcaggtggcgcagctgccggtccacgaggcggacgctctccaccggcttgccctcctcggcctgcctcagcaccgcgatcacctcctcctgcaccgcagcatcatccccggcggctgccgccgccgattcgtccctcccgtcgggctcctccaggtccttcccctccatcgccgaccggtacaccgcctcgagcctcccctcggcctcctgcagcagcgcctcgtaggcgtcgtgcgtctcctcgagccgcaccacggcgcggcaggcctcgaggtccccctcggggacccgccgcgagcccccggcctcggcgtcggtcgcggcgacgatcgcgcgggaggagtcgacgagctcgtggtcgggccgcgggccgaggacctggagcgcggagcgcgcggccgacacgtcggcgacggcgcgggtcatggcgcggagcacggacgggtggcgcagccccggcatacgctccacgagctcgaactcccccgcggtggagggcgtccgcggcgacggcgtgtgcacgggcggctgctcgatgtcgaagtcgccgccgccgccggccgggcgggccttggcgagggtggggaggcgggagagcacgtaggagaggatggggtgggcctgcggcgccggatccat

SEQ ID NO: 69570 - DNA, 570 bp, Oryza sativa
  Clone ID: PAT_MRT4530_70225C.1
gggcccttggaagaacaaagctttattgaaaagggatttgcttgcccccaaaggctgccctggacaggggacacacaaaaaccccagcccaacaggaaattggggccaacaagacgaaacccccacttattcaggcccctctagctttttaaggaggggaagggacttaccctacccgggggcaaaaaaaacactgggtttaaaacacggggagcccctaccgagagatatcatacaagagcggggggggattacccaaaacaaaaccgggaccattcattttttttttcaaatttccccctggcacccccgctggatggagcaacaggggaagcaaattgggggaaaacggaaaaaaaaaccatttcgaagaacaccaaaacatttgggattgcccccgggaggggccccacccccaaccaaaaagggggggaccgaatgatccctacggcagctaaaacctttaatgcaaaaccctgccaaaaaaaaaaaaaaacaatccctttgaggcaaaaaaattttgcaagagggttgtgaggggccaactcttttgcaaacaagtgggaaaaa

SEQ ID NO: 69571 - DNA, 1598 bp, Oryza sativa
  Clone ID: PAT_MRT4530_70226C.1
ctagaatatgtcgatgatgtgctcgggctcctcacagatacggctccagcagccccatgtgccacacctccgggatcccgtgcgagcgctgctcttcgccatcttcgcgcgcatcgccggattcttcccgcgcgagtcccccatcttcccgcgcagcacctccatgttcccgcccccaaagcactggctcgaagcttttttccccaatctcaccacgagcggagattgcggagctggatccacaagtaggtggtgaatcctgtccatctgccgccgtccgccgtccagcagccatggatccacaaggaggtggtggatcccgtctgagcgccgccggcagaggagggaataagcgtgggggcaagcagctgggcctgaagaggtcgtcggcgcctgctccatcaccggcaacagctcagccaccgctgcctgcaagttcccctcctgaagctccatcgccggcaacagttcagccgcctactccatcgtcaagtcctgctgttgctgcccccagttcatcccctgctgtaccgatgtcaaccatgcccccatggccaccgcaaggagcaggatggggctctgtaccccccaattttgcttttctgcaaggaaaccaacaaggcccaagttcatggttgtatcctacagaaggcttcgtaaattttctccaacagaactgtctgccgcagccacaagaaggtgaaaattttcaccttgttggtcagactaccaacacaatgtctactccaccaccaacaccccaagctgcagctaacaatacagtccaaattgatattcatgaagatgcaatcaatgatgcaagtgctaaaaagagaagtttgagatattggactcatgatgaggaagagagattggctagtgcttggttgaatgcttctaaagatcccattcatgggaatgaaaagaaaggtgatacgttttggaaagaggttactgatgagttcaacagaaaagggaatgggaagcgtacaagggaaataaatcaattgaaggttcattggtcacgcctcaaatcatcgattggagaattcaatgattactggactaaggtaactcaaatgaatacaagcggatatgacgatgacatgctggagaaggaggcacaacagatgtatgcaaatacatttggaaagccttttgcacttgtgcattggtggaagatactgagaaaagagcccaagtggtgtgcaatgattgagaaggacaaaaacaaggctgaagtggttgatattccagatgaacaaaagcgtcccattggtagagaagcagcacaagccgagcgcaatggaaaacgcaagaaggacagtatgtcagaaggaattgtcatcctaggggacaatattgaaaaaattatcaaagtgacgcaagatcggaagctggagcgtgagaaggtcactgaagcacagattcacatttcaaacgtaaatttgaaggcagcagaacagcaaaaagaagcaaagatgtttgaggtatacaattccctgctcactcaagatacaagtaacatgtctgaagaacagaaggctcgccgagacaaggcattacaaaagctggaggaaaagttatttgctgactaa

SEQ ID NO: 69572 - DNA, 252 bp, Oryza sativa
  Clone ID: PAT_MRT4530_70227C.1
atggaggatccgtcgctaggaaacttggtgatgacgggtgcaacattgggagctctgtggtggcggcctccaaagctggagggccttagcgacagcgatgacgatggtggatccgagctcggcgacaacagatccgacggcgccggtctcgataggggtagatttgcgaacgacgaccttgggagctgtggggcctcagcaccaatgacaatggcagcggactacgacagtggcaatgacggactgcagtga

SEQ ID NO: 69573 - DNA, 367 bp, Oryza sativa
  Clone ID: PAT_MRT4530_70228C.1
ggaataatgagatataattgcattagagattcactatttccaaggtgcaattgcagctgggaacggattacaaatatacaatcccttcaaaatcctgtggcatctttatgccagcagtatgcctatgtacacccaaactccaaagaatgaacttcctctcgatcacaaccaacaaaaagaaatggagaaagatgagagaattcagtcatctagctaagtagctattgaatctgtagccttttgtatgcattttctgtgcctcactaacgaatgaatcccctggtgtagagaagaatgagcaaagaaaccaaagtgacaacatttatcagtctcttcaccttctccaccgtccagcttccatccgaca

SEQ ID NO: 69574 - DNA, 216 bp, Oryza sativa
  Clone ID: PAT_MRT4530_70229C.1
atggagtcatcacgcaagttcttcccggccattgctgtcctcctcctgcttgttatcaacacagagatggcgccagcgcaggcgagggaatgcgagacggaaagcagcaagttcagcgggatgtgcatgatacaagccaactgcgaccacatctgcatgggcggcgacgactgcaggggattccgtcgccgctgcatgtgcaggacccaatgctaa

SEQ ID NO: 69575 - DNA, 3648 bp, Oryza sativa
  Clone ID: PAT_MRT4530_7022C.1
cacgggcccaaataaatccatatgaagaagctcgagtggtgtcccttaaccacatttgtcattaatcaccaaaacccactaggaggattaatgcactttcaatgttaagaatcaagctcctgtagccaatgaagccacagcctatgaagcaagaaggttggctaaagggaaaagtgttgtaattgcttcggtcaacatggttttcacgttgcctgctgaatttgggatcaagcaagccaatgtcgatgaagtggaagcagaatcagctaaattaattttatcactgtagaaggcaattttcgagaagccagagggtacagaaaattggcatctcaagtcattatatataaatggctatgtcaatgggaagccgatgtccatgatgatggtcgatggtggggctacagtgaatttgatgccttacactacattcaggaagccgggtagaaacgccgaagatctcatcaagacaaacatggtgctcaaggactttggcggcaatccatcggaaaccaagggagttttgaatgtggagctgacagtcggcaacaaaaccatccctacaacgttctttgtcattgataggaagggttcttacagcttgttgcttagaagggattggattcatgctaattattgtatcccttcaactatgcatcagtgcttgattcagtggcaaggcgacaagattgaaattgtgccagccgacaaccagttgaagatggagaacccaagctattattttgagggtgtcgtggagggttcaaacgtctacaccaaggacacagtagatgatctcgatgacaaacaaggacagggtttcatgtcggctgatgatttggaagaatttgatataggtccaggtggtcgaccaaggctgacatttatcagtaagaatttgtcttcggaattcagaaccaagttaatagagctgttgaaagaattcagagattgcttcgcttgggagtattatgaaatgcctggtctcagccgatcgattgttgaacatcggctacctattaaaccaggggttaggccacaccagcaacctctgagaagatgtaaagccgatatgcttgaacctgtcaaggctgagattaaacgattatatgatgttggttttattcgtccttgccgatatgctgagtgggtttctagcataaataaagctaccccaaaggatgaatatccaatgccagtagccgatcaactggttgatgctgcatcaggacacaagattttgagttttatggatggtaatgcacgatataatcagatctttttggccgaagaagatatccataagacagcttttaggtgtcctggtgcaatcggcttatttgagtgggttgtgatgactttcggcttgaagagtgctggagctacatatcaaagagccatgaattacatatatcatgatctaatcggctggttggttgaggtctacattgatgatgtggttgttaagtctaaagagatagaagaccacatagccgatttgaggaaggtttttgagagaaccaggaaatatggcttgaagatgaacccgacaaaatgtgcttttggcatatcggctagctagtttttgggatttcttgttcatgagagggggattgaggtgactcaaaggagtgttaatgcaatcaagaagattcaacctccggagaacaagacagaactgcaagagatgatcggcaagatcaattttgttagaaggtttatttctaatttatccggaaggttagagccttttacaccattgttgagattgaaagctgatcaacagtttacttggggggcagagcaacagaaagctttggatagtatcaaggaatatcttagctctcctctagttttgattcctccacagaaggggataccttttcggttatatctgtcggccgatgataagtcaatcggctcggttttgatttaggagcttgaagggaaagagagagttgtgttttatctaagtcgtcggctcttggatgcagaaactagatattcccctgtggagaagttatgcttgtgcttatatttttcatgtacaaggttaaggcattatctattgtccagtgaatgcaatgtcatatgcaaagccgatgtggttaaatacatgttgtcggctccgattttgaaaggaagggttggaaagtggatattttccttaactgagtttgatcttcggtatgagtcgccgaaggcgattaaaggacaagctatagccgattttattgtagaacatcgtgatgattcaatcggctcggtcgagattatgccatggactttattctttgatggatcggtgtgtactgatggttgtggtatcggcttagttataatttcccctagggggcatgttttgagtttgcttatactatcaaaccttatgcaaccaataatcaagctgagtatgagacagtgctcaaagggttgcaattactcaaggaagttgaagccgatgctattgaaataatgggagattctctgctagtaatcagtcaattggcaggggaatatgagtgcaaaaatgatacattaatggtttataatgagaagtgccaagaactaatgaaagcatttcggctggttactttaaagcatgtatgacgtgagcaaaatattgaagctaatgatttggcccaaggggcatcgggatataagccgatgatcaaagatattaaggtcgaaattgtagcaataacagccgatgattggagatattatgtgcatcagtatttacagaatccatctcaatcagcttcttggaaattaagatataaagtgttgaagtatactttactggatgatgaactttattatcggacaattgatggagtgttgcttaagtgtttgagtgccgatcaggctaaagttgcaatcggcgaagctcatgaagggatttgtggtactcattaatcggctcataaaatgaagtggttgcttcggtgtgcaggtatttttggccgacaatgctggaagattgtttcaggtattacaaaggatgtcaagattgtcagaaatttggagcaattcagcaagcgccggcgtcggctataaatcctatcattaaaccatggccattcagaggttggggaattgatatgatcggcatgattaatcctccatcgagtaaaggacataagtttatattggtggcgaccgattatttcaccaaatcggtagaggcggttcctttgaagaaggttgattttggggatgcgatacagtttgttcaagagcatataatctaccgatttggtattcctcaaaccattacaactgatcagggttcaattttcgtgtccgatgagtttgttcaatttgccaatagtatgggaatcaaactgttaaattcttcaccatattatgcacaagctaatgggcaagctgaggcatctaacaaaagcttgatcaagttaattaagaggaagatttctgattatcctcggcagtggcatactcggctggccgaagcgttgtggtcttatcgaatggcttgtcatggatcaatccaggtccctcctcataaacttgtttatggccatgaggctgttctgccatgggaagtgagaatcggctccaggagaacggaattacaaaatgatttaacaaatgatgagtattataaccttatggccgatgaga

SEQ ID NO: 69576 - DNA, 1919 bp, Oryza sativa
  unsure (1)..(1919): unsure at all n locations
  Clone ID: PAT_MRT4530_70230C.1
gcgcgcgcgcgtgtgccgcgccgcgccgcgcggcgagggtggtggggggtgagcggcgagccgagccgggccacgggcggcgccgcgggaggcgtcccggcgagcggaggggaggggggcatccgagcgctgggggaggtagctcagcgggaacgggaacggggcgatcccccccggcgttctcctccccggtctctcctgtagctagctagctagccatggcggcgaatggcgagggtggcggcgacccggcggcgcggaggcggtgggatctgacgaacaagggtgccgagagcattccaatggtgaaagaggctgtggaaatgtccacagacgaagaatcagacggtgtcgttatatgtccaccagatggcaacaatgatgatcgagaggaagccattagtagtaataatcatgataattgcccacagacgaaggttccgacggtgtcgttatatgtccaccagatggcaacaatgatgatcgagaggaagccattagtagtaataatcatgataattgccaggaaggcgaagtcacttgtgttaaagacccggttatagacagtgaaacccaggaagacaagtgtgtgaaccaagattcagttaagttgatagatcaagagaagtctggtccacccaaatcaccatctaaacctggcatttctgggtcagataggtccaaacgtactgttcctcaaccatttgccctttcttctcaaagaaaatctcatggaggaaatagtaaggcggctcatccatctggcaatggagaaaattctggtgataagagcaactcctctccagcaagtttgacaaagaagactgcaccgattactcccaagaagattgcacagcctgatcatatgcttcaccatcaagaggaggactcctgctctgtgacttcttcaaccacaacttcaacaagagctggcaaaaccaaggcaactgttggtgttgccccttcatttgtatgtgctgatcgtgctgacaagagaaaggagttctacacaaaattagaagagaaacacaaggccttggaagctgagaagaatgaggccgaggcccggaaaaaggaagagcaagaaacagccttaaaacaactaagaaagtccttagtcatcagggcaaagcccatgccaagcttctaccaagaaggacctcctccaaaggctgaacttaagaaggtccctccaactcgtgctaaatcaccaaagtttacaaggaggaggagctgcagtgatgcaccgccgacgccagaggcagcaaatactaccgcagcatctagtcgatcacatcgtcacagcattgcgaaccctaaagatgctaacagagtacaatgctcaccaaaaaatggcgtcgctgccaaaactagagctgtcaaacctgtgagctgaaggccctctggagattctagatcagccaagtgttgcgaatgtcgctgtacaaacctaactttagccgtctctcggtttcatggcattttgcatttgatttatacttcctgtcaccaaaagaaggccacagtgccgaggccggtgtgcttgcagctgaaccctttcatttcttttcttcttttcgcgttgctgtgtaagaactctgttgctgggaccatgtactgtgttccttgttgtaaatggtcgagggtttctgtcagaactcagaaggaagacactctgtccttttaaagcccttgatgaaccgttgcaatgttttgcttgatataaaaaaaaaaaagcagatcatctagccaaaaaaaaaaaaaaaaataanannnnnnnaaaaaaaaccttggggggggcccgtaccaaattgcccttaatgagtcgtataaccgccttaatgggcgtgttttacacgttggactggaaaaacctgcgtacccacttaattgcctgaagaaattccctttgccagatg

SEQ ID NO: 69577 - DNA, 186 bp, Oryza sativa
  unsure (1)..(186): unsure at all n locations
  Clone ID: PAT_MRT4530_70231C.1
aatccagattcggttaacatgtctagtnactatcctagcaatgcacttaatcaacttytgtgacgacgacgcatcgcatcatcatgtcgtcgtggtgtcctattctcacacnacgaatcagatggcgtgggcggcccaccaattcctacctcgtggatgcgtgctttcttactttgctcgtcggag

SEQ ID NO: 69578 - DNA, 621 bp, Oryza sativa
  Clone ID: PAT_MRT4530_70232C.1
atgcatctccgcttcgtcccgttcccggcgatcgccgtcggcggagcgagcttgagattcctcgccgataacacacgtgcagtgggcggaagcgggaggaggcggtgctccgacgtggtcgccttctcgtcgtcggagaaggggccggggccggggtcgggggaggagcgcgagccgcgggctgaggaggcgctgcggcggctggcggagctcgactcgcagctggaggggctttccgagcccagggaacggccgccggcgccgcctcttccaccggacccttacatggaccgagatatgataactgggcggggatcaaaagatgaacttcctgaattttctccaacgtatgtaacattctcaacacttgcacttgttatcctcacgatattcaccaacgttgtgttcaatctttacatcaaaccttccgtggacggcgtcgatcagcctgataggaattctgaagtgccactgtatgcagtaaacatcctgggtgtcataaacgcagagcttgaatgcgctgtcgacaatggccgtgtgagaggggagaagagaagcagcacagagctgctctggtgtggtagcggtccagagctctacgatcttctactgtgtcgctaa

SEQ ID NO: 69579 - DNA, 264 bp, Oryza sativa
  unsure (1)..(264): unsure at all n locations
  Clone ID: PAT_MRT4530_70233C.1
caccaatcgtcgcgccgcggcgacgttaggcatttcgtcgaacacctagagcgcancatgatgctcaccaagccccacccttcgtccaacctcctcctccccaccaccacagcgctcccaaatcctagcccaaaccctagccgcaagacggtggtggtgaagtacggcggcgcggcgatgaagtcgccgagctgcagtcgtcggtgatccgcgacctggtcctcctctcctgcgtcggcctccgccccgtgctcgtgcacgccg

SEQ ID NO: 69580 - DNA, 697 bp, Oryza sativa
  Clone ID: PAT_MRT4530_70234C.1
gtgaggtcgcttctctagtctacaccactggatggaaaccgaccggtctggcgcggcgacggccgaggagaggagaggagaggaggaggaggagggatggagaagatgagagagatcatcagcatgcacatcggccaggccgcgatccaggtcggcatcgcgtgctgggagctctacgtgcctccgagcacggcttcgagccctatggcgccatgcccagagatacaacggtgggcgtctcacacgatgcgttcaacatctttgtttaacgcgacaggcgctggctagcatgtacccaccgccttgtttgagacctgtaccactgtctgacgaggtgcgcactggacgtccgtcagctcttcaccctgtgcatttcatgtctgcgaaggaggatgccgctatcaactttgcccgtgtccattacactgctgggaaggagatcgcacatctatgcctggaccgcgcgcgcatgttggcggacaactgcactgctctgcatggattccttggggttctgtgctgtgggaggtggatctggctcaagacttgaggctcttgtgtggtagcgactctctgctggttatggacagataccctggcttggattcacaatctactccttgcccccaggtctgaacagctagctgtagaaccatacaagagtcggactctgcacccaatccttgcttgagcacac

SEQ ID NO: 69581 - DNA, 1267 bp, Oryza sativa
  Clone ID: PAT_MRT4530_70235C.1
gaattctgttttcccttttcatcgacgtttctcatagcaatgagattcaagatcacatttctgttacatccaaagggtgcaaaaccatctggttccaagatcaattccaagttcgaacaaccaatcccccaaaaaaagatgccaaaaacaacgaagaattgaattaaccatgcttattgcctgcccagaaattcagaaattcagccagtgatcatggtgccggtgccctcgtcggtgaggatctccagcagcagcgagtgcgggacgcggccgtcgatgatactcgcggtgtgcacgccctgcgccagcgcgcggacgcagcactccaccttggggatcatcccaccgcccaccttcccgtcggccaccatctgccgcaccccggcgatgtcgatctccttcacaaggctcccggggtcattgcggtcggcgagtatcccggacacgtcggtgagcagcagcagcttctccgcgcccaccgcggcggcgatctcgccggccgccgtgtcagcgttgatgttgtaggcctgcccggtctcgtcggcggccacagtggcgatgaccgggatgtgaccggaggcgatgattgggtggaggacggtggcgtccacgcgcgagacctcgccgacgaagccgagggccgctgcgttcggggaggggcgcgcggtgaggaggcgagcgtccttgccacagagacctacggcggttccgcccgcgaggttgatgagggagacgaggtgcttgttgaccttgccgacgagcaccatctcgacgacctccatggtgagcgcgtcagtgacgcggaggccgttccggaactgcggctcgacgccgacgcggagcagccaggagttgatctcggggccgccgccgtggacgagcacggggtggaggccgacgcacgagaggaggaccaggtcgcggatcactgaagcctggagctccggcgacttcatcgccgcgccgccgtacttcaccaccacggtcttccccttgaagcgctggatgaaggggagcgcctctgagagcacatccacgcggctcagcgccgccgccgcctccgccgacgaagcagccggcgccgcggcggatgtgacggcgagacggaggcagcgtcgaggggcgggagaggcggcgatgggctttgcgtggttgggacccggagcggggctagacacccgcgtggatgggaggaaagaggaggaggagaggtggggcttcgcgaggagcatggcggcggcggcggcagtcggctcgggactcgtgc

SEQ ID NO: 69582 - DNA, 1455 bp, Oryza sativa
  Clone ID: PAT_MRT4530_70236C.1
ctgtaacgccaagtgaaggggtagagcttttcctcccttttctcaaaatttctctcacacaacagatcagaaatgacgaatggcacaatgaaagactgaaagtttccactaatacagtacttaaataggaaagaaagggcaccgttccattagatgcaagtggaatttgctctgaccatgccatggggggggaaagaacagaggaatgatgtctgcaaggacccagagctctaccagtccagccctccatgccatcagtttctccaaacctcatgagtcacagctagaaccttggtataggggtgccaaatcaagtcattttctccattcacttggggttcacagttcaatctatcatatcacaccaggccaactccaaaaagaatgacaaaaaccacgacgggatgaatcacctcagccagtgatcatggtgccggtgccctcgtcggtgaggatctccagcagcagcgagtgcgggacgcggccgtcgatgatactcgcggtgtgcacgccctgcgccagcgcgcggacgcagcactccaccttggggatcatcccaccgcccaccttcccgtcggccaccatctgccgcaccccggcgatgtcgatctccttcacaaggctcccggggtcattgcggtcggcgagtatcccggacacgtcggtgagcagcagcagcttctccgcgcccaacgcggcggcgatctcgccggccgcggtgtcggcgttgatgttgtaggcctgcccggtctcgtcggcggccacggtcgcgatgaccgggatgtggccggactcgatgatggggtggaggacggacgggttgacgcgcgtcacctcgccaacgaagccgagtgcggcggcgtcgggggaagggcgcgcggtgaggaggcgcgcgtccttgccgcagaggccgacggcggtggcgccggcgacgctgatgagggagacgagctgcttgttgaccttgccgacgagcaccatctccacgacctccatggtgagcgcgtccgtgacgcggaggccgttccggaactgcggctcgacgccgacgcgccccagccacgagttgatctccgggcccccgccgtgcacgagcacggggcggaggccgacgcaggagaggaggaccaggtcgcggatcaccgacgactgcagctcgggcgacttcatcgccgcgccgccgtacttcaccaccaccgtcttgcccctgaaccgctggatgaacgggagcgcctccgagagcacgtccacgcggctcagcgccggtgccgtgggctgggccaccgacgcgggctgcgcgggcgccacggaggaggcgcacacgcggtggtggccgcggcggccacggccggaagccaggggcgtgacgcggctagggtttgggctaggatttgggagcgctgtggtggtggggaggaggaggttggacgaagggtggggcttggtgagcatcat

SEQ ID NO: 69583 - DNA, 882 bp, Oryza sativa
  Clone ID: PAT_MRT4530_70237C.1
atgcagactgctgctgcgacgacatgggcaacggatcgagtgccggttaaacaaaacgagcagatatgcgaaagcagcagctgtgagagagagaagtatacagagcaagaaaaagtaaaggagaaaaagaagacatgttgcgtggaagtccaaagactttcaaagcccaatagcctacctaagcccatctgggcccaacatgatgcagcttgcgactgggcccaatggcccgcgcgggcccacatccgcgttcgcacgctcggcaaccgcgaaacagtcaaacgcaccagacaaagaggagacaacgcccaccaaaaccaaactaacacagatggctcaaaagtagctgagtacaatgccatttcatatacccaacaaatgaggttgaggacagcagttgaacttttgaaggctacaaaggacatagtatcccagttggagaagatttgttccccattgctgattctccacggagcagcagactttggttaccgacccccatgtcagcgaattaccttgtacgagaaagctagcacaaaagacaagactctcaagctctacggagatggataatcattctagtcttatgagggtgaacctgatcgaccggtgtttcaactgccattaattgaacttttgaatgcttggaatggcattgaataccagtttgagaagatttgttccccattgctgattctccacggagcagcagacttggttaccgacccccatgtcagcgaattcctgtacgagaaagctagcacaaaagacaagactctcaagctctacgaagatggatatcattctatcttagagggtgaacctgatgaccggatttcaactgccattaacgacatcatttcatggctggattcgcactgc

SEQ ID NO: 69584 - DNA, 517 bp, Oryza sativa
  unsure (1)..(517): unsure at all n locations
  Clone ID: PAT_MRT4530_70238C.1
agatatgcaaatatagatagatnagcaagacatagatcagatagnaatccagacagacatatagaagcatacatgatatcagtatagaagcaactaccatgagaacagataaagtagacaataggcaaatgacacaacaaacaacaaaaaaagatacctacatgagtcaaantaataaggcaaaatcaactacagtcgcatcatctactacagcaacaagtgctcagcccatgcagagagttcgtaaaggcaacagtataagcataagtaggcaacccccctaacaagggcaaacccaagccaaccgtttatcaaattaagaataaaaaccaaaaccaaaagatacaatagccaagctattttatttagtatggcccaaccaggccacaaggctagagtaagcacaacaatactcacctaccaaagccattaagtattagttcaaaacagataagtagcaaacaagcttaccaaacctggcaaggccaaatttttaaagttgggggttggttttctt

SEQ ID NO: 69585 - DNA, 365 bp, Oryza sativa
  Clone ID: PAT_MRT4530_70239C.1
ggacgaaggcttggctaatcttagcagtgttgctagcagatgcatctaaggctaaggacctgctcatggatttcttttggggactaagctagccgaaaaccatagaccttgtgacatatattatctctagtatgttttcattagggatgttgcagctgattgtaatagaaatagctctgtatagctaagtgttgatgtatagaagagcatgtatgcatgctatatggtagttatgtatttgtgtacagtatacatgcagacatatgtaatctataatggaacggtagtgtaagccagtaaaaccttatgatttgtatgcactggcgcttagctaaaaaaaaaaaaaacgaaaaaaaaaaaaaaaa

SEQ ID NO: 69586 - DNA, 4817 bp, Oryza sativa
  Clone ID: PAT_MRT4530_7023C.1
ccttaccctgagtggtttgaaagagttcctcttcccaatcggttcaaagttctggacttctccaaattttcaggacaagatgatgtgtcgacttatgagcacattagccgattcctagctcaatgtggtgaagcatcggcggtagacgctctgaaagttaggttattccggttatctctgtctagatcggcttttacttggttttcctccttgccatatggttcgatcaacagttgggccgatttggagaagcaattccacaactatttctacagtggggttcatgagctgaacttatctgacttgacgacgattaagcagcggcatgatgaacctgtgcacgagtatattcagagattcagggagatgaggaacaaatgcttcagcttgagtttaactgatgcccagttagccgatttggcctttcacggtctgcggaagttaggaagagctctaagagagttaatcatgtttgtccgtacatgtatggatgatgaggatgatcctgaaatagctgcagccgaatgggtaaggagtaaaaaggtcgtaccatgccaatgggtgaaatgttctggaaaagaggagaagtataattttgatattactaaagctgacaagatcttcgatctgctactccgagaaaagcaaattcaacttcctgctggtcatacaatcccatcggctgaggagttaggcaaaaagaggtattgcaaatggcataattctaggtctcattctactaatgattgcaaggtttttagacaacagattcaggtggccattgaggggggcaagattaggtttgatgattccaaaaagccgatgaaggtcgatggtaatccttttcctgttaatatggtgcatacagctagccaaacaaccgatagggcccgcgcaaggggttttcagaggaagtatgacaagcagcaggagaagcattatgaagaatacgatgatggttttgatcctcattggggttgtgagttctttagattctgctggaatgaagaagacagtgtggtcaggaagaatcaatggtgtccttctgccgaattcgggattgatcaagctgatgtcgacgaggtggaagaggaatcggctaagttggttctgtcaccagaacaggcagtgtttgagaaacccgaggggacagagaatcggcatcttaaaccattgtatataaaatggctacgtcaatgggaagccgatgtctaaaatgatggttgatggtggggttgcggtaaatttgatgccttatgctatgtttaggaagttgggtagaaatgccgaggatctcatcaagacaaacatggtgttcaaagacttcggtggtaatccatcggaaaccaaaggtattctgaatgtggagctgacagtcggcagtaaaactattcctaatatgttttttgccattgatgggaagggttcttacagcttgttgctgggaagggattggattcatgctaattgttgcattccttcaactatgcatcaatgtttgattcaatggcaaggcgacaagatagagatcgtgccagccgacagccaattgaagatggagaacccaagtcattattttgagggcatcgtggagggttcaagtgtctatactaaggatacagtagatgatctcgatgacaagcaaggtcaaggtttcatgtcggccgatgatttggaagaaatagacataggtccaggcgatcggccaaggccaacatttgttaatagagctcttaaaagagtttagagactgcttcgcttgggagtattatgagatgcctagactcagccgatcgattgttgaacatcggctacctatcaaactaggggttaggccacgccagcgaggagatgtaaagccgatatgcttgaacctgtcaacgctgagattaaacgattgtatgatgctggttttattcgtccttgccgatacgctgaatgggtttctagtatagttccagttatcaagaagaatggcaaggtcagggtgtgcattgattttcgagatctgaataaagctacaccgaaagatgaatactcaatgctagtagccgatcagctggttgatgctgcatcagggaacacaattttgagttttatggatgggaacgcgggatataatcaaatctttatggctgaagaagacattcataagacagcttttaggtgtcctggtgcaatcggcttatttgaatgggttgtcatgactttcggcttgaagagtgctggagctacatatcaaagagccatgaattacatatatcatgatctaatcagctggttggttgaagtctacatcgatgatgcggttgttaagtccaaagaaatagatgaccacatagccgatttgaggaaggtttttgagagaaccagaaaatatggcctaaagatgtatccgacaaaatgcgcttttggtgtatcggctggccagtctttgggatttcttgttcatgaaagggggttgaggtaactcaaaggagtgttaatgcgatcaagaagattcagcctctggagaataagacagaattacaggagatgatcggcaagataaattttgttaggaggtttatttctaatttgtctggaaggttagaaccttttacaccattgttgagattgaaagccgatcagcaatttacttggggggcagagcagcaaaaggctttggatgatattaaggaatatcttagctctcctcctgttttgattcctccacggaaaggaataccgtttaggttatatttatcggctggtgagaagtcaatcggctcagatttgattcaggacttggaagggaaggaacgagtcgtattttatcttagtcgtcagctcttggatgctgaaactcggtacacccctatggagaagttatgcttgtgtctgtatttttcgtgtacaaggttgaggcattatctactatctaacgagtgtactgttatatgtaaagctgacgtagtcaaatacatgctatcggctccaatattgaaacgaagggttgggaagtggatattttccttaaccgagtttgatcttcggtatgagtcgccgaaggcaattaagggacaagctatagccgattttattgtgaaacatcgtgatgattcaattggctcggttgaaatattaccgtggactttattctttgatggatcggtgtgtactcatggctgtggtatcggctttgtcataacctctcctagggggtatgtttcgagtttgcttatactattaaaccgtatgcgactaataatcaagctgagtatgaggcagtgctcaaagggttgcaattactcaaggaagttgaagccgataccattgagatcatgggggattctctgttagtaattagtcaattggcaggagagtatgaatgcaagaatgatacattgatggtttataatgagaagtgccaagaactaatgaaagagttttggctggttactttaaagcatgtttctcgagagcaaaatattgaagctaatgatttagcccaaggggcatcgggatataagccgatgatcaaagatgttaaagttgaaattgcagcaatgacaaccgatgattggaggtatgatgtacatcgatatttgagtaatccatctcaatcggtttctaggaaattaagatataaggcattaaagtatacactgttggatgatgagctttattatcggacgattgatggagtattacttaagtgcttgagtgccgatcaagctaaggttgcaatcggcgaagttcatgaaggaatttgtggtactcatcaatcggctcataagatgaagtggttgcttcggcgtgcaggatacttttggccgacaatgctgcaagattgtttcaaatattataaggggtgtcaagattgttagaagtttggagcaattcagcgagcaccagcgtcggctatgaatcctattattaagccatggccgttcagaggatggggagttgatatgatcggtatgataaacccaccatcgagtaaaggacataagtttatattggtggcaactgattatttcaccaagtgggtggaggggattcctttgaagaaagttgattctggggatgccattcaattcgttcaggaatatataatctaccgatttggtattcctcaaactattactaccgatcagggttcaatcttcgtgtctgatgagtttgttcagtttgccgatagcatgggtatcaagttgttgaattcttcaccttattatgcacaagctaacgggcaagccgtggcatctaataaaagtttgatcaaattgattaagcggaaaatttctgattatcctcggcaatggcatactcggttggccgaagcgttgtggtcttataggatggcttgtcatggatcgatccaagtccctccttacaaacttgtttatggacatgaggctgttttgccatgggaggttagaatcggctctcgaagaacggaattacaaaacgatttaacggccgatgagtattacaaccttatggccgatgagagggaggatctggttcagtcacgattgcgtgcccttgcaaaggttaccaaggataaggaacgtgttgctcggcactataataagaaagtggtacctaaagatttttcggaaggagaacttgtatggaagttgattttgccgattggtactcgtgatagtaaatttggcaagtggtcaccgaattgggaaggaccgttccaaatttataaggttgtgtctaagggagcgtatatgttgcaagggcttgatggtgaagtctatgggcgagcgctcaatggcaagtatttgaagaaatattacccaagtgtttcggttaacgca

SEQ ID NO: 69587 - DNA, 585 bp, Oryza sativa
  Clone ID: PAT_MRT4530_70240C.1
tcactctgtttccgggacgatctctatctcgaactccgtctcgagtcctccttcacctccgatccttggattaccaaattcggtcgttaacgcctgccccccatctccccgtgccgccggcatccatggaccaccgtgcctaaccccgcgcatgtggccaccaccatcatcgccgatttgcacagatgcccacgggaactcacagcgggagtccaagtccgctccatcatcaatcctagtcttctctatcgacactatgctggcaccaatcctatatgttgccgtcacctccgagccggagtagtagtagtagtggtaccgcggtttgccgcttgggttgcgacaggtgtcgacgcgggcgcgtggccaaaagccgcggccccgcgccacccgtcgcaccccggccgcgacactccattccgatctctttctcctcgcgccctcgatctgcgtcttcttccattcccctctccctctgcccccctcatcgttgagcttcttcttcttcttcttcttcttgcagcatttttgttggattttttgttgagggagggagagggaatgcggcggcgggttgggctgcat

SEQ ID NO: 69588 - DNA, 204 bp, Oryza sativa
  unsure (1)..(204): unsure at all n locations
  Clone ID: PAT_MRT4530_70241C.1
tcacccttgnggtggngtcttctgtctccatcgncgccgtcgtggccacgctccagggcttgtgggcgtcccccctgtccagctgcgtctcatcttcgccggcttgtttttgttggntggccggncccttgctgncttcgttgtgcgggaaggtgtccaccctccaccttgtcctccgcctccgtggtggggtgcgtgtctttg

SEQ ID NO: 69589 - DNA, 618 bp, Oryza sativa
  Clone ID: PAT_MRT4530_70242C.1
atgtcgtccacgtcgccctcgcgcccgcgcctcccgtgcccacttccccctctctcccgctcgcccgcgctcccgagacggccgggattcgattttcgaatcccgcctctctctcctctcccactcccccacttcggccggcgattcccgcctctcccggccacgctcgccgccgcatcgcgccgtcgccgccgtcgggttcgcgtggccaaggtccaccccgtccgcccctcctccgtcgaggtcgtcccggaccccgtccgccgcttgtcgacctccctctgtcgctcctcgtcgccggtcgtcgccgccccctccggtgaggactccctcccctttcctttccttccccgtgcaccgccgccacccgcgctcgccgccgcttttggttgtcgccgccgccggggcgccgtccgctgccgccgctcgcgccgccgcttgccgtcgccggtggtcgcgtgcgccgccgccgcgccccccatggccggccggccggctttgtgccgagccgagccaagccaggccgccgccgcactgtccgatcggccccgggccaatccgggccgtcgatcccgtggaccggcggtggaccacccgcgtggtcccggtccacggtag

SEQ ID NO: 69590 - DNA, 197 bp, Oryza sativa
  Clone ID: PAT_MRT4530_70243C.1
ttttgatttcgagctgccgcccttattatattcgggagggtttaaattacaaacggtgtggctcaaaagacacgcaccaaaggaggatgtgattaggcacgaccatccgttaagcaccttggcagcggatcatgccggaacagggcgcgaaagacatgcatgggactggggataacctgacaagcgctctaaagcgg

SEQ ID NO: 69591 - DNA, 1629 bp, Oryza sativa
  Clone ID: PAT_MRT4530_70244C.1
atgggcttcatgccgagctataatgtttggacctcacacagggagctaggggttcaaatggatgaagatgaagcagaagacgagaacattccggactgggctcaatacggtggatttgaaggaaatacagcgggcgaggtggacggggctgttgaagatagtgacgctgtagatgatcttggtcagatgttgcaggacgtcaaggaggactgtgaaattgaaaaggaggcaaaatgtggtctgagtgacaaggcatttggcgacttattgaaactagtaaagaacattcttccagaggaaaacaagttgcctgaagcaacgtacgaagctaagaagatagtctgccctctaggactggaggttcagaagatacacgcctgtccgaacgattgtatcctctatcgctgtgaggagtacgagaacctagaagcatgcccggtttgtcaagcactacgatacaagatcagacgagatgatccaggtgaagttgacggacaacctttgaagaagagagttcctgctaagcgcgacgacctccacctggaaccaaaagagaatggaagccagtacttgagtccagccagctacactctgagcaaggcagagatggaaagaatgtttgaatgcttggagagcatcaagctgcttcctgttataattcaaggtattctccctgacaatgtccaggcaacaataacaaatctatgtgctttcatgaacgcaatttcgtacaaggtcatcgatccagatagattagaagaccttcagaatgatgtggtgcaatcaagcatcgccaaggggtatggaacagagaaggtcattgagttttgcatggaatttattgaagaccttcatccaatcggggtggccgaatcacggtatgaagggagactacggggaaaggggactctagaaaggaaagcaattatgactatagacatcaatttattccataaagcacatttcacggttttgcaacaatcttcgttggtggctccttacatcgaggagcacatggtgattgttcgctctgaaaacatcggtaagtctgatgcctggattacacgacatcacattgatactttccccgcgtggctacaacgacatctcatgggtaacgagacgattaaccaacaactagccttcttggtgaggggaccatctatctcgatcacgacatggcaaggttatgagatcaatgagtatacattttacacaagagccctagatagcaagggcatgaaccagaacagtgctgttcgtatcaatgccatgatacacgatggtacaacaaggacgtattacggtgccatcaatgacatttgggaacttgactatggagctctcaagatccctctattccggtgccaatgggttaggtcgactggtggaggcgtatcgatcgatgacagtgggatgacaacggttgaccttagcaaggttggatactcagacgaacccttcgtcctagtcaatgaagtaacgcaagttttctacgtgaaggacatggctagcaaagcaaagaaggggaaaggacccgacgagcctaagctccacgtggttctcccagatgtattgaagatccaactcattctgtatgggcatatgtcaattatatatgataattag

SEQ ID NO: 69592 - DNA, 5208 bp, Oryza sativa
  Clone ID: PAT_MRT4530_70245C.1
atggccgaacgggcagtggcgcacagcctctctccgaacgctagcggtgtcgacggggagcagaacccgcgccgtcgggctcgcaccccaccgtccccctctcgccgaaatcttgggcgggggaggcgctcagggaggtcggaggacacgcgacttcgccactcgcggtcgacgggggaggacggcgagacggagcgcgtcgccgcctcgtctacggcgatggcgcagcgactaggcgccggcgggcggtcctccgccaccgaggcctctggcgcagccgccgccggctccaagtcgtcgaggcggagggcgcggcgagcggcggccgttacccgccattcgtccgccattccctcgtcaatgcctccaacccaagaagatgtgcgtggggggccggatgcccgcctcgatatcgagcgccagcgcgacgctcgtcacgccgcccgcgcaacggagggcgcttcctcgtccggagcgccgcttcggtctgggcactggtccggccccccgtgtccccggttggcggtgccggctgtcgagcctttgtggcgagccttcggaacgtccgttggcccccaaggttccggcccaccatcaccgaaaaatacgacggaagcgtcaaccccgccaagtttctccagatctacacgaccgggatcgaggccgccgggggtgacgacagggtcatggctaatttcttccccgcgtcggtccactcttgggagaatttgtgccaagcagttcaccacgaacttccagggcacatatccgcgcccaggcgaagaagcggacttgcacgcggtacagcgaagggacgatgagtctcttcgctcgtacattcagcggttctgtcaagtccgcaacaccataccgtgcatccccgcacacgcggtgatctacgcgttcagggggggcgtgcggcacaaccgcatgctcgagaagatcgcctccaaggagccccagaccaccgcgcagctttttgagctcgcggaccgtgtggctcgcaaggaggaggcctggacctggaactcctccggttctggtgtggcagcttcggccgcccccgggtccgccgctcggtcagggcggcgggacaggaggaggaagaaggggtcggcccgtttcgacgacgagggtcatgtcctcgccgtcgagggcgcttcgcgggccccccgaaaggggaggcctgcgagcgacaaaaagaaggaggccggcgctcccagcagggagcgcccgaccggcaagtggtgtaccgtgcacaacacctccctccacgacctcgcggactgccgcgcggtcaaaagtttggctgagcggacgaggaagtgggaggaggagaagaggcaggagcgccgtgagggcaagaccctggcggctcccgccggcaaccggcgaggtgaggccaagcagaaggccatcgccgaggacatcgacgatggcgacgatgacctggggttccaggagcctgaggccaccgtcgccaccttggggcgtgtcctcatagacgggggtgcagccctcaacatcctttcccccgcggcctttgacgccatcaaggtcccggggatggtgctccggccgtcccagccgatcatcggtgtgacgccggggcacacctggccgctgggtcatattgacctcccggtcaccttcggtggttccgccaacttccgcacggagcgggtggacttcgatgtggcggacctcagtctgccctacaacgcggttctggggaggcccgcgttggtaaagttcatggcggcggtccactacgcctatctccagatgaagatgccgggccccagtggccccatcaccgtccatggcgacctcaaagtcgcgcttgcttgtatggagcaacgcgcggaccaccttgccgcggcgtccaagcccgcgggcggcgacgagaggctcagcacctccgtcccggccgccccaaggcggcggatggtcacgtgcgacgaggtcccggtcaaggaggaagacgcgctcgtctccttcctgcgggcaaacgccgacgtcttcgcctggagaccggcggacatgcccggggtccccagggaggtgattgagcaccgtcttgccgtgcagccgggcgcaaggccggtccggcagaaagtgcggcggcaggccccggaacgtcaagccttcatccgcgaggaggtggcgcgacttctggaggccggattcatccgtgaggcgaacggcaagcttcggatgtgcatcgactacaccgaccttaacaaggcatgtcctaaggacccttaccccctgccacgcatagatcagattgtcgactccaccgcggggtgcgaccttttgtgttttctagatgcatactctggttatcatcagattcgcatggctagggaggatgaggaaaaaactgcattcattacccccataggaacttattgttatacgacaatgcctttcgggttaaagaatgcaggtcctacttttcaacgtactactcgaatttctttgggtagccagataggacgcaatgttgaggcctatgttgatgacttggttgtgaagacgcgcaaccaagagaccttactctcggatctagcggaaactttcaaaagtctccgctccgcccgcataaagctgaaccccgataagtgcctgttcggcgtgcctgcgagcaagcttctcgggttcttggtctctgcccgaggcatcgaggccaaccccgagaagatacgagctatagagcggatgcgcccccccagcaagcttagggatgtgcagtgcgtcaccggctgcatggccgccctaagtcggttcatatcgaggctgggagagaaggcactacccctatttaagctcctcaaacgctccgggccgtttacctggacggaggaggctgagcggaccttcactcagttgaaagcgtacctcagttctcccccagtcctggtcgccccggagccagatgagccgttgctattctacctggcggcaaccccgcaggcgcccccgacccccaggatggccccggggccactgcgggaaggccgcgcctatcgccctctgaccccgaggtcgtcagcacagaagccgagtgcggggccgcgaggcctctcggacgaagagcgccctggagatgcggcccctggcgaagaggatcggccccgccgaaaggtgcagcggcccatctacttcgttagcgaggccctccgggacgccaagacccgataccctcaggcccagaagatgctttacgctattctgatggcttcgaggaagctgcgccattacttccaggcgcatcgggtcacggtggttacgtcttaccccctcggccaaatcttgcataaccgagagggtactggacgggtggtgagatgggcaatcgaactctctgaattcgatttgcgctttgaaccacgccacacgatcaagagccaggccctcgccgactttgtggcggagtggaccccagctcccgagcccgtctccgcccccgaggccagctcgggccccccgcagctgcctcacaccgcctactggggcgccggtgcgggggtcacgttgacctcgccgagcggagatgtcctcagatatctggtccgcctcgactttcgggcgaccaacaatatggtggagtacgagggactccttgcgggacttagagtggcagctggactggggatccaccgcctcctggtgttaggcgactcccagttagtcgttaaccaggtgcggtgtatggagcgccatttcgacgggatagagcttcggcatgtgcccagacgggataacgcggtcgccgacgaactctcaaggctcgcttcctcgcgagcccagaccccactgggcgcctttgaagaaaggcttgcccagccgtcggcgcgacccgaccccctaggggagacggacgcgcctgaacggcccctgaggcccgtcggagtccaggcctcgggacccgagggaagcgctcccagctcccctagattgattgcttggatcactgagatccaggcatacctcgtagataagactctacccgaggaccgcgaagggagtgaacgcgtccggtgcatctccaagcgctacgtgctggtggaagggaccctctaccggcgcgcggctaacggagtcctcctgaagtgcattcctcgggaacaaggcgtcgagcttctcgccgatatccatgaaggcgagtgcggagcccactccgcctcacgcaccttggttggcaaggcctttcgtcagggtttctattggccgacggctctcaacgatgcggtcgacctggtccggcggtgcagggcgtgccagttccacgccaggcaaacccatcagccggcccaggccctgcagaccatacctctttcgtggccatttgctgtctgggggctcgatatcctgggtccgttcaggcgggccccgggcgggttcgagtatctgtatgtcgctgtcgacaagttcactaagtggcccgaggcttatccggtcatcaagatcgataagcactccgcgcttaaattcatcaggggcatcactgctcgatttggggtgcctaacggtatcattacggataatggcacccaattcactagtgagctcttcggtgactactgcgaagacatgggcatcaagctctgcttcgcctcccccgcccaccctagaagcaatggccaagtggagcgcgccaacgcggaaatcctcaagggcctcaaaaccaagaccttcaacatcctcaagaagcacggcgactcgtggatcgaggagctgccagcggtgctctgggcgaaccgaaccacgccaagccgagcaaccggggaaacgcctttcttcctcgtctacggcgcggaggcggtcctcccatctgagctcaccctgaggtccccttgggtcaccatgtattgcgaggctgatcaagatcagcttcgccgagacgacctcgactacttggaagaacgaaggcggcgcgcggccctacgagccgcgcgataccagcagtgcctgcggcgctaccatcagcgccacgtccgggcccgatcactctgcgtcgacgacctcgtcctacgccgcgtccaaacgcgtgctggactgagcaagctctcaccaatgtgggagggtccgtatcgagtgatcggtgtcccccggccgggctccgttcggctggccacgggcgacggcgcagagctgcctaacccgtggaacatcgaacaccttcgtcgcttctacccctag

SEQ ID NO: 69593 - DNA, 516 bp, Oryza sativa
  Clone ID: PAT_MRT4530_70246C.1
agttccgtcacatcaaatattgtggatgcatcagtagtgagttccagccatggtagcagacaaggtagtgaaggtgttcggcatgtggatgagcctcatggcgatccgtgtgtgagtggatgctccggctccagggctgccactaccagtacttcctagagtacctcgccaatactacgaggcgttgctccggcacaacccggtgaccaaaaaggtgcccgagctggtccacgacgggaaggctctcgccgagtccaccgacatcctcgaggacatcgacgagggctgaaaccacggataccccatcatggcctccgaccccttcgaccgtgctcacgataggttctgttccaggttcgctggagagaagtgccacgctgctctgtaccctatcttcatgaccaccggagatgaacagagaaagctgttgcaccaggaccatgagtgtctgaacactctggacaccttcctggacgagaagaagttcttcggcggcgacgccttcctgtaccttga

SEQ ID NO: 69594 - DNA, 5358 bp, Oryza sativa
  Clone ID: PAT_MRT4530_70247C.1
atggccgaacgggcagtggcgcacaacctctctccgagcgctagcggtgacgacagggagcagaacccgcgccgtcgagctcgtactccaccgtccccctttcgccgaagtcttgggcggaaggaggcgctcgaggggatcgaaagatccgcgacttcgtcacccacgggtgatggagaaggacggcgagacggggagcgtcgcctcctcgtctacggcgatggcagcacgccccagggcgcgctccaggctgcgggcgcgctcctacgtcacccgcccgtcgtccccgatccagagactccagctcgacgttggctggatgatgtggccaacttggtcatgacggcacagcagcgcctaggcgccggcgggcagtccttcgcccccaaggcctctggcgctgctaccaccggctccgtgtcgtcgatgcggagggcgcggcgagcggcggccgttacccgccgttcgtccgttattccctcgtcgacgcctccgacccaagaagatggtcatggcgaatttcttcccatggtcctgaaaggtcaggcgcggggttggctgatgaacttgccacccgcgtcggtacactcttgggaggatttgtgccagcagttcaccatgaacttccagggcacatatccgcgcccaggtgaagaagcggacttgcacgcggtacagcgaggggacgatgagtctcttcgctcgtacattcagcggttctgtcaagtccgcaacactataccatgcatccccgcacacgcagtgatctatgcgttcagggggggcgtgcggcacaatcgcatgctcgaaaagatcgcctccaaggagccccagaccaccgcggagctttttcagcttgcggaccgtgtggctcgcaaggaggaggcctggacctggaactcctccggttccagtgtggcagctccggccgcccccgggtccgctgctcgatcagggcggcgggacaggaggaggaagaagaggtcggccctttccgacgacgaggggcacgtcctcgctgccgagggcgcttcgcgggccacccgaaaggggaggcctgcgagcaacagaaagaaggaggccggcgctcccagcagggagcgcccgaccggcaagtggtgctccgtgcacaacacctccctccacgacctcgcggactgccgcgcggtcaaaagtttggccgagcggacgaggaagtgggaggaggagaggagacaggagcgccgtgatggcaaggccccggcggcccccgccggcaaccagcgaggtgaggccaagcagaaggcccccgccgaggatgtcgacgatggcgacgataacctggggttccaggagcctcaggccacggtcgccaccgtcgatgggggagcgtgcgctcacgcttctcgccggagcctcaaggccatgaagcgagagcttctggccgcggcccctacccatgaggcgacgcggcgggcgcgatggtcggaggtggccctcaccttcgacatgacagaccacccgccgtgcgttgcccggggaggacagatcgcgatggtggtttcccccaccatttgcaatgtgaagttggggcgtgtcctcatagacgggggtgcagccctcaacattctttctcccgcagcctttgacgccatcaaggccccggggatggtggtccggccgtcccagccgatcatcggtgtgacgccggggcacacttggccgctaggtcatatcgacctcccggtcacctttggtggttccgccaatttccgcacggagcgggtgaactttgatgtggcggacctcagtctgccctacaacgcggtcctggggagacccgcgttggtgaagttcatggcggcagtccactacgcctatctccagatgaagatgccgggccctggtggccccatcaccgtccatggcgacctccaagtcgcgcttgcttgtatggagcagcgcgcggaccagctcgccgcggcgtccaagcccgagtgtggcgacgagaggctcagcgccttcgtcccggccgccccgaggcagcggatgatcatgtgcgacgaggtcccggaagacgcgctcgtctccttcctgcgggcaaacgccgacgtcttcgcctggagaccggcggacatgcccggggtccccagggaggtgattgagcaccgtctcgccgtgcggccgggcgcaaggccggtccggcagaaagtgcggcggcaggccccggaacgtcaagccttcatccgcgaggaggtggcgcgacttctggaggccggattcatccgtgaggtcatccatccggagtggctggcgaacccggtcgtcgtccccaaggcgaacggcaagcttcggatgtgcatcgactacaccgacctcaacaaggcatgtcctaaggacccttaccccttgccacgtcctacttttcaacgtactactcgaatttctttgggtagccagttaggacgcaacgttgaggcttatgttgatgacttggttgtgaagacgcgcaaccaagagaccttactctcagatctagcggaaactttcgaaagtctccgctccgcccgcataaagctgaaccccgacaagtgcgtgttcggcgtgcctgcgggcaagcttctcgggttcttggtcactgcccgaggcatcgaggccaaccccgagaagatacgagctatagagcggatgcgcccccccagcaaacttagggatgtgcaatgcgtcaccggctgcatggccgccctaagtcggttcatatcgaggccgggagagaaggcgctacccctatttaagctcctcaaacgttccgggccgtttacctggacggaggaggctgaacgggccctcactcagttgaaggcgtacctcagttctcccccggtcctggtcgccccgaaaccagatgaaccgttgctactttacctggcggcaaccccgcaggtggtcagagcggcgttggtcgtggagcgcgacgaggacaaccctcgctctgcgcacccccactctgtgtcgactcgacccgggagagaccagggaggagaggcccccgagccgaacggcggcccgaggcccccgacggccggagctggccctctgcccgcttgtccgacggtgccaggcccccccgactcccaggatggccccggggccactgcgggaaggccgcgcttgtcgccctccgaccccgaggtcgatgacacagaagccgagtgcgccccgcgcggcctctcggacgaaaagcgccctggagatgcggcccttggcgaagaggatcggccccgccgaaaggtgcagcggcccgtctacttcgttagcgaggccctccgggacgccaagacccgataccctcaggcccagaagatgctttacgctattctgatggcttcgaggaagttgcgccattattttcaggcgcatcgggtcacggtggttacgtcttaccccctcggccaaatcttgcataaccgagagggtactggacgggtggtgaaatgggcaatagaactctctgagttcgatttgcactttgaaccacgccacgcgatcaagagccaggccctcgctgactttgtggcagagtggaccccagctcccgagcccgtctccatccccgaggccagctcgggcccctcgcagccgcctcacaccgtctactgggtgatgcagttcgacgggtccctgtctcttcagggcgccggtgcgggggtcacgttgacctcgccgagcggagacgtcctcagatacctggtccgcctcgactttcgggcgaccaacaatatggcagagtacgagggattccttgcgggacttagggtggcagctggactggggatccgccgcctcctggtgttaggcgactcccagctggtcgttaaccaggtctgtaaggagtatcggtgctctgacccgcagatggacgcttacgtgcgccaggtgcggcgtatggaacgccatttcgacgggaaagagcttcggcacgtgcccagacgggataacgcggtcgccgacgaactctcaaggctcgcttcctcgcgagcccagaccccaccgggcgcctttgaagaaaggcttgcccagccgtcggcgcgacctgaccccctaggggagatggacgcgcctgaacggcccccgaggcccgtcggagtccaggcctcgggacccgaggagagcgctcccagctcccttagattgatcgcttggatcgctgagatccaggcgtacctcacagataagactctacccgaggaccgcgaagggagtgaacgcgtccagcgcatctccaagcactacgtgctggtggaagggaccctctatcggcgcgcggctaacggagtcctcctgaagtgcattcctcgggaacaaggcgtcgagcttcttgccgatatccatgaaggcgagtgtggagcccactccgcctcacgcaccttggttggcaaggcctttcgcctgggtttctattggccgacggctctcaacgatgcggtcgacttggtctggcggtgcagggcgtgccagttccacgccaggcaaacccaccagccggcccaggccctgcagatcatacctctttcgtggccgtttgctgtctgggggctcgatatcctgggtccgttcaggcgggccccgggcgggttcgagtatctgtatgttgctatcgacaagttcactaagtggcccgaggcttatccggtcgtcaagatcgataagcactccgcgcttaaattcatcaggggcatcactgctcggtttggggtgcctaaccgtatcattacggataacggcacccagttcactagtgagctcttcggtgactactgcgaagacatgggcatcaagctctgcttcgcctcacccgcccatcccagaagcaacggccaagtggagcgcgccaacgcggaaatcctcaagggcctcaaaactaagaccttcaatatcctcaagaagcatggcgactcgtggatcgaggagctaccagcggtgctctgggcgaaccgaaccacgccaagccgagcaaccggggaaacgcctttcttcctcgtctacgacgcggaggcggtcctcccatctgagctcaccctggggtcccctcgggccaccatgtattgcgaggctgatcaagatcagcttcgcagagatgacctcgactacttagaagagcgaaggcggcgcgcggccctccgagccgcgcgctatcagcagagcctgcggcgctaccatcagcgccacgtccgggcccgatcactctgcgtcgacgacctcgtcctacgccgcgtccaaacgcgtgctggattgagcaagctctcaccaatgtgggaggcatttttcgatttcctaaggactgtgtctgtgccattgtttccttttgctgaatcttga

SEQ ID NO: 69595 - DNA, 501 bp, Oryza sativa
  unsure (1)..(501): unsure at all n locations
  Clone ID: PAT_MRT4530_70248C.1
ganaccacatctgggatttcaagtatatatnccttnaacaagaatnacggagtcaagctgagtgttagtgcttaacccttgacccccaaaccacnttcaagganactggaatggaactgggtgccgcncnnactacagacnncaaaaagtatgcntgaagatggaaggatttgaaggtgatcaagaaggcngcctaaaccgatcacttccccntgacttgnntntaantgcntatggtgaaagaaatgaaaagaagttgacangtttacnctatacagctancattgacaatttctcatggggtgtggncaaccgtngatgcnctattcnggtggggatacacnccgaagccaaaggaaanggctacttngaagaccgncgcccggcanctacctggacccntncntcctgacacgctattggttgtnaccncaatnctntggganccnccctctntgnccaagttcttctgcntacaagttnccccnaaagtctggtaaa

SEQ ID NO: 69596 - DNA, 1987 bp, Oryza sativa
  Clone ID: PAT_MRT4530_70249C.1
actggtgatacacccagatcattttttttttttttttttttaggggcaagaacgataacgccttttcatcatcggtgcaatgcaatcgtagtcatcatgtaatagtacatatctacgtcgctgcttattgctgagatatttatcaaaaattgatcatcaattggttctacacatacacggacaaaagctggcactctgtagtctgtacccgtatacacacggacagttcgtacctataccattaccattacacccactctcaagtctcaactggaactagccaagctccgtacgcgtaaaccgggggagctcgccgcgccgaggcccaagcgaccaccgtccatccttgcacgccggcgtcgccacgacgccaccgccttcgcggcgcgccgggcacggcaatgcgaggctgctccggcgagaccggcagaacggcggtgggcggtgagctatatgacgcgggcgccgtcaccgggctcgcagaccagcacgcggcggcccggcgggatcttgctcaccagctccggctgcgccttctcgtactcggcccggacgaacgccgccgccgcctccgcgtggccgctctccacgacggcgaggcagcagcctctgaagccggcgccgctgaaccgcgcgccgaggacgccgggtgccttgaggaggatctcgtacagctggatcatctccttgctcccgcattcatagttcagtatggagctgcgaccagatgcagagatcagctggccaaactcacgaagatctccacgagcccacgcatctcttcccttgacaactcgcttcatctcagagaagtagtgctcagctctcctagcgagattttcttctaatatacacttctgagcctcgtatatggctgggttaacattacgaagaatacttgatgcatcttcacagcctgaagcacataaaagagcacgggcagcctctttgcactcaaaaactcgcgtattatatccactcttcttcggtaggttatgttgcagccctgaaaaggctaacaaaatcttgaatggtagttctccttgacattgctgacttttactcaacactgagaagtagacgtaggaatgtgtggcggtcttgcagtccatgaaggtgagatagccataccgtgagagcaaaatagctgatggatccagaataccattttcaagacccaaatatttattttcgatggacttgtccaactgaatgttgtccactggtgatacaaccaggatcattcacattttctaaagccatcaaataggcaatcccgactgctgcagatgaactgagccctgaactgtcaagtcctttcacaccagaaatatatcctataatacccttcttgagatcatatccaaaattttgcagggcataaacagcacctcttgcatagctctcccagtttatgttttctgggttttcaatgggcttttgcaagtcatcaactctgaatcgtatcacaccttcgaattgaccagattggagtgaaatctcggcatcatcagaggccacaaaaccgagaagtacaccataattaatggtcatagctgtgacagttccaccctgatgatcgatgtgagcccccagagggcaaatcctgtaggggcaagcaaccaccctgacctctcctgcaccccttccactaatctccactacctttgctcgaacaacatcaagctgcatcatcagaaacaattgagaaggataagatgaccatacataacaggatgaacctagttgagtactctaagctactcctatcatagatgtatagtaacgtgtaagttcaacaatgtagttaaaagaaaataaaaggatattcaaggccatgcaactttcactagagcaatttaaattccgcatgtcagattggttatatcaaaactcgagctgataggagaaaaactcattgctccttggctagaactatcttcaagcggcattgggctaaacatggtctcatgctgctggaacacca

SEQ ID NO: 69597 - DNA, 389 bp, Oryza sativa
  Clone ID: PAT_MRT4530_7024C.1
atggcagaggaaagagaaaccttcgaaagttaatgggcaccctccgatgttacggaggaaaacgtgaaggagatggtggcgcatggtgttcttccagcgaaagagtcatcggatagcgtctggcatgcggcgaagcattcctgacccctgacacacacgaagttgtggtgttctctcatttcttctacagtgggttttctcttccaacctcaagattcttccgggggattctggagttctatgggattagtttgcatcacctaaaccccaattccatagttcatattgtaatttcatccatgcctgtgaggctttcctgggtatttgtcacgcccgaaaattcactatggatccgaattttctatctgaagatagaaccacctcgcccg

SEQ ID NO: 69598 - DNA, 6009 bp, Oryza sativa
  Clone ID: PAT_MRT4530_70250C.1
atggctgaacgggcagtggcgcacaacccctctccgagcgctagcggtgacgacggggagcagaacccgcgccgtcgagctcgtactccaccgtccccctctcgcagaggtcttgggcgggaggaggcgcttgagggggtcgaaagatccgcgacttcgccgctcgcgggtgatggagaaggacggcgagacggggagcgtcgcctcctcgtctacggcgatggcagcacgccccagggcgcgctccaggccgcaggcgcgctcctgcgtcacccgcccgtcgtccctaatccagagactccagcccgacgttggctggatgacgtggccaacttggtcatgacggcgcagcagcgcctaggcgtcggcgggcggtcctccgccaacaaggcctctggcgctgctaccgccggctcagtgtcgtcgaggcggagggtgcggcgagcggcggccgttgcccgccgttcgttcgccattccctcgacaacgcctccgacccaagaagatgtgcgcgggaggccggatgcccgcctcaatatcgagcgccggcgcaatggttgtcgtgctgcccacgcaacggagggcgcttcctcgtccagagcgccacttcggtccgggcacgggggccagtcccccgtgtccccggttggcggtgccggctgtcgagccttcgtggcgagccttcgaaacgtccgttggcccccaaggttccggcccaccatcaccgaaaaatacgacggaagcgtcaaccccgctgagtttctccagatctacacgactgggatcgaggccgcagggggtgacgacagggtcatggcgaatttcttccccatggctctgaaaggtcaggcgcggggttggctaatgaacttgccacccgcgtcggtccactcttgggaggatttgtgccagcagttcactatgaacttccagggcacatatccacgcccaggtgaagaagcggacttgcatgcggtacagcgaagggacgatgagtctcttcgctcgtacattcagcggttctgtcaagtccgcaacactataccatgcatccccgcacacgcggtgatctacgcgttcagggggggcgtgcggcacaaccgcatgctcgagaagatcgcctccaaggagccccagaccaccgcggaggtttttcagctcgcggaccgtgtggctcgcaaggaggaggcctggacctggaactcccccggttccggtgtggcagcttcggccgcccccgggtccgccgctcggccagggcggcgggacaggaggaggaagaagaggtcggcctattccgacgacgagggtcacgtcctctccgtcgagggcgcttcgcgggccacccgaaaggggaagcctgcgagcgacaaaaagaaggaggcccgcgctcccagcagggaacgcccgtctggcaaatggtgttccgtgcacaacacctccctccacgacctcgcggactgccgcgcggtcaaaagtttggccgagcggacgaggaagtgggaggaggagaggaggcaggagcgccgtgagggcaaggccccggcggctcctgccggcaaccggcgaggtgaggccaagcagaaggccaccgccgaggacgttgatgatggcgacgatgacctggggttccaggagcccggggccaccgtcgccaccgtcgatgggggagcgtgcgctcacgtttctcgccggagcctcaaggccatgaagcgagagcttctggccacggcccctacccatgaggcgacgcagcgggcgcgatggtcggaggttgcccttaccttcgaccaaaccgaccacccgccgtgcgttgcccggggaggacagatcgcgatggtggtttcccccaccgtttgcaatgtgaagttggggcacgtcctcatagacggaggcgcagccctcaacatcctttcccccgcagcctttgacgccatcaaggccccggggatggtgctccggccgtcccagccgatcatcggtgtaacgccggggcacacttggccgctaggtcatatcgacctcccggtcactttcggtggttccgccaacttccgcacggagcgggtgaacttcgatgtggcggacctcagtctgccctacaacgcggtcctggggaggcccgcgttggtgaagttcatggcggcggtccactacgcctatctccagatgaagatgccgggccccggtggccccatcaccgtccacggcgacctcaaagtcgcgcttgcttgtatggagcagcgcgcggaccacctcgccgcgacgtccaagcccgcgggtggcgacgagaggctcagcacctccgtcccagccaccccgaggcaacggatggtcacgtgcgacgaggtcccagtcaaggaggaagacgcgctcgtctccttcctgcgggcaaacgccgacgtcttcgcctggagaccggcggacatgcccggggtccccagggaggtgattgagcaccgtctcgccgtgcggccgggcgcaagaccggtccggcagaaagtgcggcggcaggccccggaacgtcaagccttcatccgcgaggaggtggcgcgacttctggaggccggattcatccgtgaagtcattcatccggagtggctggcgaacccggtcgtcgtccccaaggcgaacggcaagcttcggatgtgcatcgactacaccgacctcaacaaggcatgtcctaaggacccttaccccctgccacgcatagatcagattgtcgactccaccgcggggtgcgaccttttgtgttttctagatgcatactctggttatcatcagattcgcatggctagggaggatgaggaaaaaactgcattcattacccccataggaacttattgttatacgacgatgcctttcgggttaaagaatgcaggtcctacttttcaacgtactactcgaatttctttgggtagccagttaggacgcaatgttgaggcctatgttgatgacttggttgtgaagacgcacaaccaagagaccttactctcagacctagcggaaactttcgaaagtctccgctccgcccgcataaagctgaaccccgacaagtgcgtgttcggcgtgcctgcgggcaagcttctcgggttcttggtctctgcccgaggcatcgaggccaaccccgagaagatacgagctatagagcggatgcgcccccccagcaagcttagggatgtgcagtgcgtcaccggctgcatggccgccctaagtcggttcatatcgaggctgggagagaaggcgctacccctatttaagctcctcaaatgctccgggccgtttacctggacggaggaggctgagcaggccttcactcagttgaaggcgtacctcagttctcccccagtcctggtcgccccggagccagatgagccgttgctactctacctggcggcaaccccgcaggtggtcagcgcggcgttggtcgtggagcgcgacgaggacaaccctcactccgcgcatccccaccctgtgtcgactcaacccgggagtgagcagggaggagaggcccccgagccgaacggtggcccaaggcccccgacggccggagctggccctccgcccacttgtccgacggtaccaggcgcccccgacccccaggaaggccccggggccactgcgggaaggccgcacctgtcgtcctctgaccccgaggttaaccctgtgtcgacccgacccgggagagagcagggaggagaagcccccgagtcggacggtggcccaaggcccccaatggcccccgaaccgaacggcggcccgaggcccccgacggccggagctggtcctccgcccgcttgtccgacggcgccaggcgcccccgacccccaggatggccccggggccactgagggaaggctgcgcctgtcgccctccgaccccgaggtcatcggcacagaagccgagtgcgcggcctctcggacgaagagcgccccgttgatgcggcccctagcgaagaggatcggccccgccgaaaggaagttgcgccattatttccaggcgcatcgggtcacagtggttacgtcttaccccctcggccaaatcttgcataaccgagagggtactggacgagtggtgaaatggacgagagggtacttgcactttgaaccacgccacgcgatcaagagccaggccctcgccgactttgtggcagagtggaccccagctcccgagcccgtctccgtccccgaggccagctcgggccccgagcagctgcctcacaccgcctactgggtgatgcagttcgacggctccctgtctcttcagggcgccggtgcgggggtcacgttgacctcgccgagcggagacgtcctcagatacttggttcgcctcgattttcgggcgaccaataatatggcggagtacgagggactccttgcgggactcagggtggcagctggactggggatccgccgcctcatggtgttaggcgactcccagctggtcgttaaccaggtctgtaaggagtaccggtgctctgacccgcagatggacgcttacgtgcgccaggtgcggcgtatggagcgccatttcgacgggatagagcttcggcacgtgcccagacgggataacgcggtcgccgacgaactctcaaggctcgcttcttcgcgagcccagaccctaccgggcgcctttgaagaaaggcttgcccagccgtcagcgcgacccgaccccctaggggagacggatgcgcctgaacggcccccgaggcccgtcggagtccaggcctcgggacccgaggggagcgctcccagctcccctagatcgattgcttggattgctgagatccaggtgtacctcacagataagactctacctgagaaccgcgaagggagtgaacgcatccagcgcatctccaagcgctacgtgctggtagaagggaccctctatcggcgcgcggctaacggagtcctcctgaaatgcattcctcgggaacaaggtgtcgagcttcttgccgatatccatgaaggtgagtgcggagcccactccgcctcacgcaccttggttggcaaggcctttctccagggtttctattggccgacggccctcaacgatgcggttgacctggtccggcggtgcagggcgtgccagttccacgccaagcaaacccatcagccggcccaggccctgcagaccatacctctttcatggccgtttgctgtctgggggctcgatatcctgggtccgtttaggcgggccccgggcgggtttgagtatctgtatgtcgctgtcgacaagttcactaagtggcccgaggcttatccggtcatcaagatcgataagcactccgcgcttaaattcatcaggggcatcactgctcggtttggggtgcctaaccgtatcattacggataacggcacccagttcactagtgagctcttcggtgactactgcgaagacatgggcatcaagctctgcttcgcctcccccgcccaccccagaagcaatggccaagtggagcgcgccaacgcggaaatcctcaagggccttaaaaccaagaccttcaacatcctcaagaagcacggcgactcgtggatcgaggagctgccagcggtgctctgggcgaaccgaaccacgccaagccgagcaaccggggaaacgcctttcttcctcgtctacggcgcggaggcggttctcccgtctgagctcaccctgaggtcccctcgggccaccatgtattgcgaggctgatcaagatcagcttcgcagagacgacctcgactacttggaagagcgaaggcggcgcgcggccctccgagccacgcgctaccagcagagcctgcggcgctaccatcagcgccacgtccgggcccgatcactctgcgtcgacgacctcgtcctacgccacgtccaaacgcgtgccggattgagcaagctctcaccaatgtgggagggtccgtatcgagtgatcggtgtcccccggccgggctccattcggctggccacgggcgacggcacagagctgcctaacccatggaacatcgaacaccttcgtcgcttctacccctag

SEQ ID NO: 69599 - DNA, 4872 bp, Oryza sativa
  Clone ID: PAT_MRT4530_70251C.1
atgaacttccagggcacatatccgcgcccaggtgaagaagcggacttgcatgcggtacagcgaagggacgatgagtctcttcgctcgtacattcagcggttctgtcaagtccgcaacaccataccatgcatccccgcacacgcggtgatctacgcgttcaggggcggcgtgcggcacaaccgcatgctcgagaagatcgcctccaaggagccccagaccaccgcggagctttttcagctcgcggaccgtgtggctcgcaaggaggaggcctggacctggaactcctccggttccggtgtggcagcttcggctgcccccgggtccgccgctcggtcagggcgacgggacaggaggaggaagaagaggtcggcccattctgacgacgagggtcacgtcctcgccgtcgagggtgtttcgcgggccacccgaaaggggaggcctgcgagcgacaaaaagaaggaggccggcgctcccagcagggagcgcccaaccggcaagtggtgttccgtgcacaacacctccctccacgacctcgcggactgccgcgcggttaaaagtttggctgagtggacgaggaagtgggaggaggagaggaggcaggagcgccgtgagggcaaggccccggcggctcccgccggcaaccggcgaagtgaggccaaacagaaggcccccgccgaggacatcgacgatggccacgatggcctggggttccaggagcctgaggtcaccatcgccaccgtcgatgggggagcgtgcgctcacgtttctcgccggagcctcaaggccatgaagcgagagcttttggccgcagcccctacccatgaggcgacgcggcgggcgcggtggtcggaggttgccctcaccttcgaccagaccgatcacccgccgtgcgttgcccagggaggacagatcgcgatggtggtttcccccaccgtttgcaacgtgaagttggggcgtgtcctcatagacgggggtgcagccctcaacatcctttcccccgcagcctttgacgccatcaaggccccggggatggtgctccggccgtcccagccgattatcggtgtgacgccggggcacacttggccgctaggtcatatcgacctcccggtcaccttcggtggatccgccaacttccgcacggagcgggtgaacttcgatgtggcgaacctcagtctgccctacaacgcggtcctggggaggcccgcgttggtgaagttcatggcggcggtccactacgcctacctccagatgaagatgccgggccccggtggccccatctctgtccatggcgacctcaaagtcgcgcttgcttgtatggagcagcgcgcggaccacctcgccgcggcgtccaagcccgagggtggcgacgggaggctcagcacctccgtcccggccgccccgaggcagcggatggtcacgtgcgacgaggtcccggtcaaagaggaagacgcgctcgtctccttcctgcgggcaaacgccgacatcttcgcttggagatcggcggacatgcccggggtccccagggaggtgattgagcaccgtctcgccgtgcggccgggcgcaaggccggtccggcagaaagtgcggcggcaggccccggaacgtcaagccttcatccgcgaggaggtggcgcgacttctggaggtcggattcatccgtgaggtcatccatccggagtggctggcgaacccggtcgtcgttcccaaggcgaacggcaagcttcggatgtgcatcgactacaccgaccttaacaaggcatgtcctaaggacccttaccccctgcctcgcatagatcagattgtcgactccaccgcggggtgcgaccttttgtgttttctagatgcatactctggttatcatcagattcgcatggctagggaggatgaggaaaaaactgcattcattacccccataggaacttattgttatacgacaatgcctttcggattaaagaatgcaggtcctacttttcaacgtactactcgaatttctttgggtagccagataggacgcaatgttgaggcctatgttgatgacttggttgtgaagacgcgcaaccaagagaccttactctcggatctagcggaaactttcgaaagtctccgctccgcccgcataaagctgaaccccgataagtgcgtgttcggcgtgtctgcgggcaagcttctcgggttcttggtctctgcccgaggcatcgaggccaaccccgagaagatacgagttatagagcggatgcgcccccccagcaagcttagggatgtgcaatgcgtcaccggctgcatggccgccctaagtcggttcatatcgaggctgggagagaaggcgctacccctatttaagctcctcaaactctccgggccgtttacctggacggaggaggctgagcgggccttaactcagttgaaagcgtacctcagttctcccctagtcctggtcgccccggagccagatgagccattgctactctacctggcggcaaccccgcaggtggtcagcgcggcgttggtcgtggagcgcgacgaggacaaccctcgctccgcgcgtccccaccctgtgtcgactcgacccgggagagagcagggaggagaggcccccgagctgaacggcggcccaaggcccccgacggccggagctggccctccgcccgcttgtctgacggtgccaggcgcccccgacccccaggatggccccggggccactgagggaaggccgcgcctgtcgccctctgaccccgaggtcaccggcacagaagccgagtgcgcctcgcgtggcctctcggacgaagagcaccctagagatgcggcccctggcgaagaggataggccccgccgaaaggtgcagcggcccgtctacttcattaccgaggccctccgagacgccaagacccgataccctcaggcccagaagatgctttacgctattctgatggcttcgaggaagttgcgccattatttccaggcgcatcgggtcacggtggttacgtcttaccccctcggccaaattttgcataaccgagagggtactggacgggtggtgagatgggcaatcgaactctctgaattcgatttgcgctttgaaccacgccacgcgatcaagagccaggccctcgccgactttgtggcggagtggaccccagctcccgagctcgtctccgcccccgaggccagctcgggcccctcgcagctgcctcacaccgcctactgggtgatgcagttcgacggctccttgtctcttcaaggcgccggtgtgggggtcacgttgacctcgccgagcggagacgtcctcagatacctggtccgcctcgattttcgggcgaccaacaatatggcggagtacgagggactccttgcgggactcagagtggcagctggactggggatccgccacctcctggtgttaggcgactcccagttggtcgtcaaccaggtctccaaggagtaccagtgctctgacccgcagatggacgcttacgtgcgccaggttcagcgtatggagcgccattttgacgggatagagcttcagcacgtgcccaggcgggataacgcggtcgccgacgaactctcaaggctcgcttcctcgcgagcccagaccccaccgggcgcctttgaagaaaggcttgcccagccgtcggcgcgacccgaccccctaggggagacggacgcgcctgaacggcccccgaggcccgtcggagtccaggcctcgggacccgaggggagcgttcccggctcccctagattgattgcttggatcactgagatccaggcgtacctcgcagataagactctacccgaggaccgcgaagggagtgaacgcgtccggcgcatctccaagcgctacgtgctggtggaagggaccctctatcggcgcgcggctaacggagtcctcctgaagtgcattcctcgggaacaaggcgtcgagcttctcgccgatgtccatgaaggcgagtgcggagcacactccgcctcacgcaccttggttggaaggcctttcgccagggtttctattggccgacggctctcaacgatgcagttgacctggtccggcggtccattcaggcgggccccgggcgggttcgagtatctgtatgtcgctgtcgacaagttcactaagtggcccgaggcttatccggtcatcaagatcgataagcactccgcgcttaaattcatcaggggcatcactgctcggtttggggtgcctaaccgtatcattacggataacggcacccagttcactagtgagctcttcggcgactactgcgaagatatgggcatcaagctctgcttcgcctcccccgcccaccccagaagcaatggccaagtggagcgcgccaacgcggaaatcctcaagggcctcaaaaccaagaccttcaacatcctcaagaagcacgacgactcgtggatcgaggagctgccagcggtgctctgggcgaaccgaaccacgccaagccaagcaaccggggaaacgcctttcttcctcgtctacggcgcggaggcggtcctcccatctgagctcaccctgaggtcccctcgggtcaccatgtattgcgaggctgatcaagatcagcttcgccgagacgacctcgactatttggaagagcgaaggaggcgcgcggccctccgagccacgcgctaccagcagagcctgcggcgctaccatcagcgccacgtccgggcccgatcactctgcgtcgacgaccccgtcctacgccgcgtacaaacgcgtgctggactgagcaagctctcaccaatgtgggagggtccgtatcgagtgatcggcgtcccccggccgggctccgttcggctggccacgggcgacggcacagagctgcctaacccgtggaacatcgagcaccttcgtcgcttctacccttag

SEQ ID NO: 69600 - DNA, 3880 bp, Oryza sativa
  Clone ID: PAT_MRT4530_70252C.1
gacctcgcggactgccgcgcggtcaaaagtttggctgagcggacgaggaagtgggaggaggagaagaggcaggagcgccgtgagggcaagaccccggcggctcccgccagcaaccggcgaggtgaggccaagcagaaggccaccgccgaagacatcgacaatggcgacgatgacctggggttccaggagcctgaggccaccgtcgccaccgtcgatgggggagcgtgcgctcatgcttctcgccgaagcctcaaggccatgaagcgagagcttctggccgcggcccctacccatgaggcgatgcggcgggcgcggtggtcagaggttcccctcaccttcgaccagaccgaccacccgccgtgcgttgcccggggaggacagatcgcgatggtggtttcccccaccgtttgcaatgtgaagttggggcgtgtcctcatagacgggggtgcagctctcaacatcctctcccccgcagcctttgatgccatcaaggccccggggatggtgctccggccgtcccagccgatcatcggtgtgacgccggggcacacctggccgctgggtcatatcgacctcccggtcaccttcggtggttccgccaacttccgcacggaacgggtggacttcgatgtggcggatctcagtctgccctacaacgcggtcctggggaggcccgcgttggtgaagttcatggcggcggtccactacgcctatctccagatgaagatgccgggccccggtggccccatcaccgtccatggcgacctcaaagtcgcgcttgcttgtatggagcagcgcgcggaccacctcgccgcggcgtccaagcctgcgggtggcgacgagaggctcagcacctccgtcccggccgccccaaggcagcggatggtcacgtgcgacgaagtcccggtcaaggaggaagacgcgctcgtctccttcctgcgggcaaacgccgacgtcttcgcctggagaccggcggacatgcccggggtccccagggaggtgattgagcaccgtctcgccatgcggccgggcgcaaggccggtccggcagaaagtgcggcggcaggccccggaacgtcaagccttcatccgcgaggaggtggcgcgacttctggaggccggattcatccgtgaggtcatccatccggagtggctggcgaacccggtcgtcgttcccaaggcgaacggcaagcttcggatgtgcatcgactacaccgaccttaacaaggcatgtcctaaggacccttaccccctgccacgcatagatcagattgtcgactccaccgcgggccagataggacgcaatgttgaggcctatgttgatgacttggttgtgaagacgcgcaaccaagagaccttactctcggatctagcggaaactttcgaaagtctccgctccgcccgcataaagctgaaccccgataagtgcgtgttcggcgtgcctgcgggcaagcttctcgggttcttggtctctgcccgaggcatcgaggccaaccccgagaagatacgagctatagagcggatgcgccccccccagcaagcttagggatgtgcagtgcatcaccggctgcatggccgccctaagtcgattcatatcgaggctgggagagaaggcactacccctatttaagctcctcaaacgctccgggccgtttacctggacggaggaggctgagcgggccttcactcagttgaaggcgtacctcagttctcccctggtcctggtcgccccggagccagatgagccgttgctactctacctagcggcaaccccgcaggtggtcagcgcggcgttggtcgtggagcgcgacgaggacaaccctcactccgcacatccccaccctgtgtcgactcgacccgggagagagcagggaggagaggcccccaagccgaacggcggcccaaggcccccgacggccggagctggccctccgcctgcttgtccgacggtgccaggcgcccccgacccccaggatggccccggggccactgcgggaaggccgcgcctgtcgccctctgaccccgaggtcatcagcacagaagccgagtgcgccccgcgtggcctctcggacgaagagcgccctggagatgcggcccctagcgaagaggatcggccccgccgaaaggtgcagcggcccgtctacttcgttagcgaggccctccgggacgccaagacccgataccctcaggcccagaagatgctttacgctattctgatggcttcgaggaagttgcgccattatttccaggcgcatcgggtcacggtggttacgacttaccccctcggccaaatcttgcataaccgagaggctcccgagcccgtctccgcccccgaggccacctcgggcccctcgcagctgcctcacaccgcctactgggtgatgcagttcgacggctccctgtctcttcagggcgtcggtgcgggggtcacgttgacctcgccgagcggagacgtcctcagatacctggtccgcctcgactttcgggcgaccaacaatatggcggagtacgagggactccttgcgggactcagagtggcagctgaactggggatccgccgcctcctggtgttaggcgactcccagttggtcattaaccaggtctgtaaggagtaccagtgctctgacccgcagatggacgcttacgtgcgccaggtgcggcgtacggagcgccatttcgacgggatagagcttcggcacgtgcccagacgggataacgcggtcgccgacgaactctcaaggctcgcttcctcgcgagcccagaccccaccgagcgcctttgaagaaaggcttgcccagccgtcggcgcgacccgaccccctaggggagacggacgcgcctgaatggcccccgaggcccgtcggagtccaggcctcaggacccgaggggagcgctcccagctcccctagattgattgcttggatcactgagatccaggcgtacctcgcagataagactctacctgaggatcgcgaagggagtgaacgcgtccggcgcatctccaagcgctacgtgctggtggaagggaccctctatcggcgcgcggctaacggagtcctcctgaagcgggccccgggcgggttcgagtatttgtatgtcgctgtcgacaagttcactaagtggcccgaggcttatccggtcatcaagatcgataagcactccgcgcttaaattcatgaggggcatcactgctcggtttggggtgcctaaccgtatcattacggataacggcacccagttcaccagtgagctcttcggtgactactgcgaagacatgggcatcaagctctgcttcgcctcccccgcccaccccagaagcaatggccaagtggagcgcgccaacgcggcaatcctcaagagcctcaaaaccaagaccttcaacatcctcaagaagcacggggactcgtggatcgaggagctgccagcggtgctctgggcgaaccgaaccacgccaagccgagcaaccggggaaacccctttcttcctcgtctacggcgcggaggcggtcctcccatctgagcacaccctgaggtcccctcgggtcactatgtattgtgaggctgatcaagatcagcttcgccgagacgaccttgactatttggaagagcgaagacggcgcgcggccctccgagccgcgcgctaccagcagagcctgcggcgctaccatcagcgccacgtccgggcccgatcactctgcgtcgacgacctcgtcctatgccgcgtccaaacgcgtgctggactgagcaagctctcaccaatgtgggagggtccgtatcgagtgatcggcgtcccccggccgggctccgttcggctggccacgggcgacggcacagagctgcctaacccgtggaacatcgaacaccttcgtcacttctacccctag

SEQ ID NO: 69601 - DNA, 291 bp, Oryza sativa
  Clone ID: PAT_MRT4530_70253C.1
gtggtacttgcctttaacataggcttccggctctcccccaaggagatggttgccatcgaccatcgtgcactgtcttttttggtgatgctcgaggacgtgaagtgcacaaaagaggagacatcctcgctagctatggtgcgtggagtggagaggctcaacggctgtcaccgttactccttaggtgttggtgcggttgtggtggctcgttaccaccaaacacccgcggtggccaatgagggacaaaagccatggagacattctagccagagaggtccactcaagaagttctga

SEQ ID NO: 69602 - DNA, 4923 bp, Oryza sativa
  Clone ID: PAT_MRT4530_70254C.1
atgacggcgcagcagcgactaggcgccggcgggcggtcctccgccaccaagacctctggcgctgctaccaccggctccgtatcgtcaaggcggagggtgcggcgagcggcggccgttgctcgccattcgtccgccactccctcgtcaacgcctccgacccaagaagatctgcgtggggggccggatgcccgcatcagtatcgagcgccggcgtaatggccgacgtgctgcccacgcaacggagggcgcttcctcatccggagcgccacatcggtccgggcacggggatcagccccccgtgtccccggttggcggtgccggctgtcgagcctttgtggcgagccttcggaacgcccgttggcccccaaggttccggcccaccatcaccgaaaaatacgacagaagcgtcaaccccgccgagtttctccagatctacacgaccgggatcgaggccgccgggggtgacgacagggtcatggcgaatttctttcccatggccctgaagggtcaggcgcggcggttctgtcaagtccgcaacaccataccgtgcatccccgcacacgcggtgatctacgcgttcaggggggacgtgcggcacaaccgcatgctcgagaagatcgcctctaaggagccccagaccaccgcgcagctttttgagctcgcggaccgtgtggctcgcaaggaggaggcctggacctggaactcctccggctctggtgtggcagctccggccgcccccgggtccgccgctcggtcagggcggcgagacaggaggaggaagaaggggtcggcccgttccgacgacgagggtcatgtcctcgccgtcgagggcgcttcgtgggccccccgaaaggggaggcctgcgagcgacaaaaagaaggaggccggcactcccagcagggagcgcccgaccggcaagtggtgtaccgtgcacaacacctccctccacgacctcgcggactgccgcgcggtcaaaagtttggctgagcgcacgaggaagtgggaggaggagaagaggcaggagcgccgtgagggcaagtccccggcggctcccgccggcaaccggcgaagtgaggccaagcagaaggccaccgccgagggcatcgacgatggcgacgatgacctggggttccaggagcccgaggccaccgtcgccaccgtcgatgggggagcgtgcgctcacgcttctcgccggagcctcaaggccatgaagcgcgagcttctggccgcggcccctacccatgaggcgacgcggcgggcgcggtggtcggaggttgccctcaccttcgaccagaccgaccacccgccgtgcgttgcccggggaggacagatcgcgatggtggtttcccccaccgtttgcaacgtgaagttggggcgtgtcctcatagacgggggtgcagccctcaacatcctttcccccgctgcctttgacgccatcaaggccccggggatgccgctgggtcatatcgacctcccggtcaccttcggtggttccgccaacttccgcacggagcgggtggacttcgatgtggcggacctcagtctgccctacaacgcggtcctggggaggcccgcgttggtgaagttcatggcggcggtccactacgcctatctccagatgaagatgccgggccccggtggccccatcaccgtccatggcgacctcaaagtcgcgcttgcttgcatggagcagcgcgcggaccacctcgccgcggcgtccaagcccgcgggtggcgacgagaggcccagcacctccgtcccggccgccccaaggcggcggatggtcacgtgcgacgaggtcccggcaaacgccgccgtcttcgcctggagaccggcggacatgcccggggtccccagggaggtgattgagcaccgtctcgccgtgcggccgggcgcaaggccggtccggcagaaagtgcggcggcaggccccggaacatcaagccttcatccgcgagggggtggcgcgacttctggaggccggattcatccgtgaggtcatccatccggagtggctggcgaacccaatcgtcgtccccaaggcgaacggcaagtttcggatgtgcatcgactacaccgaccttaacaaggcatgtcctaaggacccttaccccctgccacgcatagatcagattgtcgactccaccgcgggtcagataggatgcaatgttgaggcctatgttgatgacttggttgtgaagacgcgcaaccaagagaccttactctcggatctagcggaaactttcgaaagtctccgctccgcccgcataaagctgaaccccgataagtgcgtgttcggcgtgcctgcgggcaagcttctcgggttcttggtctctgcccgaggcatcgagtgcgtcaccggcttcatggccgccctaagtcggttcatatcgaggctgggagagaaggcactacccctatttaagctcctcaaacgctccgggccgtttacctggacggaagaggctgagcgggccctcactcagttgaaggcgtacctcagttctcccccagtcctggtcgccccggagccagatgagccgttgctactctacctagcggcaaccccgcaggtggtcagcgcggcgttggtcgtggagcgcgacgaggacaaccctcactccgcgcatccccaccctgtgtcgactcgacccgggagagagcagggaggagaggcccccgagccgaacggcggcccgaggcccccgacggccggagctggccctccgcctgcttgtccgatggtgccaggcgcccccgacccccaggatggccccgaggccactacgggaaggccgcgcctgtcgccctctgaccccaagggcgtcggcacagaagccgagtgcgccccacgtggcctctcggacgaagagcgccctggagttgcggcccctggcgaagaggatcggccccgccgaaaggtgcagcggcccgtctacttcgttagcgaggccctccgggacgccaagacccgataccctcaggcccagaagatgctttacgctattctgatggcttcgaggaagttgcgccattacttccaggcgcatcggatcacggtggttacatcttaccccctcggccaaatcttgcataaccgagagggtactggacgggtggtgagatgggcaatcgaactctctgaattcgatttgcgctttgaaccacgccacgcgatcaagagccaggccctcgccgactttgtggcggagtggaccccagctcccgagcccgtctccgcccccgaggccacctcgggcccctcgcagctgcctcacaccgcctactggggcgccggtgcgggggtcacgttgacctcgccgagcggagacgtcctcagatatctggtccgcctcgacttccgggcgaccaacaatatggcggagtacgagggactccttgcgggactcagagtgacagctggactggggatccgccgcctcctggtattaggcgactcccagttggtcgttaaccagagcttcggcacgtgccccgacgaactctcaaggctcgcttcctcgcgagcccagaccccaccgggcgcctttgaagaaaggcttgcccagccgtcggcgcgacccgacccccaaggggagacggacgcgcctgaacggcccccgaggcccgtcggagtccaggcctcgggacccgaggggagcgctcccagctcccctagattgattgcttggatcactgagatccaggcgtacctcgcagataagactctacccgaggaccgcgaagggagtgaacgcgtccggcgcatctccaagcgctacgtgctggtggaagggaccctctatcggcgcgcggctaacggagtcctcctgaagtgcattcctcgggaacaaggcgtcgagcttctcgccgatatccatgaaggcaagtgcggagcccactccgcctcacgcaccttggttggcaaggcctttcgccagggtttctattggccgacggctctcaacgatgcggtcgacctggtccggcggtgcagggcgtgccagttccacgccaggcaaacccatcagccggcccaggccctgcagaccatacctctttcgtggccgtttgctgtctgggggctcgatatcctgggtccgttcaggcgggccccgggcgggttcgagtatctgtatgtcgctgtcgacaagttcactaagtggcccgaggcttatccggtcatcaagatcgataagcactccgcacttaaattcatcaggggcatcactgctcggtttgggttgcctaaccgtatcattacggataacggcacccagttcactagtgagctcttcggtgactactgcgaagacatgggcatcaagctctgcttcgcctcccccgcccaccccagaagcaatggccaagtggagcgcgccaacgcagaaatcctcaagggcctcaaaaccaagaccttcaacatcctcaagaagcacggcacctcgtggatcgaggagctgccgacggtgctctgggcgaaccgaaccacgccaagccgagcaaccggggaaacgcctttcttccttgtctacggcgcggaggcggtcctcccatctgagctcaccctgaggtcccctcgggtcaccatgtattgcgaggctgatcaagatcagcttcgccgagacgacctcgaccatttggaggagcgaaggcggcgcgcggccctccgaaccgcgcgctaccagcagagcctgcggcgctaccatcagcgccacgtccgggcccgatcactctgcgtcgacgacctcgtcctacgccgcgtccaaacgcgtgctggactgagcaagctcgcaccaatgtgggagggtccgtatcgagtgatcggcgtcccccggccgggctccgttcggctggccacgggcgacggcatagagctacctaacccgtggaacatcgaacaccttcgtcgcttctacccctag

SEQ ID NO: 69603 - DNA, 323 bp, Oryza sativa
  Clone ID: PAT_MRT4530_70255C.1
cagcgacaaaagacgcaggaaaagcaaccaggggaacaggcatcggagcgagaccagataaaggcatcgagacgacgaaacccgaagcgcccagaccaggcgcgaagaacgacgagaccaagaaaagaccggaggaagtggcgaaggaggccggagagccagcgggcacaagggaggaccgactagagcagcgacgaacaggagaacctgacgagcaaacagcgaaacaaagcagagaggcagaggggagaatgagagacgaaacaagaaagacggaagagaacgctacagaggaggagacgaacgagaccgacgagcagtag

SEQ ID NO: 69604 - DNA, 5431 bp, Oryza sativa
  Clone ID: PAT_MRT4530_70256C.1
tcatctggcgcgccaggtagggggcgcgtgtgtctttctaagccctcgtcctctttcgtgtgcgccaagcttctcccgctcagcccaatggccgaacgggcagtggcgcacaacctctctccgagcgctagcggtgacgacggggagcagaacccgcgccgccgagctcgtactccaccgtccccctctcgccgaagtcttgggcgggaggaggcgctcgaggaggtcgaaagatccgcgacttcgccgcccgcgggtgatggagaaggacggcgagacggggaacgtcgcctcctcgtctacggcgatggcagcacgccccagggcgcgctctaggctgcgggcgcgctccaacttggtcatgacggcgcagcagcgcctaggtgccggcgggcggtcctccgccaccaaggcctctagcgctgctaccgccggctccgtgtcgtcgaggcggagggcgcggcgagcggcggccgttacccgccgttcgtccgccattccctcgtcaatgcctccgacccaagaagatgtgcgtggggggcccggcatgcccgactcaatatcgagcgccggcgcaatggtcgtcgtgctgcccacgcaacggaggacgcttcctcgtccggagcgccacttcggtccgggcacggggggccagccccccgtgtccccggttggcggtgccggctgtcgagcctttgtggcgagccttcggaacgtccgttggcccccaaggttccggcccaccatcaccgaaaaatacgacggaagcgtcaaccccgccgagtttctccagatctacacgaccgggatcgaggccgccgggggtgacgacagggtcatggcgaatttcttccccatggccctgagaggtcaggcgcggggttggctaatgaacttgccacccgcgtcggtccactcttgggaggatttgtgccagcagttcaccatgaacttccagggcacatatccgcgcccaggtgaagaagcggacttgcatgcggtacagcgaagggacgatgagtctcttcgctcctacattcagcggttctgtcaagtccgcaacaccgtaccatgcatccccgcacacgcggtgatctacgcgttcagggggggcgtgcggcacaaccgcatgctcgagaagatcgcctccaaggagccccagaccaccgcggagctttttcagctcgcggaccgtgtggctcgcaaggaggaggcctggacctggaactcctccggtaccggtgtggcagctccggccgcccccgggtccgccgctcggtcagggcggtgggacaggaggaggaagaagaggtcggcccattccgacgacgagggtcacgtcctcgctgtcgagggcgcttcgcgggccacccgaaaggggaggcctgcgagcgacaaaaagaaggaggctggcgctcccagcagggagcgcccgaccggcaagtggtgttccgtgcacaacacctccctccacgacctcgcggactgccgtgtggtcaaaagtttggctaagcggacgaggaagtgggaggaggagaggaggcaggagcgccgtgtgggcaaggccccggcgactcccgccggcaaccggcgaggtgaggccaagcagaaggccaccgccgaggacgtcgacgatggcgacgatgacctggggttccaggagcctgaggccaccgtcgccaccgtcgatgggggagcgtgcgctcacgcttctcgccggagcctcaaggccatgaagcgagagcttctggccgcggcccctacccatgaggcgacgcggtgggcgcggtggtcggaggttaccctcaccttcgaccagaccgaccacccgccgtgcatttcccggggaggacagatcgcgatgccgatcatcggtgtgacgccggggcacacttggccgctaggtcatatcgacctcccggtcaccttcggtggttccgccaacttccgcacggagcgggtgaacttcgatgtggcggacctcagtctgccctacaacgcggtcctggggaggcccgcgttggtgaagttcatggcggcggtccactacgcctatctccagatgaagatgtcgggccccggtggccccatcaccgtccatggcgacctcaaagtcgcgcttgcttgtatggagcagcgcgcggaccacctcgccgcggcgtccaagtccgcgggtggcgacgagaggctcagcacctccgtcccagccgccccgaggcagcggatgatcacgtgcgacgaggtcccggaagacgcgctcgtctccttcctgcgggcaaacgccgacgtcttcgcctggagaccggcggacatgcccggggtccccagggaggtgattgagcaccgtctcgccgtgcggccgggcgcaaggccggtccggcagaaagtgcggcggcaggccccggaacgtcaagccttcatccgcgaggaggtggcgcgacttctggaggccggattcatccgtgaggtcatccatccggagtggctggcaaacccggtcgtcgttcccaaggcgaacggcaagcttcagatgtgcatcgactacaccgaccttaacaaggcatgtcctaaggacccttaccccctgccacgcatagatcagattgtcgactccaccgcgggccaaataggacgtaatgttgaggcctatgttgatgacttggttgtgaagacgcgcaaccaagagaccttactctcggatcttgcggaaactttcgaaagtctccgctccgcccgcataaagctgaaccccgacaagtgcgtgttcggcgtgcctgcgggcaagcttctcgggttcttggtctctgcccgaggcatcgaggccaaccccgagaagatacgagctatagagcggatgcgcccccccagcaagcttagggatgtgcaatgcgtcactggctgcatggccgccctaagtcggttcatatcgaggctgggagagaaggcgctacccctatttaagctcctcaaacgctccgggccgtttacctggacggaggaggctgagcgggccttcattcaattgaaggcgtacctcagttctcccccagtcctggtcgccccggagccagatgagccgttgctactctacctggcggcaaccccgcaggtggtcagctcggcgttggtcgtggagcgcgatgaggacaaccctcactccgcgcatccccaccctgtgtcgactcgacccgggagagagcagggaggagaggcccccgaaccgaacggtggcccaaggcccccgacggccggagctggccctccgcctgcttgtccgacggtgccaggcgcccccgacccccaggatggccccggggccactgcgggaaggccgcgcctgtcgccctctgaccccgaggttgtcggcgcagaagccgagggcgccccgcgtggcctctcggatgaagagcgccctggagatgcggcccctggcggagaggatcggccccgccgaaaggtgcagcggcccatctactttgttagcgaggccctccgggacgccaagacccgaaaccctcaggcccagaagatgctttacgctattctgatggcttcgaggaagttgcgccattatttccaggcgcatcgggtcacggtggttacgtcttaccccctcggccaaatcttgcataaccgagagggtactggacgggtggtgaaatgggcaatcgaactctctgagttcgatttgcactttgaaccacgccacgcgatcaagagccaggccctcgccgactttgtggcagagtggaccccagctcccgagcccgtctccgtccccgaggccagctcgggcccctcgcagctgcctcacaccgcctattgggtgatgcagttcgacggctccctgtctcttcagggcgccggtgcgggggtcacgttgacctcgccgagcggagacgtcctcagatacctggttcgcctcgactttcgggcgaccaataatatggcggagtacgagggactccttgcgggactcagggtggcagctggactggggatccgccgcctcctggtctgtaaggagtaccggtgctctgacccgcagatggacgcttacgtgcgccaggtgcggcgtatggagcgccatttcgacgggatagagcttcggcacgtgcctagacgggataacgcggtcgccgacgaactctcaaggctcgcttcctcgcgagcccagatcccaccgggcgcctttgaagaaaggcttgcccagccgtcggcgcgacccgaccccctaggggagacggacgcgcctgaacggcctccgaggcccgtcggagtccaggcctcgggacccgaggggagcgctcccagctcccctagattgattgcttggatcactgagatccaggcgtacctcgcagataagactctacccgaggaccgcgaagggagtgaacgcgtccagcgcatctccaagcgctacgtgctggtggaagggaccctctatcggcgcgcggctaacggagtcctcctgaagtgcattcctcgggaacaaggcgtcgagcttctcgccgatgtccatgaaggcgagtgcggagcccactccgcctcacgcaccttggttggcaaggcctttcgccagggtttctattggccaacggctctcaacgatgcggtcgacctggtctggcggtgcagggcgtgccagttccacgccaggcaaacccatcaaccggcccaggccttgcagaccatacctctttcgtggccgtttgctgtctgggggctcgatatcctgggtccgtttaggcgggccccgggcgggttcgagtatctgtatgtcgctgtcgacaagttcactaagtggcccgaggcttatccggtcatcaagatcgataagcactccgcgcttaaattcatcaggggcatcactgctcggtttggggtgcctaaccgtatcattacggataacggcacccagttcactagtgagctcttcggtgactactgcgaagacatgggcatcaagctctgcttcgcctcccccgcccaccccagaagcaatggccaagtggagcgcgccaacgcggaaatcctcaagggcctcaaaacgaagaccttcaacatcctcaagaagcacggcgactcgtggatcgaggagctgccagcggtgctctgggcgaaccgaaccatgctaagccgagcaaccggggaaacgcctttcttcctcgtctacggcgcggaggcggtcctcccatctgagctcaccctgaggtcccctcgggccaccatgtattgcgaggctgatcaagatcagcttcgcagagacgacctcgactacttggaagagcgaaggcggcgcgtggccctccgagcaagtgcgctaccagcagagcctgcggcgctaccatcagcgccacgtccgggcccgatcactctgcgtcgacgacctcgtcctacgccgcgtcccaaacgcgtgctggactga

SEQ ID NO: 69605 - DNA, 5730 bp, Oryza sativa
  Clone ID: PAT_MRT4530_70257C.1
atggccgaacgggcagtggcgcacaacctctctccgagcgctagcggtgacgacggggagcagaacccgcgccgtcgagctcgtactccaccgtccccctctcgccgaagtcttgggcgggaggaggcgctcgaggaggtcgaaagatccgcgacttcgacgcccgcgggcgatggagaaggacggcgagatggggagcgtcgcctcctcgtctacggcgatggcagcacgcctcagggcgcgctccaagctgcgggcgcgctcctgcgtcacccgcccgtcgtccccgatccagagactccagctcgacgttggctggatgacgtggccaacttggtcatgacggcgcagcagcgtctaggcgccggcgggcggtcctccgccaccaaggcctctggcgctgctaccgccgactccgtgtcgtcgaggcggagggcgcggcgagcggcggccgttatccgccgttcgtccgccattccctcatcaacgcctccgacccaagaagatgtgcgtggggggccggatgcccgcctcaatatcgagcgccggcgcaatggtcgtcgtgctgcccacgcaacggagggcgcttcctcgtccagagcgccacttcggtccgggcacgggggccagccccccgagtccccggttggcggtgctggctgtcgagcctttgtggcgagccttcggaacgtccgttggcccccaaggttccggcccactatcaccgaaaaatacgacggaagcgtcaaccccgccgagtttctccagatctacacgaccgggatcgaggccgcggggggtgacgacagggtcatgtcgaatttcttacccatggccctgaaaggtgaagaagcggacttgcatgcggtacagcgaagggacgatgagtctcttcgctcgtacattcagcggttctgtcaagtccgcaacaccataccatgcatccccgcacacgcggggaggcctgcgagcgacaaaaaggaggccggcgctcccagcaggaagcgcccgaccggcaagtggtgttccgtacacaacacctccctccacgacctcgcggactgccgcgcggtcaaaagtttggctgagcggacgaggaagtgggaggaggagaggaggcaggagcgccgtgagggcaaggccccggcggctcccgccggcaaccggcgaggtgaggccaagcagaaggccaccgccgaggacgtcgacgatggcgacgatgacctggggttccaggagcctggggccaccgtcgccaccgtcgatgggggagcgtgcgctcacgcttctcgccggagcctcaaggccatgaagcgagagcttctggccgcggcccctacccatgaggcgacgcggcgggcgcggtggtcggaggttgccctcaccttcgaccagaccgaccacccgccgtgcgttgcccggggaggacagatcgcgatggtggtttcccccaccgtttgcaatgtgaagttggggcgtgtcctcatagacgggggtgcagccctcaacatcctttcccccgcggcctttgacgccatcaaggccccggggatggtgctccggccgtcccagccgatcatcggtgtgacgccggggcacacttggccactaggtcatatcgacctcccgatcaccttcggtggttccgccaacttccgcacggagcgggtaaacttcgatgtggcggacctcagtctgccctacaacgcggtcctggggaggcccgcgttggtgaagttcatggcggcggtccactacgcctatctccagatgaagatgccgggccccggtggccccatcaccgtccatggcgacctcaaagtcgcgcttgcttgtatggagcagcgcgcggaccacctcgccgcggtgtccaagcccgcgggtggcgacgagaggctcagcacctccgttctagccgccccgaggcagcggatgatcacgtgcgacgaggtcccggaagacgcgctcgtctccttcctgcgggcaaacgccgacgtcttcgcctggagaccggcggacatgcccggggtccccagggaggtgattgagcaccgtctcgccgtgcggccgggcgcaaggccggtccggcagaaagtgcggcggcaggccccggagcgtcaagccttcatccgcgaggaggtggcgcgacttctggaggccggattcatccgtgaggtcatccatccggagtggctggcgaacccggtcgtcgttcccaaggcgaacagcaagcttcggatgtgcatcgactacaccgaccttaacaaggcatgtcctatggacccttaccccctgccacgcatagatcagattgtagactccaccgcggggtgcgaccttttgtgttttctagatgcatactctggttatcatcagatttgcatggctagggaggatgaggaaaaaactgcattcattacccccataggaacttattgttatacgacaatgcctttcgggttaaagaatgcaggtcctacttttcaacgtactactcgaatttctttgggtagccaaataggacgtaatgttgaggcctatgttgatgacttgattgtgaagacgcgcaaccaagagaccttactctcagatctagcggaaactttcgaaagtctccgctccgcccgcataaagctgaaccccgacaacaagcttagggatgtgcaatgcgtcaccggctgcatggccgccctaagtcggttcatatcgaggctgggagagaaggcactacccctatttaagctcctcaaacgctccgggccgtttacctggacggaggaggctgagcgggtcctcactcagttgaaggcgtacctcagttctcccccagtcctggtcgccccggagccagatgagccattgctactctacctggcggcaaccccgcaggtggtcagcgcggcgttggtcgtggagcgtgacgaggacaaccctcactccgcgcatcaccaccctgtgtcgactcgacccgggagagagcagggaggagaggcccccgagccgaacggtggcccaaggcccccgacggccggagctggcccttcgcctgcttgtccgacggtgccagacgcccccgacccccaggatggccccggggccactacgggaaggccgcgcctgtcgccctctgaccccgaggttatcggcgcagaagccgagggcgccccgcgcggcctctcggacgaagagcgccctggagatgcggcccctggcgaagaggatcggccccgccgaaaggtgcagcggcccatctacattgttagcgagaccctccgggacgccaagacccgataccctcaggcccagaagatgctttacgctattctgatggcttcgaggaagttgcgccattatttccaggcgcatcgggtcacggtggttacgtcttaccccctcggccaaatcttgcataaccgagagggtactggacgggtggtgaaatgggcaatcgaactctctgagttcgatttgcactttgaaccacgccacgcgatcaagagccaggccctcgccgactttgtggcagagtggaccccagctcccgagcccgtctccgtccccgaagccagcccgggcccctcgcaactgcctcacaccgcctactgggtgatgcagttcgacggctccctgtctcttcagggcgctggtgcgggagtcacgttgacctcgccgagaggagacgtcctcagatacctggttcgcctcgactttcgggcgaccaataatatggcggagtacgagggtctccttgcgggactcagggtggcatctggactggggatccgccgcctcctggtgttaggcgactcccagctggtcgttaaccaggtctgtaaggagtaccggtgctctgacccgcagatggacgcttacgtgcgccaggtgcggcgtatggagcgccatttcgacgggatagagcttcggcacgtgcccagacgggataacgcggtcgccgacgaactctcaaggctcgcttcttcgcgagcccagaccccaccgggcgcctttgaagaacggcttgcccagccgtcggcgcgacccgaccccctaggggagacggacgcgcctgaacggcccccgaggcccatcggagtccaggcctcgggacccgaggggagcgctcccagctcccttagattgattgcttggatcgctgagatccaggtgtacctcgcagataagactctacccgaggaccgcgaagggagtgaacgcgtccagcgcatctccaagcgctacgtgctggtggaagggaccctctatcggcgcgcggctaacggagtcctcctgaagtgcattcctcgggaacaaggcgtcgagcttcttgccgatatccatgaaggcgagtgtggagcccactccgcctcacgcaccttggttggcaaggcctttcgccagggtttctattggccgacagctctcaacgatgcggtcgacctggtccggcggtgcagggcgtgccagttccacgccaggcaaccccatcagccggcccaggccctgcagaccatacctctttcgtggccgtttgttgtctgggggctcgatatcctgggtccgtttaggcgggccccgggcgggttcgagtatctgtatgtcgctgtcgacaagttcactaagtggcccgaggcttatccggtcatcaagatcgataagcactccgcgcttaaattcatcaggggcatcactgctcggtttggggtgcctaaccgtatcattacggataacggcacccagttcactagtaagctcttcggtgactactgcgaagacatgggcatcaagctctgcttcgcctcccccacccaccccagaagcaatggccaagtcgagcgcgccaacgcggaaatcctcaagggcctcaaaaccaagaccttcaacatcctcaagaagcacggcgactcgtggatcaaggagctgccagcggtgctctgggcgaaccgaaccacgccaagccgagcaaccggggaaacgactttcttcctcatctacggcgcggaggcggtcctcccatctgagctcaccctaaggtcccctcgggccaccatgtattgcgaggctgatcaagatcagcttcgcagagacgacctcgactacttggaagagcgaaggcggcgcgcggccctccgagccgcgcgctaccagcagagcctgcggcgctaccatcagcgccacgtccgggcccgatcactctgcgtcgacaacctcgtcctacgccgcgtccaaacgcgagctggactgagcaagctctcaccaatgtgggagggtccgtatcgagtgatcggcgtcccccggccgggctccgttcggctggccacgggcgacagcacagagctgcctaacccgtggaacatcgaacaccttcgtcgcttctacccctacacgctcgtgctcgaccctgccctcggtggcccgggccggcggaaatcgccaaacggggcccagaatcgagccgcgccccggggcatggtgaactccgggggggaatcggcaaaggcccacaatcgggtcacccataaccctcggtcaccgcgctcccggcctgccagtctcgacatgtggatctccccaggcactagccccgacccgcgccatttgaggctgggacctgggcacgagcccttgttcaagccaagacacagaaggaccgcggcacagaccatcctcgtctcatacacacgacaaatagaattgacacagaaatttcctctttatttgattgcagattaa

SEQ ID NO: 69606 - DNA, 4277 bp, Oryza sativa
  Clone ID: PAT_MRT4530_70258C.1
cagtcaaaagtttggctgagcggacgaaaaaatggagaggggagagagcccaggagccccgtgagggcaaggccccggcggctcccgccggcaaccgggraagtgaggccaagcagaaggcccccgccgaggacatcgacgatggcgacgatgacctggggttccaggagcctgaggccaccatcgccaccgtcgatgggggagcgtgcgctcacgcttctcgccggagcctcaaggccatgaagcgagagcttctggccgcggcccctacccatgaggcgacgcggcgggcgcggtggtcggaggttgccctcaccttcgaccagaccgaccacccgccgtttgcaatgttggggcgtgtcctcatagacgggggagcagccctcaacatcctttcccccgcggcctttgacgccatcaaggccccggggatggtgctctggccgtcccagccgatcatcggtgtgacgccggggcacacttggccgctaggtcatatcgacctcccggtcaccttcggtggttccgccaacttccgcacggagcgggtgaacttcgatgtggcggacctcagtctgccctacaatgcggtcctggggaggcccgcgttggtgaagttcatggcggcggtccactacgcctatctccagatgaagatgccgggccccagtggccccatctccgtccatggcgacctcaaagtcgcgcttgcttgtatggagcagcgtgcggaccatctcgccgcggcgtccaagcccgagggtggcaacgagaggctcagcacctccgtcccagccgccccgaggcagcggatgatcacgtgcgacgaggtcccggtcaaggaggaagacgcgctcgtctccttcctgcgggcaaacgccgacgtcttcgcctggagaccggcggacatgcccggggtccccagggaggtgattgagcaccgtctcgccgtgcggccgggcgcaaggccggtccggcagaaagtgcggcggcaggccccggaacgtcaagccttcatccgcgaggaggtggcgcgacttctggaggccggattcatccgtgaggtcatccatccggagtggctggcgaacccagtcgtcgttcccaaggcgaacggcaagcttcggatgtgtatcgactacaccgaccttaacaaggcatgtcctaaggacccttaccccctgcctcgcatagatcagattgtcgactccaccgcggggtgcgaccttttgtgttttctagatgcatactctggttatcatcagattcacatggctagggaggatgaggaaaaaactgcattcattacccccataggaacttattgttatacgacaatgcctttcgggttaaagaatgcaggtcctacttttcaacgtactactcgaatttctttgggtaaccaaataggacgtaatgttgaggcgtatgttgatgacttggttgtgaagacgcgcaaccaagagaccttactctcggatctagcggaaactttcgaaagtctccgctccgcccgcataaagctgaaccccgataagtgtgtgttcggcgtgcctgcgggcaagcttctcgggttcttggtctctgcccgaggcatcgaggccaaccccgagaagatacgagctatagagcggatgcgcccccccagcaagcttagggatgtgcaatgcgtcatcggctgcatggccgccctaagtcggttcatatcgaggctgggagagaaggcgctacccctatttaagctcctcaaacgctccgggccgtttacctggacggaggaggctgagcgggccttcactcagttgaaggcgtacctcagttctcccccagtcctggtcacctcggagccagatgaaccgttgctactctacctggcggcaaccccgcaggtggtcagcgcggcgttggtcgtggagcgcgacgaggacaaccatcactccgcgcatccccaccctatgttgactcgacccaggagagagcaaggaggagaggcccccgagccgaacggcggcccgaggcccccgacggccggagctggccctccgcccgcttgtccgacggtgccaggcgcccccgacccccaggatggccccggggccactgcgggaaggccgcgcctgtcgccctctgaccccgaggtcgtcggcacagaagtcgagtgcgcccctggtggcctctcggacgaagagcgccctggagatgcggcccctggcgaagaggatcggccccgccgaaaggtgcagcggcccgtctacttcgttagtgaggccctccgggacgccaagacccgataccctcaggcccagaagatgctttacgctattctgatggcttcgaggaagttgcgccattatttccaggcgcatcgggtcacggtggttacgtcttaccccctcggccaaatcttgcataaccgagaggagtggaccccagctcccgagcccatctccgtccccgaggccagctcgggcccctcgcagctgcctcacaccgcctactgggtgatgcagttcgacggctccctgtctcttcagggcgccggtgcgggggtcacgttgacttcgccgagcggagacgtcctcagatacctagttcgcctcgactttcgggcgaccaataatatggcggagtacgagggactccttgcgggactcagggtggcagctggactggggatccgccgcctcctggtgttaggcgactcccagctggtcgttaaccaggtctgtaaggagtaccggtgctctgacccgcagatggacgcttacgtgcgccaggtgcggcgtatggagcgccatttcgacgggatagagcttcggcacgtgcccagacgggataacgcggtcgccgacgaactctcaaggctcgcttcctcgcgagcccagaccccaccaggcgcctttgaagaaaggcttgcccagccgtcggcgcgacccgaccccctaggggagacggacgcgcctgaacggcccccgaggcccgtcggagtccaggcctcgggacccgaggggagcgctcccagctcccttagattgattgcttggatcgctgagatccaggcgtacctcgcagataagactctacccgaggaccgcgaagggagtgaacgcgtccagcgcatctccaagcgctacgtgctggtagaagggaccctctatcggcgcgcggctaacggagtcctcctgaagtgcattcctcgggaacaaggcgtcgagcttctcgccgatatccatgaaggcgagtgcggagcccactccacctcacgcaccttggttggcaaggcctttcgccagggtttctattggccgacggctctcaacgatgtggtcgacctggtccggcggtgcagggcatgccagttccacgccaggcaaacccatcagccggcccaggccctgcagaccatacctctttcgtggccgtttgctgtctgggggcttgatatcctgggtccgtttaggcgggccccgggcggtttcgagtatctgtatgtcgctgttgacaagttcactaagtggcccgaggcttatccggtcatcaaaattgataagcactccacgctcaaattcatcaagggcatcactgctcggtttggggtacctaaccgtatcattacggataacggcacccagttcactagtgagctcttcggtgactactgcgaagacatgggcatcaagctctgcttcgcctcccccgcccaccccagaagcaatggccaagtggagcgcgccaacgcggaaatcctcaagggcctcaaaaccaagaccttcaacatcctcaagaagcatggtgactcgtggatcgaggagctgccagcggtgctctgggcgaaccgaaccacgctaagccgagcaaccggggaaacgcctttcttcctcgtctacggcgcggaggcggtcctcccatctgagctcaccctgaggtcctctcgggccaccatgtattgcgaggctgatcaagatcagcttcgcagagacgacctcgactacttggaagagcgaaggcggcgcgcggtcctccgagccacgcgctaccaacagagcctgcggcgctaccatcagcgccacgtccgggcccgatcactctgcgtcgacgacctcgtcctacgccgcgtccaaacgcgtgctggactgagcaagctctcaccaatgtgggagggtccgtatcgagtgatcggcgtcccccggccgggctccgtttggctggccacgggcgacggcacagagctgcctaacccgtggaacatcgaacaccttcgtcgcttctacccttag

SEQ ID NO: 69607 - DNA, 197 bp, Oryza sativa
  Clone ID: PAT_MRT4530_70259C.1
ctggccgttccacgttcaagtttcaggccagtactgtctgaagctatctaacgactgcagctattggcaattcattctactgaggtcaagatgatcaggctacagggggcattaagatcagttgggaggcgggatgctggcttaccagagtactgctgctagctgtgtaagcatacgccttacactagaagtctgtg

SEQ ID NO: 69608 - DNA, 205 bp, Oryza sativa
  Clone ID: PAT_MRT4530_7025C.1
gaagctaaactttggctccatcaccattcatgagtggctctgagccggggacatcataggggattggacattacatcatccaaatgtaatcacacttaaagtaaacaaacgctcatacaggcatactaaagtctatgcccatcaaaggattattctttcatcgaatccgtaccctagaaaatgcgttgtcacgtcacgaactcac

SEQ ID NO: 69609 - DNA, 5703 bp, Oryza sativa
  Clone ID: PAT_MRT4530_70260C.1
atggccgaacgggcagtggcgcacaacctctctccgagcgctagcggtgacgatggagagcagaacccgcgccgtcgagctcgtactccaccgtccccctctcgccgaagtcttgggcgggaggaggcgctcgaggaggtcgaaagatccgcgacctcgccacccgcgggcaatggagaaggacggcgagacggggagcgtcgcctcctcgtctacggcgatggcagcacgccccagggcgcgctccaggctgcgggcgcgctcctgcgtcacccgcccgtcgtccccgatccagagactccagcccgacgttggctggacgacgtggccgacttggtcatgacggcgcagcagcgcctaggcaccggcgggcggtcctccgccaccaaggcctctggcgctgctaccgccggctccgtgtcgtcgaggcggagggcgcggcgagcggcggctgttacccgccgttcgtccgccattccctcgccaacgcctccgacccaagaagatgtgcgtgggggaccggatgcccgcctcaatatcgagcaccggcgcaatggtcgtcgtgctgcccacgcaacggagggcgcttcctcgtccggagcgccacttcggtccgggcacgggggccagcctcccgtgtccccggtaggcggtgccggctgtcgagcctttgtggcgagccttcggaacgtccgttggcccccaaggttccggcccaccatcaccgaaaaatacgacggaagcgtcaaccccgccgagtttctccagatctatacgaccgggattgaggccgccggggggaggggggtgcggcacaaccgcatgctcgaaaagattgcctccaaggagccccagaccaccgcggagctttttcagctcacggaccgtgtggctcgcaaggaggaggcctggacctggaactcctccggttccggtgtggcagcttcggccgcccccgggtccgccgctcggtcagggcggcgggacaggaggaggaagaagaggtcggcccattccgacgacgagggtcacgtcctcgccgtcgagggcgcttcgcgggccacccgaaaggggaggcctgcgagcgacaaaaagaaggaggccggcgctcccagcagggagcgcccgaccggcaagtggtgttccgtgcacaacacctccctccacgacctcgtggactgccgcgcggtcaaaagtttggctgagcggacgaggaagtgggaggaggagaggaggcaggagcgccgtgagggcaaggccccggtggctcccgccggcaaccgacgaggtgaggccaagcagaaggccaccgccgaggacatcgacgatggcgacgatgacctggggttccaggagcccgaggccaccgtcgccaccgtcgatgggggagcgtgcgctcacgcttctcgccggagcctcaaggccatgaagcgagagcttctggccgcggcccctacccatgaggcgacgcggcgggcgcggtggtcagaggttgccctcaccttcgaccagaccgaccactcgccgtgcgttgctcggggaggacagatcgcgatggtggtttcccccaccgtttgcaatgtgaagttggggcgtgtccttatagacgggggtgcagccctcaacatcctttcccccgcagcctttgacgccatcaaggccccggggatggtgctccggccgtcccagccgatcatcggtgtgacgccgggacacacttggccgctaggtcatatcgacctcccggtcaccttcggtggttccgccaacttccgcacggagcgggtgaacttcgatgtggcggacctcagtctgccctacaacgcggtcctggggaggcccgcgttggtgaagttcatggcggcggcactacgcctatctccagatgaagatgccgggccccggtggccccattaccgtccatggcgacctcaaagtcgcgcttgcttgtatggagcagcgcgcggaccacctcgccgcggcgtccaagcccgcgggtggcgacgagaggctcagcacctccgtcccagccgccccgaggcagcggatgatcacgaagacgcgctcgtctccttcctgcgggcaaacgccgatgtcttcgcctggagaccggcggacatgcccggggtccccagggaggtgattgagcaccgtctcgccgtgcggccgggcgcaaggccggtccggcagaaagtgcggcggcaggccccggaacgtcaagccttcatccgcgaggaggtggcgcgacttctggaggccggattcatccgtgaggtcatccatccggagtggctggcgaacccggtcgtcgtccccaaggcgaacggcaagcttcggatgtgcatcgactacaccgacctcaacaaggcatgtcctaaggacccttaccccttgccacgcatagatcagattgtcgactccaccgcggggtgcgaccttttgtgttttctagatgcatactctggttatcatcagattcgcatggctagggaggatgaggaaaaaactgcatttattacccccataggaacttattgttatacgacaatgcctttcgggttaaagaatgcaggtcctacttttcaacgtactactcgaatttctttgggtagccagttaagacgcaatgttgaggcctatgttgatgacttggttgtgaagacgcgcaaccaagagaccttactctcagacctagcggaaactttcgaaagtctccgctccgcccgcataaagctgaaccccgataagtgcgtgttcggcgtgcccgcgggcaagcttctcgggttcttggtctctgcccgaggcatcgaggccaaccccgagaagatacgagctatagagcggatgcgcccccccagcaagcttagggatgtgcagtgcgtcaccggctgcatggccgccctatgtcggttcatatcgaggctgggagagaaggcgctacccctatttaagctcctcaaacgcttcgggccgtttacctggacggaggaggctgagcgggccctcactcagttgaaggtatacctcagttctcccccggtcctggtcgccccgaagccagatgagccgttgctactctacctggcggcaaccccgcaggtggtcagcgcggcgttggtcgtggagcgtgatgaggacaaccctcactccgcgcacccccactctgtgtcgactagacccgggagagagcagggaggagaggcccccgagccgaacagcggcccgaggcccccaacggccggagctggccctccgcctgtttgtccgatggtgccaggcgcccccgacccccaggatggccccggggccactgcgggaaggccgcgcctgtcgccctccgaccccgaggtcgtcgccacagaagccgagtgcgccccgcgcggcctctcggacgaaaagcgccctggaaatgcggcccctggcgaagaggatcggccccgccaaaaggtgcagcggcccgtctacttcgttagcgaggccctccgggacgccaagacccgacaccctcaggcccagaagatgctttacgctattctgatggcttcgaggaagttgcgtcattatttccaggcgcatcgggtcacggtggttacgtcttaccccctcggccaaatcttgcataaccgagagggtactggacgggtggtgaaatgggcaatcgaactctctgagttcgatttgcactttgaaccacaccacgcgatcaagagccaggccctcgccgactttgtggcagagtggaccccagctcccgagcccgtctccgtccccaaggccagctcgggcccctcgcagctgcctcacaccgcctactgggtgatgcagttcgacggctccctgtctcttcagggcgccggtgcgggggtcacgttgacctcgccgagcggagacgtcctcagatacctggtccgcctcgactttcgggcgaccaacaatatggcagagtacgagggactccttgcgggacttagagtggcagctggactggggatccgccgcctcctggtgttaggcaactcccagctggttgttaaccaggtctgtaaggagtaccggtgctctgacccgcagatggacgcttacgtgcgccaggtacggcgtatggagcgccatttcgacgggatagagcttcggcacgtgcccagacaggataacgcggtcgccgacgaactctcaaggctcgcttcctcgcgagcccagaccccaccgggtgcctttgaagaaaggcttgcccagccgtcggcgcgacccgaccccctaggggagtcggacgcgcctgaacggcccccgaggcccgtcggagtccaggcctcgggacccgaggggagcgctcccagctcccttagattgattgcttggatcgctgagatccaggcgtacctcgcagataaaactctacccgaggaccgcgaagggagtgaacgcgtccagcgcatctccaaacgctacgtgctggtggaagggaccctctatcggcgcgcggcaaacggagtcctcctgaagtgcattcctcgggaacaaggcgtcgagcttcttgccgatatccatgaaggcgagtgcggagcccactccgcctcacgcaccttggttggcaaggcctttcgccagggtttctattggccgacggctctcaacgatgcggtcgacctggtccggcggtgcagggcgtgccagttccacgccaagcaaacccatcagccggcccaggccctgcagaccatacctctttcgtggccgtttgctgtctgggggctcgatatcctgggtccgttcaggcgggccccgggcgggttcgagtatctgtatgtcgccatcgacaagttcactaagtggcctgaggcttatccggtcatcaagatcgataagcactccgcgcttaaattcatcaggggcatcactgctcggttcggggtgcctaaccgtatcattacggataacggcacccagttcactagtgagctcttcggtgactactgcgaagacatgggcatcaagctctgcttcgcctcccccgcccaccccagaagcaatggccaagtggagcgcgccaacgcggaaatcctcaagggccttaaaaccaagaccttcaacatcctcaagaagcatggcgactcgtggatcgaggagctgccagcggtgctctgggcgaaccgaaccacgccaagccgagcaaccggggaaacgcctttcttcctcgtctacggcgcggaggcggtcctcccatctgagctcaccctgaggtcccctcgggccaccatgtattgcgaggctgatcaagatcagcttcgcagagatgacctcgactacttggaagagcgaaggcggcgcgcggccctccgagccgcgcgctaccagcagagcctgcggcgctaccatcagcgccacgtccgggcccgatcactctgcgtcgacgacctcgtcctacgccgcgtccaaacgcgtgctggactgagcaagctctcaccgatgtgggagggtccgtatcgagtgatcggcgtcccccggccgggctccgttcggctggccacgggcgacggcacagagctgcctaacccgtggaacatcgaacaccttcgtcgcttctacccctacattttcgttttcctaaggaatgtgtctgtgccactgtttccttttgaagaatcttggcttgaattagcacgctcgtgctcgatcctgccctcggtggcccgggccggctaa

SEQ ID NO: 69610 - DNA, 510 bp, Oryza sativa
  unsure (1)..(510): unsure at all n locations
  Clone ID: PAT_MRT4530_70261C.1
ctggggctgggttgggggtttaaaattnnnnntttttggtgtttttttttttttttttttttttttttttttttaaaaacccaaaccaaacccaaaccccttttttcccccccgcataaaaaaattacaactgccctggacggtttatttttttcaaaggaagaagggaaactcattttttttttataaacatttttccaacttaaaaataggtagattgaaaaaaaaaatgcacctttttttcccaactaactttaaaaaagggggtgggtccttaaaaaccccccccactttttattttcaacataaaaaaaaaataccggtttttcccgttcgggggccttggaataccctggaaaaaaaaaaaattctactgggtcttgcccctggggcggatcaggtcaataacaccttttctttacccccactctttttccccccaggcaacatgtttaacaaatttttttttaaaaacaattccacccttggcgtaaaaaattctccaccttt

SEQ ID NO: 69611 - DNA, 736 bp, Oryza sativa
  unsure (1)..(736): unsure at all n locations
  Clone ID: PAT_MRT4530_70262C.1
ccggccgggactttcctcgatcgtccgcgcgacacgcaccgctggtccgctgcccgctgctcgtcccatccacccccgcctctcccaccgccggcgacgcgccgcccgcccctctcgacctctccctcctccgcgccggccgtcgcgtgcccccccttaactaccaggtggggcggatcggcccgccacgctcatcggcttccttccccggaggcggggatttctcgcgtctgctgtcgcttctcatgctcgagctcgcatcacgcgtccacccgtgagctccgccccctataatgacggatcccgaaaccctaccctctccctccgcctccactgactcgtcgtcgccaccaccggatgcatgggccgccgagtaccggagactcctccctcagtgggagtcaatgcgtgattcatccaagatcgctatcccaatttcaatatctagagttaaccaatttgatgctgcgaggcttgatgtcgagatgtccgccatgttgaaagagcagttagtcaaagtattctctntggtgaagccaggactcctgttccaatatgagccagaattagatgctntccttgagttcctcatatggagattctcaatatgggttgataagccaactcctggggatgcgctcatgaacctgagatatagagatgaacgggcagcgcccataacaggaaaaagagtcagaacaggtttggaaggacctggactttcagtttctcaaaa

SEQ ID NO: 69612 - DNA, 201 bp, Oryza sativa
  Clone ID: PAT_MRT4530_70263C.1
atgtcgagaatcaaacttattcatgaatgggccaagaactcaaaattaacacgacgaattgggccaaaattcacaagtctgcggagaggagcagtagaggaggccaccagccaaattgtgggctggatgggccggcccctggttcggccgaacccacctggccaccgttggatccaggttttggctggacggctgagatga

SEQ ID NO: 69613 - DNA, 297 bp, Oryza sativa
  Clone ID: PAT_MRT4530_70264C.1
atggcggtagtcacagaggacaaggacgacgaacacgagcggatgtgggcgaggacggggggatggaagtggatgacgacgacatccgcgaaggacgaggacggcaggagggatgcgtgcgacgctagatgccgcggaggacgagtacgtcggctgtggcggaggtgggcgacgacgacaggacagctgtgggcgatgacggtggctacgagtgagggcgatgggacgtgggaccagccgaccctggcgctaaaaacgctgtttgtggggcctgcacgtcctcagacgatcccgtga

SEQ ID NO: 69614 - DNA, 696 bp, Oryza sativa
  Clone ID: PAT_MRT4530_70265C.1
atggctatattagggctgaaggagtttggatctggcatgggagatctattttgtaggctagggtggttgaagaaggcaagaagaagggataaggtctgggctgatgatagtaggaagcaaatgctaagggaggcatcagttatctgcctggcaatggacaatattagcaggatggagagtgctcctgctgttagcgctgacatggagtggtgtgatgaatttggtctaggcagtgaagaatggacaacaaaggttgaaattaagatcagaaatgtcgctgagcatgtgtgtcacccggaaaaaatggaaagattagtatcgtctttctgtgatgtacaaacatatagttttgatgcaatgaaaaaggagtattatatttgtggatttgctcgtagcattgaatcaatcccaaagtataaatacttgaagataaagtatgggacagagaatggagtctggattaagtttttcatgcttaatctagaggctataccgtacgttgatccagaaaaagatgttgtggctaatgagaaggatcctgaactgtatgaagatccagatgttgtgagagaagcctttgaaagtcaagttaggctgcaacgcattgcagatggtgaggaaagcagtatttcggccgatggctctttgtgcatgagcattgactctgactggagcctgaagtatggtgggcgttga

SEQ ID NO: 69615 - DNA, 265 bp, Oryza sativa
  Clone ID: PAT_MRT4530_70266C.1
aatagaatctgggggtgggtttttaatgaatttcgtatattccctgactctatatgatatttctttttttttggaggaaaaattctataacaaggtttgagaccttgaatctattcctcttttttctatactagtagaatttaattgcattgagttctttcttacatctagatcgagtgggatggcaaaatagaaaaaaattctttcggatgaaaatggaagaatttaccccatatatcccacttgacaatagaacaatttctct

SEQ ID NO: 69616 - DNA, 322 bp, Oryza sativa
  Clone ID: PAT_MRT4530_70267C.1
aaaatgaaaccgcaagcgaacagatgttgggacattctaaggaagagagcgggttcttttctacaaaattgaccaataagaatggtgttataccaacattcacataggtcattggtcgccaacgattctggcgacagaatgttacaccaaaaaccattcccgaagatcaagtgcttacttgtaaatcaatagtatccactcaagtaaagactaaacggctaacattcttgatagtttcaagcttttgttgcttgtagattaataagaatattcacaccctccatttttttaggctccaacctttaaaaagcccataagaaat

SEQ ID NO: 69617 - DNA, 1427 bp, Oryza sativa
  Clone ID: PAT_MRT4530_70268C.1
gggtcaagatcgttctggttggagaggtgacgacaccaccacgagcactcgctgccacccacccaccacacaacaccactcaccaccccacgcacgcgcctccactccgattactcaccgccggaacggcgaatggcagccccgcggcggccggcggcggcgaaggcgaggaatggaggaggggcggggaggacgagccggtggatggcggctgacgggagcaagcggtggggggagacgttcttcctgctctacacgcccttctggctcacgctctgcctcggcgtcgtcgtccccttcaagctctacgagaggttcacggagctggagtacctagttgttgggttggtgtccacagtgcctgccttcgtcatcccgctcttcctcgtaggcaaggcagatagtgttagaagtttgaaagatcggtattgggttaaggctaatatttggattataattttcagctatgttggtaattacttttggacgcattacttcttcacagttcttggtgcatcatacactttcccatcatggaggatgaacaacgtaccccatacaacatttctcctgacccacgcttgctttcttttctatcacatgacatcaaatatgagccttcgcaaattacatcattctacagctcatttgccccagtttcttcgatggtcatttgaagctgcatgggttttagcactctcatacttcatagcttacctggaaaccttagccattgcaaataaaatctgtggtaatgccttccagtcaggtcagataccattagacagaccctctgggtacactacttttgaacactgggagaagtttccgtattatgaattcatcgacagggatataatgtacaaagtaggctcactgttttatgcaatatacttcatcgtcagcttcccaatgttttcaaggatcgatgaaaatgaagagaagtggagcctttccagagtggccgtcgacgccttgggtgcagctatgcttgtaacaataatcctcgacctgtggcgcatattcttggggccaattgtacccatccctgaatcaagacgctgcggtcaaccggggcttgcatggttccaggtgcagaacgagagcgtctaacccagcaatgccgcgaattcgacagcaaaccatcatcagctacgcctaccattctccagccagtcctcccctctactggaagttctagtgtggcgtcagcatgtgcgcctcttgctgtcagcttgatttgtttcttgtatgcgatgtcccatgggtaacaactagtaaggatgctgatatggttttcttgatctagaatactaggatttatgagccgacagccggacagatactccaataagctataacaataaagattctttgatgtgatcagaaaaaaaaaaaaaaaaaaaaaaaaaaaaaaaaaaaaaaaa

SEQ ID NO: 69618 - DNA, 244 bp, Oryza sativa
  Clone ID: PAT_MRT4530_70269C.1
gttcgtcaaacagcctccgatgagggagagacccagatcggcacaaccatcatttgttcttgccatccaatgccaatcagacttgcagacgcaccatgatccggtggtattagtattaggttgagaatggtttaattgggaatcggggagttcagaggaaagggttcgggttccaggtttcaagatcagttgctggcaatctataagcttttggctgctactgccgggttaatcctggaaagct

SEQ ID NO: 69619 - DNA, 1491 bp, Oryza sativa
  Clone ID: PAT_MRT4530_7026C.1
gcgattaagggacaagctatagccgattttattgtagaacatcgtgatgattcaatcggcttggttgaaatagtgccatggactttattcttcgatgaatcggtatgtactcatggttgtggtatcggcctagttataatttcccctagtggggcatgtttcgagtttgcttatactattacaccatatgcgactaataatcaagctgagtatgaggcagtgctcaagggggtgcaattactcaaggaagttgaagccgataccattgaaatcatgggggattctttgctagtaatcagtcaattggcagaagagtatgaatgcaagaacgatacattgatggtttataatgagaagtgccaggaactaatgaaagagtttcggctggctaaggttgcaatcggtgaagttcatgaaggagtctgtggtactcatcaatcggctcataagatgaagtggttgcttcggcatgcagggtacttttggccgacaatgctagaggattgtttcagatattataaggggtgtcaggattgtcagaagtttggagcaattcagcgagcgccggcgtcagctatgaatcctattattaagccatggccgttcagaggttggggaattgatataatcagtatgataaacccaccatcgagtaaagggcataaatttatattggtggcaactgattatttcaccaagtgggtagaggaaattcctttgaagaaagttgattctagggatgccattcaattcgttcaagagcatataatctaccgatttggtcttcctcaaactattactaccgatcagggttcaatcttcgtgtccgatgagtttgttcagtttaccgatagcatgggtatcaaattgttgaattcttcaccttattatgcacaagttaatgggcaagccgaggcgtctaataaaagtttgatcaaattgattaagcggaaaatttttgattatccttggcaatggcatactcagttggccgaagcgttgtggtcttataggatggcttgtcatggatcgattcaagtccctccttacaaacttgtttatgggcatgaggctgttttgccgtgggaggttagaatcggctctcgacgaacggaattacaaaacgatttaacagctgatgagtattacaaccttatggccaatgagagggaggatctggttcaatcacgattgcgagcccttgcaaaggttactaagtataaggaacgtattgctcggcattataataagaaagtggtgcctaaagatttttcagaaggagaacttgtatggaaattgattttgccgattggtactcgtgatagtaaattcggcaagtggtcgccgaattgggaaggaccgttccaaatttataaggttgtgtctaagggagcatatatgttgcaagggcttgatggcgaagtctatgggcgagcgctcaatggcaaatatttgaagaaatattacccaagtgtttgggttaacgcatga

SEQ ID NO: 69620 - DNA, 483 bp, Oryza sativa
  Clone ID: PAT_MRT4530_70270C.1
atggtgcggctggtcgacgcgctggtgcacggcggcggcgatgacgatgacgacgatgacggcggtggcgggtactactacttcgccttcggctgggagtgggagaagccgctgctggaggggacgctggtgttcgacaagtcggtggcgctacagggggtggcggctccgccaagtggcggatccaccatggggtctctgaggtttcgagaccccactacccatccaccctggctcccggagccgggggaggccgccggcggcgcagagccagcgaacgtcgtgcgcggcgtggttggccgaagatgtggcggacgaccaatgtcattaagattgggaggaaaggaagtacaaaatgtgtgttacattgacaagagaatgtcgagtaggtccgaggcaaaatgccccggtcccgtgaacaaagaaaggcccaaaatctgcgcggaaaaaactgtagattcacttaattacattggggaatga

SEQ ID NO: 69621 - DNA, 714 bp, Oryza sativa
  Clone ID: PAT_MRT4530_70271C.1
atggatatcacagccatcgacgatcccaaggagtttgacatgctgctgggacgatggcacccgatcgaaggaagtagcggctacgacgggtcaccgttttgtgaaaagaggatccagatcgtgacggggaagacgacgacaccgccgccgccgccggccacaccgttgtgtgcggcggctaggggcaggtttgctgcctgccccgccgtcaggcaccgtacgcccaaggagaacgcgcgcctccggtacgtcgactccggcaggcagcgccgtgccgccgaagggtgcacgccgctggggcgctcccgcgacgtgcggcgccaccggcgcgtctaccgaatcaccgtcttcgccgccgtcgaccacgactccttcgccgcccgcggcgccgaagggaccatgctcctccaccgccacgtccaacgctcggtcgtcgatggccgcgcctcgcgcatctcggtcggttgccggatcaagcaccaccgcctgagcggcttggtccccgccgccgagacgggcgccacttgcccgccgccggccgctgactcggcggccatggagggcggcgtcgcggagtcagagtcgccgccgccgccgcagcaccctctcgccgacgctctcgcgtcgagcttggattcttgcacgctggcctcagacacggcggatcccggggacggcgacctcgcgctagatttaccgttcatgtcagtttga

SEQ ID NO: 69622 - DNA, 239 bp, Oryza sativa
  Clone ID: PAT_MRT4530_70272C.1
ccaacggccacccatgaggatgcatgactttattttaaacattggacccttttttcttttccatttcagccccagacccccccaccggggggaatgctcctgggaccattgtattatttaggataaaccccactttgggggggcaggtttagggccacaaaactttgaccttgaccttgattttgacaaaagtaaacaacccccccctgttgaagttgtatttgttgcaaaatcgcctg

SEQ ID NO: 69623 - DNA, 284 bp, Oryza sativa
  Clone ID: PAT_MRT4530_70273C.1
acagcagcgttcatcacgaagtgcggatgtcgatattagaaaggatacagtacggcaatgtggtcgcttagtcggaggatctacagatgttccctggcattgccgatcgcatgagcaagagaaatagactgcactcgcccctagaggaatgacaatcaaggtagtggcaccgccagacaggatatacatgagtccggatcggcggatgcatactggctacgctcaataccatgaatcagatgcagacctccaacgcctgatacgactaatatggtgcaggcata

SEQ ID NO: 69624 - DNA, 534 bp, Oryza sativa
  Clone ID: PAT_MRT4530_70274C.1
gtggatctggaacgggaaggttgcgacggcgattcgagaaaaggcagcgccggggagaggccaccgtgccgcctggatttggaggcaagctccacgacaacgggcgcctgccttttttctgcccatggcctccactggcttcccttccgccgccgccgccgccgccacttcgagctcctccccacgccctcccgaccggcccttgccgatctgctccatgttggcgagctatacggaggagccaacgtccttcgtcctcgtcggcggctgccagatcgccaccatcgcccacgcctgctgccctcgtccgccgcctgtggaggatgctgaggaggtgtagcagcagcatttggattggatttgcacaagttgttggtgcgagcaaaggaggaggagggccggcaccgtctgcgttccttcacaagcaacaccatcgacaaccccgaactcgtctgcgcgattggagtctgcatccctcatgagagggatagtgtctttggtgctgccatgccaatccgatctattccctctctt

SEQ ID NO: 69625 - DNA, 425 bp, Oryza sativa
  Clone ID: PAT_MRT4530_70275C.1
catttcctgtgaccaacccaggaccaagtgaccaaagtgagacacacgttcttcagcaaaatttggcagctttgtcaggtcaccagggaagggagagagggagggaagaaagctcggcacatccgaagcttgaggccgacggcgaggagcttgagaacgacgccggccacggctgccccctttcgcgcgccgagaatctcctgccgcgccgtgccccactggttggtggagagatggcaccatcgtccccgccaccgtcgagcttgtcgtcctcgtgccgcccgtcaccgtcactgcccgaggccaagtccggccagatctggccgtcccaccaccgctccgccctgccaccgcctcgctgccacgccgcccgccccaagctcaggcgcaccatttctgatggcgcactgcgagtgccctcatag

SEQ ID NO: 69626 - DNA, 5285 bp, Oryza sativa
  Clone ID: PAT_MRT4530_70276C.1
ggaatgaaaaaaaagagaaaatgacaggaaaaagggaaaccgccccacgcaacggagggcacttcctcgtccggagcgccacttcggtccgggcacgggggccggccccccgtgtccccggttggcggtgccggctgtcgagcctttgtggcgagccttcggaacgtccgttggcccccaaggttccggcccaccatcaccgaaaaatacgacggaagcgtcaaccccaccgagtttctccagatctacacgaccgggatcgaggccgccgggggtgacgacagggtcatggcgaatttcttccccatggccctgaagggtcaggcgcggggttggctaatgaacttgccacccgcgtcggtccactcttgggaggatttgtgccagcagttcactacgaacttccagggcatatatccgtgcccaggcgaagaagcggacttgcatgcggtacagcgaagggacgatgagtctcttcgctcgtacattcagcggttctgtcaagtccgcaacaccataccgtgcatccccgcacacgcggtgatctacgcgttcagggggggcgtgcggcacaaccgcatgctcgagaagatcgcctccaaggagccccagaccaccgcgcagctttttgagcttgcggaccgtgtggctcgcaaggaggaggcctgggcctggaactcctccggttctggtgtggcaactccggccgcccccgggtccgccgctcggtcagggcggcgggacaggaggaggaagaaggggtcggcccgttccgacgacgagggtcatgtcctcgccgtcgagggcgcttcgcgggccccccgaaaggggaggcctgcgagcgacaaaaagaaggaggccggcgctcccagcagggagcgcccgaccggcaagtggtgtaccgtgcacaacacctccctccacgacctcgcggactgccgcgcggtcaaaagtttggctgagcggacgaggaagtgggaggaggagaagaggcaggagcgccgtgagggcaagaccccggcggctcccgccggcaaccgacgaggtgaggccaagcagaaggccaccgccgaggacatcgacgatggcgacgatgacctggggttccaggagcctgaggccaccatcgccaccatcgatgggggagcgtgcgctcacgcttctcgccggagcctcaaggccatgaagcgagagcttctggccgcggcccctacccatgaggcgacacggcgggcgcggtggtcggaggttgccctcaccttcgaccagaccgaccacccgccgtgcgttgcccggggaggacagatcgcgatggtggtttcccccaccgtttgcaatgtgaagttggggcgtgtcctcatagacgggggtgcagccctcaacatcctttcccccgcagcctttgacgccatcaaggccccggggatggtgctccggccgtcccagccgatcatcggtgtgacgccggggcacacctggccgctaggtcatatcgacctcccggtcaccttcggtggttccgccaacttccgcacggagcgggtggacttcgatgtggcggacctcagtctgccctacaacgcggtcctggggaggcccgcgttggtgaagttcatggcggcggtccactacgcctatctccagatgaagatgccgggccccggtggccccatcaccgtccatggcgacctatggagcagcgcgcggaccacctcgccgcggcgtccaagcccgcgggtggcgacgagaggctcagcacctccgtcccggccgccccaaggcagcgtatggtcacgtgcgacgaggtcccggaagacgcgctcgtctccttcctgcgggcaaacgccgacgtcttcgcctggagaccggcggacatgcccggggtccccagggaggtgattgagcatcgtctcgccgtgcggccgggcgcaaggccggtccggcagaaagtgcggcggcaggccccggaacgtcaagccttcatccgcgaggaggtggcgcgacttctggaggccggattcatccgtgaggtcatccatccggagtggctggcgaacccggtcgtcgttcccaaggcgaacggcaagcttcggatgtgcatcgactacaccgaccttaacaaggcatgtcctaaggacccttaccccctgccacacatagatcagattgtcgactccaccgcggggtgcgaccttttgtgttttctagatgcatactctggttatcatcagattcgcatggctagggaggatgaggaaaaaatgcattcattacccccataggaacttattgttatacgacaatgcctttcgggttaaagaatgcaggtcctatttttcaacgtactactcgaatttctttgggtagccagataggacgcaatgttgaggcctatgttgatgacttggttgtgaagacgcgcaaccaagagaccttactctcggatctagcgaaaactttcgaaagtctccgctctgcccgcataaagctgaaccccgataagtgcgtgttcggcgtgcctgcgggcaagcttctcgggttcttggtctctgcccgaggcatcgaggccaaccccgagaagatacgagctatagagcggatgcgcccccccagcaagcttagggatgtgcagtgcgtcaccggctgcatggccgccctaagtcggttcatatcgaggctgggagagaaggcactacccctatttaagctcctcaaacgctccgggccgtttacctggacggaggaggctgagcgggccttcactcagttgaaggtgtacctcagttctcccccggtcctggtcgccccggagccagatgagccgttgctactctacctggcggcaaccccgcaggtggtcagcacggcgttggtcgtggagcgcgacgaggacaaccctcactccgcgcatccccaccctgtgtcgactcgacccgggagagagcagggaggagaggcccccgagccgaacggcggcccaaggcccccaacggccggagctggccctccgcctgcttgtccgacggtgccaggcgcccccgacccccaggatggccccggggccactgcgggaaggccgcgcctgtcgccctctgaccccgaggtcgtcggcacagaagccgagtgcgccccgcgtggcctctcggacgaagagcgccctggagatgcgcgaggccctccgggacgccaagacccgataccctcaggcccagaagatactttacgctattctgatggcttcgaggaagttgcgccattatttccaggcgcatcgggtcacggtggttacgtcttaccccctcggccaaatcttgcataaccgagagggtactggacgggtggtgagatgggcaatcgaactctctgaattcgatttgcgctttgaaccacgccacgcgatcaagagccaggccctcgccgactttgtggcggagtggaccccagcgcccgagcccgtctccgcccccgaggccagctcgggcccctcgcagctgcctcacaccgcctactgggtgatgcagttcgacggctccctgtctcttcagggcgctggtgcgggggtcacgttgacctcgccgagcggagacttcctcagatacctggtccgcctcgactttcgggcgaccaacaatatggcggagtacgagggactccttgcgggactcagagtggcagctggactggggatccgccgcttcctggtgttaggcgactcccagttggtcgttaaccaggtctgtaaggagtaccggtgctctgacccgcagatggacgcttacgtgcgccaggtgcggcgtatggagcgccatttcgacgggatagagcttcggcacgtgcccagacgggataacgcggtcgccgacgaactctcaaggctcgcttcctcgcgagcccagaccccaccgggcgcctttgaagaaaggattgcccagccatcggtgcgacccgaccccctaggggagacggatgcgcctgaacggcccccgaggcccgtcggagtccaagcctcgggacccgaggggagcgctcccagctcccctagattgattgcttggatcactgagatccaggcgtaccttgcagataagactctacccgaggaccgcgaagggagtgaacacgttcggcgcatctccaagcgctacgtgctggtggaagggaccctctatcggcgcgcggctaacggagtcctcctgaagtgcattcctcgggaacaaggcgtcgagcttctcgccgatgtccatgaaggcgagtgcggagcccactccgcctcacgcaccttggttggcaaggcctttcgccagggtttctattggccgacggctctcaacgatgcggtcgacctggtccggcggtgcagggcgtgccagttccacgctaggcaaacccatcagccggcccaggccctgcagaccatacctctttcgtggccgtttcctgtttgggggctcgatatcctgggtccgttcaggcgggccccgggcgggttcgagtatctgtatgtcgctgtcgacaagttcactaagtggcccgaggcttatccggtcatcaagatcgataagcactccgcgcttaaattcatcaggggcatcactgctcggtttggggtgtctaaccgtatcattacggataacggcacccagttcactagtgagctcttcggtgactactgcgaagagataggcatcaagctctgcttcgcctcccccgcccaccccagaagcaatggccaagtggagcgcgccaacgcggaaatcctcaagggcctcaaaaccaagaccttcaacatcctcaagaagcacggcgactcgtggatcgaggagctgccagcggtgctctgggcgaaccgaaccacgccaagccgagcaaccggggaaacgcctttcttcctcgtctacggcgcggaggcggtcctcccatctgagcttaccctgaggtcccctcgggtcaccatgtattgcgaggctgatcaagatcagcttcgccgagacgaccttgactatttggaagagcgaaggcagcgcgcggccctccgagccgcgcgctcccagcagagcctgcggcgctaccatcagcgccacgtccgggcccgatcactctgcgtcgacgacctcgtcctacgccgcgtccaaacgcgtgctggactgagcaagctctcaccaatgtgggagggtccgtatcgagtgatcggcgtcccccggccgggctccgttcggctagccacaggcgacggcacagagctgcctaacccgcggaacatcgaacaccttcgtcgcttctacccc

SEQ ID NO: 69627 - DNA, 4020 bp, Oryza sativa
  Clone ID: PAT_MRT4530_70277C.1
atggtggtttcccccaccgtttgcaatgtgaagttggggcgtgtcctcattgacgggggtgcagccctcaacatcctttcccccgctgcctttgacgccatcaaggccccggggatggtgctccggccgtcccagccgatcatcggtgtgacgccggggcacacttggccgctaggccatatcgacctcccggtcaccttcggtggttccgccaacttccgcacggagcgggtgagcttcgatgtggcggacctcagtctgccctacaacgcggtcctggggaggcccgcgttggtgaagttcatggtggcggtccactacgcctatcttcagatgaagatgccgggccccggtggccccatcaccgtccatggcgacctcaaagtcgcgcttgcttgcatggagcagcgcgcggaccacctcgccgcggcatccaagcccgcgggtggcgacgagaggctcagcacctccgtcccaaccgccccgaggcagcggatgatcacgtgcgacgaggtcccgatcaagcaggaagacgcgctcgtctccttcctgcgggcaaacgccgacgtcttcgcctggagaccggcggacatgcccagggtccccagggaggtgattgagcaccgtctcgccgtacggccgggcgcaagaccggtccggcagaaggtgcggcggcaggccccggaacgtcaagccttcatccgcgaggaggtggcgcgacttctggaggccggattcatccgagaggtcatccatccggagtggctggcgaacccggtcgtcgttcccaaggcgaacggcaagcttcggatgtgcatcgactacaccgaccttaacaaggcatgtcctaaggacccttaccccctgccacgcatagatcagattgtcgactccaccgcggggtgcgaccctttgtgttttctagatgcatactctggttatcatcagattcgcatggctagggaggatgaggaaaaaactgcattcattacccccataggaacttattgttatacgacaatgcctttcgggttaaagaatgcaggtcctacttttcaacgtactactcgaatttctttgggtagccaaataggacgtaatgttgaggcctatgttgatgacttggttgtgaaaacacgcaaccaggagaccttactctcggatctagcggaaactttcaaaagtctcctcaccgcccgcataaagctgaaccccgacaagtgcgtgttcggcgtgcctgcgggcaagcttctcgggttcttgatctctgcccgaggcattgaggccaaccccgagaagatacgagctatagagcggatgcgcccccccagcaagcttagggatgtgcaatgcgtcactggctgtatggccgccctaagtcggttcatatcgaggctgggagagaaggcgctacccctatttaagctcctcaaacgctccgggccgtttatctggacggaggaggctgaacgggccctcactcagttgaaggcgtacctcagttctcccccagtcctggtcgccccggagccagatgagccgttgctactctacctggcggcaactccgcaggtggtcagcgcggcgttggtcgtggagcgcgacgaggacgaccctcgctccgcgcatccccaccctgtttcgactcgacccgggagagagcagggaggagaggcccccgagccgaacggcggcccgaggcctccgacgaccggagctggccctctgcccgcttgtccgacggtgccaggagcccccgacccccaggatggccccggggccactgcgggaaggccgcgcctgtcgccttccgaccccgaggtcgtcgacacagaagccgagtgcgccccgcgcggcctctcggacgaaaagcgccctggagatgcggcccctggcgaagaggatcggccccgccaaaaggtgcagcggcccgtctactttgttagtgaggccctccgggacaccaagacccaataccctcaggcccagaagatgctttacgctattctgatggcttcgaggaagttgcgccattatttccaggcgcatcgggtcacggtggttacgtcctaccccctcggccaaatcttgcataaccgagagggtactggacgggtggtgaaatgggcaatcgaactctctgagttcgatttgcactttgaaccacgccacgcgatcaagagccaggccctcgctgactttgtggcagagtggacaccggctcccgagcccgtctccatccccgaggccagctcgggcccttcgcagctgcctcacaccgcctattgggtgatgcagttcgacggctccctgtctcttcagggcgccggtgcgggggtcacgttgacctcgccgagcggagatgtcctcaaatacctggtccgcctcgactttcgggcaaccaacaatatggtagagtacgagggactccttgcgggactcagagtggcggctggactggggatccgccgcctcctggtgttaggcgactctcagttggtcgttaaccaggtctccaaggagtaccagtgctctgacccgcagatggatgcttacgtgcgccagagcttcggcacgtgcccagacgggataacgcggtcgccgacaaggctcgcttcctcgcgagcccagaccccaccgggcgcctttgaagaaaggcttgcccagccgtcggcgcgacccgaccccctaggggagacggacgcgcctgaacggcccccgaggcccgtcggagtccaggcctcgggacccgaggggagtgctcccagctcccttagattgattgcttggatcgctgagatccaggcgtacctcgcagataagactctacccgaggaccgcgaagggagtgaacgcgtccagcgcttctccaagcgctacgtgctggtggaagggaccctctatcggcacgcgactaatggagtcctcatgaagcgcattcctcgggaacaaggcgtcgagcttcttgcctatatccataaaggcgagtgcggagcccactttgcctcacgcaccttggttggcaaggcctttcgccagggtttctattggccgacggctctcaacgatgcggtcgacctggtccggcggtgcagggcgtgccaattccacgccaagcaaacccatcagccggcccaggccctgcagaccatacctctttcatggccgtttgctgtctgggggctcgatatcctgggtccgtttagacgggccccgggcgggttcgagtatctgtatgtcgctatcgacaagttcactaagtggcccgaggcttatccggtcatcaagatcgataagcactccgcacttaaattcatcagggatatcactgctcggtttggggtgcctaaccgtatcattatggataacggcacccagttcactagtgagctcttcggtgactactgcgaagacatgggcattaagctctgcttcgcctctcccgcccaccccagaagcaatggccaagtggagcgcgccaacgcaaaaatcctcaagggcctcaaaaccaagaccttcaacatcctcaagaagcacggcgactcgtggatcgaggagctgccagcggtgctctgggcgaaccgaaccacgccaagccgagcaaccggggaaacgcctttcttcctcgtctacggcgcggaggcggttctcccatccgagctcaccctgaggtcccctcgggccaccatgtactgcgaggctgatcaagatcagcttcgcagagatgacctgactacttggaagaacgaaggcggcgcggctattcgagccgcgcgctaccagcagagcctgcggcgctaccatcagcgtcacgtccgggcccgatcactctgcgtcgacgacctcgtcctacgccgcgtccaaacgcgtgctggactgagcaagctctcaccaatgtgggagggtccgtatcgagtgatcggcgtcccccggccgggctccgttcggctggccacgggcgacggcacagagctgcctaacccgtggaacatcgaacaccttcgtcgcttctacccctag

SEQ ID NO: 69628 - DNA, 5661 bp, Oryza sativa
  Clone ID: PAT_MRT4530_70278C.1
atggctgaacgggcagtagcgcataacctctctccgagcgctagcggtgacgacggggagcagaacccgtgccgtcgagctcgtactccaccgtccccctctcgccgaagtcttgggcgggaggaggcgctcgagggggtcgaaagatccgcgacttcgccgctcgcgggcgatggagaaggacggcgggacggggagcgtcgcctcctcgtctacggcgacggcagcacgccccagggcgcgctcctgcgtcacccgcccgtcgtccccgatccagagactccagcccgacgttggctggatgacgtggccaacttggtcataacggcgcagcagcacctaggcaccggcgggcggtcctccgccaccaaggcctctgatgctgctaccaccggctccgcgtcgtcgaggcggagagcgcggcgagcggcggctgttacccgccgttcgtccgccattccctcatcaacgcctccgacccaagaagacgtgcgtggggggccggatgcccgcctcagtatcgagcgccggtgcaattgtcgtcgtgctgcccacgcaacggagggcgcctcctcgtccggagcgccactttggtccgggcacgggggccagccccccatgtccccggttggcggtgccggctgtcgagcctttgtggcgagccttcggaatgtccgttggcccccaaggttccggcccaccatcaccgaaaaatacgacggaagcgtcaaccgcgccgagtttctccagatctacatgactaggatcgaggccgccgggggtgacgacagggtcatggcgaatttcttccccatggccttgaaaggtcaggcgcggggttggctaatgaacttgccacccgcgtcggtccactcttgggaggatttgtgccagcagttcaccatgaacttccagggcacatatcctcgcccaggtgaagaagcggacttgcatgcggtacagcgaagggacgatgagtctcttcgctcgtacattcagcggttctgtcaagtccgcaacaccataccatgcatccccgcacacgtggtgatctacgcgttcagggggggcgtgcggcacaaccgcatgctcgagaagatcgcctccaaggagccccagaccaccgcggagctttttcagctcgcggaccgtgtggctcgcaaggaggaggcctggacctggaactcctccggttccggtgtggcagcttcggccgcccccgggtccgccgctccgtcagggcggcgggacaggaggaggaagaagaggtcggcccattccgatgacgagggtcacgtcctcgccgtcgagggcgcttcgcgggccacccgaaaggggaggcctgcgagcgacaaaaagaaggaggccggcgctcccagcagggagcgcccgaccggcaagtggtgttccgtgcacaacacctccctccacgacctcgcggactgccgcgcagtcaaaagtttggctgagcggacgaggaagtgggaggaggagaggaggcaggagcgccgtgagggcaaggccccggcggctcccgccggcaaccggcgaagtgaggccaaacagaaggcccccgccgaggacatcgacgatggcgatgatggcctggggttccaggagcttgaggccaccatcgccaccgtcgatgggggagcgtgcgctcacgtttctcgccggagtctcaaggccatgaagcgagagcttttggccgcagcccctacccatgaggcgacgcggcgggcgcggtggtcagaagttgccctcaccttcgaccagaccgatcacctgccgtgcgttgcccggggaggacagatcgcgatggtggttttccccaccgtttgcaacgtgaagttggggcgtgtcctcatagacgggggtgcagccctcaacatcctttcccccgcagcctttgacgacatcaaggccccggggatggtgctccggccgtcccagccgattatcggtgtgacgccggggcacacttggccgctaggtcatatcgacctcccggtcaccttcggtggatccgccaacttccgcacggagcgggtgaacttcgatgtggcggacctcagtctgccctacaacgcggtcctggggaggcccgcgttggtgaagttcatggcggcggtccactacgcctacctccagatgaagatgccgggccccggtggccccatctctgtccatggcgacctcaaagtcgcgcttgcttgtatggagcagcgcgcggaccacctcgccgcggcgtccaagcccgagggtggtgacgggaggctcagcacctccgtcccggccgccccgaggcagcggatggtcacgtgcgacgaggtcccggtcaaagaggaagacgcgctcgtctccttcctgcgggcaaacgccgacgtcttcgcttggagaccggcggacatgcccggggtccccagggaggtgattgagcaccgtctcgccgtgcggccgggcgcaaggccggtccggcagaaagtgcggcggcaggccccggaacgtcaagccttcatccgcgaggaggtggcgcgacttctggaggccggattcatccgtgaggtcatccatccggagtggctggcgaacccggtcgtcgttcccaaggcgaacggcaagcttcggatgtgcatcgactacaccgactttaacaaggcatgtcctaaggacccttaccccctgcctcgcatagatcagattgtcgactccaccgcggggtgcgaccttttgtgttttctagatgcatactctggttatcatcagattcgcatggctagggtggatgaggaaaaaactgcattcataacccccataggaacttattgttatacgacaatgcctttcgggctaaagaatgtaggtcctacttttcaacgtactactcgaatttctttgggtagccaaataggacgtaatgttgaggcctatgttgatgacttggttgtgaagacgcgcaaccaagagaccttactctcggatctagcggaaactttcgaaagtctccgctccgcccgcataaaactgaaccccaacaagtgcgtgtttggtgtgcctgcgggcaatcttctcgggttcttggtctctgcccgaggcatcgaggccaaccccgagaagatacgagctatagagcggatgcgcccccccagcaagcttagggatgtgcaatgcgtcaccggctgcatggccgccctaagccggttcatatcgaggctgggagagaaggcactacccctatttaagctcctcaaacgctccgggccgtttacctggacggaggaagctgagcgggccctcactcagttgaaggcatacctcagttctcccccagtcatggtcgccccggagccagatgagccgttgctactctacctggcggcaacaccgcaggtggtcagcgcggcgttggtcgtggagcgcgacgaggacaaccctcactccgcgcatccccaccctatgtcgactcgacctgggagagagcagggaggagaggcccccgagctgaacggcgcccccgacccccaggatggccccggggccactgcgggaaggccgcgcctgtcgccctctgaccccgaggtcgtcggcacagaagccgagtgcgccccacgcggcctcttggacgaagagcgccctggagatgcggcccctagcgaagaggatcagccccgccgaaaggtgcagcggcccgtctacttcgttagcgaggccctccgggacgtcaagacccgataccctcaggcccagaagatgctttacgccattctgatggcctcgaggaaattgcgccattatttccaggcgcatcgggtcacggtggttacgtcttaccccctcggccaaatcttgcataacctagagggtactggacgggtggtgaaatgggcaatcgaactctctgaattcgatttgcactttgaaccatgccacgcgatcaagagccaggccctcgccgactttgtggcagaatggacaccagctcctgagcccgtctccgaccccgaggccagttcgggcccctcgcagttgcctcacaccgcctactgggtgatgcagttcgacggctccctgtctcttcagggcgccggtgcgggggtcatgttgacctcgccgagcggagacgtccttagatacctggttcgccttgactttcgggcgaccaataatatgacggagtacgagggactccttgcgggactcagggtggcagctggactggggatccgccgcctcctggtgttaggcgactcccagctggtcgttaaccagaccccaccgggcacctttgaagaaaggcttgcccagccgtcggcgcgccccgaccccctaggggagacggacgcgcctgaacggcccccgaggcccgtcggagtccaggcctcgggacccgaggggagcgctcccagctcccttagattgattgcttggatcgctgagatccaggcgtacctcgcagataagactctacccgaggaccgcgaagggagtgaacgcgtccagcgcatctccaagcgctacgtgctggtggaagggaccctctatcggcacgcggctaacggagtcctcctgaagtgcattcctcgggaacaaggcgtcgagctttttgccgatatccatgaaggcgagtgcggagcccactccgcctcacgcaccttggttggcaaggcctttcgccagggtttctattggccaacagctctcaacgatgcggtcgacctggtccggcggtgcagggcgtgccagttccacgccaggcaaacccatcagccggcacaggccctgcagaccatacctctttcgtggccgtttgctgtctgggggctcgatatcttgggtccgtttaggcgggccccgggcgggttcgagtatctgtatgtcgctgtcgacaagttcactaagtggcccgaggcttatccggtcatcaagatcgataatcactccgcgcttaaattcatcaagggcatcactgctcgatttggggtgcctaaccgtatcattacggataacggcacccagttcactagtgagcttttcggtgactactgcgaagatatgggcatcaagctctgtttcgcctcccccgcccaccccagaagcaatggccaagtggagcgcgccaacgcggaaatcctcaaaggcctcaaaaccaagaccttcaacatcctcaagaagcacggcgactcgtggatcgaggagctgccagcggtgctctgggcaaaccgaaccacgccaagccgagcaaccggggaaacgcctttcttcctcgtctacggcgcggaggcggttctcccatccgagctcaccctgaggtcccctcgggccaccatgtactgcgaggctgatcaagatcagcttcgcagagatgacctcgactacttggaagagcgaaggcggcgcgcagccctccgagccgcgcgctaccagcagagcctgcggcgctaccatcagcgccacgtccgggcccgatcactctgcatcgacgacctcgtcctacgccgcgtccaaacgcgtgctggactgagcaagctctcaccaatgtgggagggtccgtatcgagtgatcggcgtcccccggccgggctccgttcggctggccacgggcgacggcacagagctgcctaacccgtggaacatcgaacaccttcgtcgcttctacccctag

SEQ ID NO: 69629 - DNA, 255 bp, Oryza sativa
  Clone ID: PAT_MRT4530_70279C.1
atggaggatgccgacattccacatctcttgaacgacgccgacctcgaccttgtcggtgactgggaaaggcaagcctactccatgctgaaagaccggggagacatgcaacatggcaagaatggaacgcgaaggttcaacatcctcaacacccgtgcagatgtatgtggccggttgggagccatctggggatgcgcccagatggacccaagctccaggccattgcattggaggctcgggctgggaaagtgccagtga

SEQ ID NO: 69630 - DNA, 5331 bp, Oryza sativa
  Clone ID: PAT_MRT4530_7027C.1
atggcgaccgatctatcccaatcacttgatttaagtatatatcgatataaggggtatatatcgttaacatctacagccgatcgagtagatttagttctttcttacttattcatgactgccgatcgatacatatatgacatcggctcaaaaataaatgcaagcacagaactagttcttaagttcatttatgcaaacacgcaagggaacagtggtgcagaagtatatgtaaaggtagttgctgacgttcctgggactggttcttctaaggatggagaggcaaaacaagctccagatggctcggctgaaccgagtgacaaaggtgctacagatggttctcaaggaaatcaaggtgacaactctcaaggagtacagggagttcaaggtgatggtactcagggagttcaaggtggaggtgttgatcaagacagcaatacagcacagttgcagttcaacaacttccaagatcaggttgactatgctgtacaccatgctttgatcaataaatctggaatattaaccaatacatcggctcagccgatggcaccagtaccggctcctacacctgctgcaccgtcatcggcgccaagccaattagttaatccccggttgctggtgagagaacaaccacagcacatcggacaaaatgtgaatcggctaacgcaagaccagatggcgtctatgttcttatctccccaacacaccggtgatccaacccagcagcagccgattcaacaaacgccgccaaggcagcaggttgtgcagccgacccaacaaacacccccaatccaacagggtgtacaaccagtccagcagacgcctcagagacggcaggttttgcagccaattcagcagacgccattaaggcaacaggttgttcagccgattcagcagcaaagcttaatgaatgcatcggctaggtttgcgacacctggtggtcagcctgtgcagcatgctgcaaataaagttgtcctagagcacttggttcatcacgtgcaaccagatggcacgatgatacctcaagctattcccgaacatttggagcagtttgggcttaggccgaaagatgctgcaaatttgtaccgacaaccttaccccgaatggtttgagagagttcctctacctaatctgttcaaagttccagatttttcaaaattcttagggcaggatagcacatcaacttatgaacatgttagccgatttttagctcagtgtggtgaagcatcggctgtggatgccttgaggggtatgattgctccaatcagggagaaattctcatctgaagacttcgaaagcttgtcgcatcttacacagaaggtaaccttgcatgaacagaggtttgcagaggctaggaagaattctagaaaggttaatcatgtctgtccttatatatatggatcggatgatgaggatgatgattccgagatagctgcggccgaatgggtaaggagcaaaaaggttataccatgccaatgggtgaagaattctagaaaagatgagaggtatgattttgatatcaccaagcctaacaagatttttgacttgctactccgagaaaagcatattcaacttcctgctggtcacacgattccatcggctaaagaattgggcaagaaaaggccgatgaaggttgatggcaatccttttcctgtcaatatggtacatacagctggccgaacagccgatgaaggtcgtgcaagaggatttcaggtaaattcggctaagattatcaacaagtatcagaggaagtatgacaaacagcaggagaagcattatgaggaagatgatgatggctttgatcctcattggggttgcgagttctttagattttgttggaatgaagctatgaagctgccatctattgaggactgtcctgggtgctgtgacattgcggaaaactcaagccgatcgtatagtaggggcaatcggctaaggcagacaagggttcctgttcatcaaagattgggtccagtaaaccaagatcatggccaggaggacaatgaaaacatgaaaactcaatggtgtccttctggtatctttacaaagaatcagaagagaaggaaaacaaagccaaggcaggagtggcgtgttaagaatcaagttcctgtagccgatgaagccacagccgatgaagcaagaagattggctaagggaaaaagtgttgtgactgcatcggttaacatggttttcacgttgcctgccgagtttggggtcaagcaagccgatgttgatgaagttgaagaagaatcggctaaattaactttgtcaccagatcagacagttttcgagaagccagagggtacagagcatcggcatcttaagccattgtatataaatggttatgttaatgggaagccgatgtccaagatgatggtcgatggtggggctgcagtaaacttgatgccttacactacgttcagaaagctgggtagaaacgccgaagatctcatcaagacaaacttggtgcttaaagactttggcggcaatccatcagaaaccaaaggagttttgaatgtggagctgacagtcggcaacaaaaccatccctacaacgttatttgtcatcgatgggaagggttcttacagcttgttgctcggaagggattggattcataccaattgttgtattccttcaactatgcatcagtgcttaattcagtggcaaggcgacaagattgaaattgtgccagccgacagccaattgaagatggagaacccaagctattattttgagggcgtcatggagggttcgaatgtctacaccaaggacacagtagatgatctcgatgacaagcaaggacagggttttatgtcggctgatgatttggaagaaattgacataggtccaggtgatcgaccacggccgacatttattagtaagaatttatcttcggagtttagaaccaagttgatagagctattgaaagaattcagagattgcttcgcttgggagtattatgagatgcctggactcagtcaatcgattgttgaacatcagctacctatcaaaccaggggtcagggtatgtattgatttccgaaacttgaataaggctaccccgaaagacgaatatccaatgccagtagccgatcagctagttgatgctgcctcgggacacaagattttgagttttatggatgataatgcgggatacaatcagatctttatggctgaagaagacatccataaaacagcttttaggtgtcctggtgcaatcggcttgtttgagtgggttgtgatgactttcggcttgaagagtgctggagctacatatcaaagagccatgaattatatataccatgatctgatcggttggttggttgaagtctatattgatgatgtggttgttaaatctaaagagatagaggatcatatagccgatttgaggaaggtttttgagagaaccaggaaatatggcttgaagatgaacccgacaaagtgtgctttcggtgtatcgactggccagtttttgggatttcttgttcacgagaggggaatcgaggtaactcaaaggagtgttaatgcaatcaagaagattcagcctccggagaacaagacagaactgcaagagatgatcggcaagataaaatttgttagaagatttatttctaatttatctggaagattggagccttttacaccattgttgagattgaaagccgatcaacagtttacttggagggcagagcaacataaagcgttggacgatattaaggaatatcttagctctcctccagttttgattcctccacagaagagggagtttgaagggaaaatgagagttgtgttttatctaagtcgtcggctcttggatgcagaaactaggttaaggcattatctattgtccaatgaatgcactgtcatatgcaaggccgatattgtcaaatacatgttatcagccccaattttgaaaggaatggttggaaagtggattttttccttaactgagtttgatcttccgtatgagtcgccgaaggcgattaaaggacaagctatagccgattttattgtagaacatcgtgatgattcaattggctcagttgagatcttaccgtggactttattctttgatgggtcagtgtgcactcatggttgtggcatcggcttggttattatttcccctaggggggcaagttttgagtttgcttatactatcaaatcatatgcaaccaataatcaagctgagtatgaagcagtgcttaaaggattgcagttactcaaggaggttgaagccgatgctgttgaaattatgggagattctttgctagtaatcagtcaattggcaggagaatatgagtgcaagaatgatacactgatgatttataacgagaagtgccaagaactaataaaggaatttcggctggttactttgaagcatgtatctcgagagcaaaatattgaagctaatgatttggcccaaggggcatcggggtataggccgatgatcaaagatgttaaggtcgaggtcgcagcaataacagccgatgattggaggattgtttcaaatattacaaagggtgtcaagattgccagaaatttggagcaattcagcgagcacccggcgtcggcaatgaatcctatcattaaaccatggccatttagaggttggggaattgatatgatcagcatgattaatccaccatcgagtaaaggacataagtttatattggtggcgaccgattatttcaccaaatgggtagaggcgattcccttgaagaaggttgattctggggatgcgaaacagtttgttcaagaacatttaatctaccgatttggtatccctcaaaccattacaaccgatcaaggttcaatttttgtgtccgatgagtttgttcagtttgctgacaacatgggtatcaaattgttgaattcttcgccatattatgcacaagttaatgggcaagccgaggcatctaacaagagcttgatcaaattgattaaaaggaagatttcttattatcctcggcaatggcatactcggttagccgaagcgttgtggtcttataggatggcttgtcatggatcgatccaagtcccaccttataagcttgtttatgggcatgaagctgttttgccatgggaggttagaatcggctcaaggagaactgagttacaagataatttaacaatcgatgagtattataaccttatggctgatgaaagggaagacttggttcagtctagattaagagcccttgcaaaggttaccaaggataaagaacgagttgctcggcattacaacaagaaggtagtacttaaagatttttcggaaggtgaacttgtatggaagttgattttgctaattgggactcgggatagcaaattcggcaagtga

SEQ ID NO: 69631 - DNA, 5355 bp, Oryza sativa
  Clone ID: PAT_MRT4530_70280C.1
atgacggcgcagcggcgcctaggcgccggcgggcggtcctccgccaccgaggcctctggcgctgccgcagccggctccatgtcgtcgaggcggagggcgcggcgagcggcggccgttacccgccgttcgtccgccattccctcgtcaacgcctccgacccaagaagatgtgcgtggggggccggatgcccgcctcaatatcgagcgccggcgcgacgctcgtcgcgccgcccacgcaacggagggcgcttcctcgtccggagcgccacttcggttcgggcacgggggccggccccccgtgtccccggttggcggtgctggctgtcgagcctttgtggcgagccttcggaacgtccgttggcccccaagattccggcccaccatcaccgaaaaatacgacggaagcgtcaaccccgccgagtttctccagatctacacgaccgggatcgaggctgccgggggtgacgacagggtcatggcgaattacttccccatggccctgaagggtcaggcacggggttggctaatgatcttgccacccgcgtcggtccactcttgggaggatttgtgccagcagttcaccacgaacttccagggcatatatccgcgcccaggcgaagaagcggacttgcatgcggtacagcgaagggacgatgagtctcttcgctcgtacattcagcggttctgtcaagtccgcaacaccataccgtgcatccccgcacacgcggtgatctacgcgttcagggggggcgtgcggcacaaccgcatgctcgagaagatcgcctccaaggagccccagaccaccgcgcaactttttgagctcgcggaccgtgtggctcgcaaggaggaggcctggacctggaactcctccggttctggtgtggcagctccggccgcccccggatccgccgctcggtcagggcggcgggacgggaggaggaagaaggggtcggcccgttccgacgacgagggtcatgtcctcgccgtcgagggcgcttcgcgggccccccgaaaggggaggcctgcgagcgacaaaaagaaggaggccggtgctcccaggtgggagcgcccaaccggcaagtggtgtaccgtgcacaacacctccctccacgacctcgtggactgccgcgcggtcaaaagtttggctgagcggacgaggaagtgggaggaggagaagaggcaggagcgccgtgagggcaagaccccggcggctcccgccggcaaccggcgaggtgaggccaagcagaaggccaccgccgaggacgtcgacgatggcgacgatgacctggggttccaggagcctgaggccaccgtcgccaccgtcgatgggggagcgtgcgctcacgcttctcgccggagcctcaaggccatgaagcgagagcttctggccgtggcccctacccatgaggcgacgcggcgggcgcggtggtcggaggttgccctcaccttcgaccagaccgaccacccgccgtgcgttgcccagggaggacaaatcgcgatggtggtttcccccaccgtttgcaatgtgaagttggggcgtgtcctcatagacgggggtgcagccctcaacatcctttcccccgcagcctttgacgccatcaaggccccggggatggtgctccggccgtcccagccgatcatcggtgtgacgccggggcacacctggccgctgggtcatatcaacctcccggtcaccttcggtggttccgccaacttccgcacggagcgggtggacttcgatgtggcggacctcagtctgccctacaacgcggtcctggggaggcccgcgttggtgaagttcatggcggcggtccactacgcctatctccagatgaagatgccgggccccggtggccccatcaccgtccatggcgacctaaaagtcgcgcttgcctgtatggagcagcgcgcggaccacctcgccgcggcgtccaagcccgcgggtggcgacgagaggctcgccacctccgtcccggccgccccaaggcagcggatggtcacgtgcgacgaggtctcggtcaaggaggaagacgcgctcgtctccttcctgtgggcaaacgccgacgtcttcgcctggagaccggcggacatgcccggggtccccagggaggtgattgagcaccgtctcgccgtgcggcccggcgcaaggccggtccggcagatagtgcggcggcaggccccggaacgtcaagccttcatccgcgaggaggtggcgcgacttctggaggccggattcatccgtgaggtcatccatctggagtggctggcgaacccggtcgtcgttcccaaggcgaacggcaagcttcggatgtgcatcgactacaccgaccttaacaaggcatgtcctaaggacccttaccccttgccacgcatagatcagattgtcgactccaccgctgggtgcgaccttttgtgttttctagatgcatactctggttatcatcagattcgcatggctagggaggatgaggaaaaaactgcattcattacccccataggaacttattgttatacgacaatgcctttcgggttaaagaatgcaggtcctacttttcaacgtactactcgaatttctttgggtagccagataggacgcaatgttgaggcctatgttgatgacttggttgtgaagacgcgcaaccaagagaccttactctcggatctagcggaaactttcgaaagtctccgctccgcccgcataaagctgaaccccgataagtgcgtgttcggcgtgcctgcgggcaagcttctcgggttcttggtctctgcccgaggcatcgaggccaaccccgagaagatacgagctatagagtggatgcgccccccagcaagcttagggatgccgtttacctggacggaggaggctgagcgggccttcactcagttgaaggcgtacctcagttctcccctagtcctggtcgccccggagccagatgagccgttgctactctacctggcggcaaccccgcaggtggtcagcgcggcattggccgtggagcgcgacgaggacaaccctcactccgcgcatccccaccctgcttcgactcgacccgggagagagcagggagcagaggcccccgagccgaatggcggcctaaggcccccgacggccggagctggccctccgcctgcttgtccgacggtgccaggcgcccccgacccccaggatggccccggggccactgcgggaaggccgcgcctgtcgccctccgaccccgaggtcgttggcacagaagccgagtgcgccccgcgtggcctctcggacgaagagcgtcctggagatgtggcccctggcgaagaggatcggccccgccgaaaggtgcagcggcccgtctacttcgttagcgaggccctccgggacgccaagacccgataccctcaggcccagaagatgctttacgctattctgatggcttcaaggaagttgcgccattatttccaggcgcatcgggtcacggtggttacgtcttaccccctcgaccaaatcttgcataaccgagagggtactggacgggtggtgagatgggcaatcgaactctctgaattcgatttgcgctttgaatcacgccacgcgatcaagagccaggccctcgccgactttgtggcggagtggaccccagctcccgagcccgtctccgcccccgaggccagctcgggccccccgcagctgcctcacaccgcctactgggtgatgcagttcgacggctccctgtctcttcagggcgccggtgcgggggtcacgttgacctcgccgagcggagacgtcctcagatacctggtccgcctcgactttcgggcgaccaacaatatggcggagtacgagggactccttgcgggactcagagtggcagctggactggggatccgccgcctcctggtgttaggcgactcccagttggtcgttaaccaggtctgtaaggagtaccggtgctctgacccgcagatggacgcttacgtgcgccaggtgcggcgtatggagcgccatttcgacgggatagagcttcggcacgtgcccagacgggataacgcggtcgccgacgaactctcaaggctcgcttcctcgcgagcccagaccccaccgggcgcctttgaagaaaggcttgcccagccgtcggcccgacccgaccccctaggggagacggacgcgcctgaatggcccccgaggcccgtcggagtccaggcctcgggacccgaggggagcactcccagctcccctagattgattgcttggatcactgagatccaggcgtacctcgcagataagactctacccgaggaccgcgaagggagtgaacgcgtccggcgcatctccaagcgctacgtgctggtggaagggaccctctatcggcgcgcggttaacggagtcctcctgaagtgcattcctcgggaacaaggcgtcgagcttctcgccgatgtccatgaaggcgagtcgtgccagttccacgccaggcaaacccatcagccggcccaggccctgcagaccatacctctttcgtggccgtttgctgtctgggggctcgatatcctgggtccgttcaggcgggccccgggcgggttcgaatatctgtatgtcgctgtcgacaagttcactaagtggcccgagacttatccggtcgtcaagatcgataagcactccgcgcttaaattcatcaggggcatcactgctcggtttggggtgcctaactgtatcattacggataacggcacccagttcactagtgagctcttcggtgactactgcgaagacatgggcatcaagctctgcttcgcctcccctccccaccccagaagcaatggccaagtggagcgcgccaacgcggaaatcctcaagggcctcaaaaccaagaccttcaacatcctcaagaagcacggcgactcgtggatcgaggagctgccagcggtgctctgggcgaaccgaaccacgccaagccgagcaaccggggaaacgcctttcttcctcgtctacggcgcggaggcggtcctcccatctgagctcaccctgaggtcccctcgggtcaccatgtattgcgaggctgatcaagatcagcttcgccgagacgacctcgactatttggaagagcgaaggcggcgcgcggccctccgagccgcgcgctaccagcagagcctgcggcgctaccatcaatgccacgtccgggcccgatcactctgcgtcgacgacctcgtcctacgccgcgtccaaacgcgtgctggactgagcaagctctcaccaatgtgggagggtccgtatcgagtgatcggcgtcccccggccgggctccgttcggctggccacgggcgacggcacagagctgcctaacccgtggaacatcgaacaccttcgtcgcttctacccctag

SEQ ID NO: 69632 - DNA, 4881 bp, Oryza sativa
  Clone ID: PAT_MRT4530_70281C.1
gtagggggctctagctctcaagctagaccgacactcatgtctctgggttctagcttctttgaccaccggcggcaatgcccctccgcccctggcaagcaacatcctcgttctcgatgggttatccagcgccctcgtgcaacccgtaatcctacagtacatccctaaggtggatggaggagggtgcgctcggcggaggtgctcaacggcggtttcagccatagccccgacatcggggtcgtagcggctacctcagagattatagatctgctgtgtgacagcggcgggtggtagctaagatgccagcgactattggacattgctgctttgcaaacagttcatctgaggtcaacgacgtgatgacgacggatcctgttcgccggggacctgtcggcgcctgccattgagtacgtttttaacttccaggtgtgtttttctctgttatctatgctcgagtgactaaactaattacattaaattaaatgtggatatcgcatgtctattgtctactggataggtcaattgcatagaggaggtctcggacgacaagaatgtgtcatttctgtttcatatcctgtagagcctaacccactactatcatattgaatgtagcaagcacaagaactagagagtctagttgtttttaggggttaaatgactcattctataaaccgcctcaatattacttttatatgcccccactgatcttagtacttcagtgcatcgcgaaaaaaataatcttactccatcaataggaagtcagagacagtcttgacaagtaatatggtcatccggtaaataacgatcatagtatttattcccttcattaaatagccaccttggagaggctccgattctttttgtttctttatcgacaaaactttcggcaaattgtactatcttgtagtattggctagatgagtgtcctagatggttaatctggcccgacgagtttgctaagatgtgtgacagaattccaaaatatatttcaaagagaatttttgattgttacctcgtaaataaaagaataatgttctaaatgataactatattatgttgaatcatctctaaagagttccttctatttttgttcgcatgggttccatttacatggtcatgaagcagtttgcttgctggaccttttgcgccgcttacatggctcctcccattatatctggctttaagataaggactattcatttctatgcttgtcggataactaaagcaggggcttgtaaataccctcttgaagatcatactgttcaaaggacatattgatgctaccagttgaacaaggatatacagcaaattgagttcaattacatgtttgcattgctaacagaattctgttggagtataaactggagcgcttaactttgtatgggtcaatacttttaatagttctcatatgtctttttcagatgctggtgcttttcgttatccattttttatctagatgaagtgtgctatttacctagaaaacggttaatgtgcaatgtaaacattattttcattttggttttatagttgcatattgaagcaagtagaatctagctaaaaagctgcttgccccaatactttaccttcattgtgttctaggtagactatccgtctgttcatgtgtttacgtttggcaaccatttggaagtatttggtattattatctccactcatatgggccgcccaacctcgtagatgcttacgcaaagcactcattttattgttccatcgttggaccgagttgcgccctttgaccggcttgttccaaatttcgacaacacggtcgtggaaatcatcacgagtcaaccagcttagttctagtttgaactgtttatggttcccgatgaaagccgcagaaccagtatcaagcaaaagaggagtatgatctgaaacccctcgctcaagagcatgtaccgaaactatcggaaatttggattcccactccgtggtcattaagactcgatccaacttctcataagttgggttggctaaggaatttgcccatgtgaattgtctacctgctaaagcaatttctctcaagtcaaaactgtcaattacagcattgaagagaaaaggccagcggtcattatatctattgttgtttttctctgtactactcctcaaaatgttgaaatcaccaccaatgagcgtgggatgtggattttgttggcaagcgcggactagctcagctaagaagctagatttgaattcatcctgtgctggtccatagaccgccatcaagatccattcgaatctgtcctctttgttgcgtaaatggaatttaacgtaaaatttcccttccacaatcaaggacaagtccattacagctgcattaataccgagtaatatacctcctgatctgccacgagggggaagacagtgccaaatgaaatctgcgcccccagctaggcgatcaagattcgtctttgacacatcattcttccttgtctccaataaagcaacaaaatcaagattgtgttccttaatgttctcagcaacataccaatatttagccaagtcaagtagacctctgctattccagaagatgcctttcttttttgaagcagatttggattttcgaggggtatctattaagtcacaaattgttgtgctaagctccgcatcatccaagtctacttcagaaacttccttgaataagtgagcgagtaagatgccatcaggtttggcatcctcatcatcaccatcatcaaaaggattttgatcattcgcttcatcaataaccttagctttcatcttagttttaggtgctactttccatctgtcaaccttcatatgtttaatagcattaacagaaaaggccacgttttcacttccactacccaaagaaactcctatctttcccaaattggaggaaaattgttcattggataaataaacaatggaagaagatgggaggttagaatgcatacctatagaagggtcaaggtatgatgtagacgaaagtgatgacttcgctaagtcagccatcttggacatcattggcccatccagatttctcatcgctgccctgcgtttagccttcgtcgttgaatcctcatcggccgctgcaatgccattagatgatatggctgcattgcagcgatcactatggcgaagcccttcggtcttttcctcctgtaaaggagtgcatggggacctcacatgcccgaaggtcgagtgcttgatggagctcgatccgggctgagtgacatgaccctcatgtgtataggcagcagtttgagttgttgtagtaggcactggtggtgtttgcacgagtgaagtaggcatcggcagggtcggcactagtggagattttgtcggcgctgatgttgattgcctcgacgatgccaacgggtctacatgggtggagtggatgccggcagggtctgcacaggagcggatgggggtggggtcgacgtgagcgaccaccccaaaggtgcaggcgtaggtggagacaccgccattgtcagcccgggtggagtatccatcgatgatgaagacttcggtagaagcacaatcaatgtcggtgcggctggcgcagggagtgaccgcaatgtgctgcttgttcactctagtgcccaggataatttgctgtctctgtggcacagggcgacgatccccaaaaggagtcactgctaactgcataggagttggacctgaaactgcagcattcgaactctccggtgtcgatgtattcgccttcttcttttttgctgcatgatcagcactacctccatccatgttgctaccattatcagtacccgcagaatcatgatccatagtatcattggatggggtgggaatggcaggttgaaaatcttcaggctcaatagtgtaaatcagctcatacccatgcttcccaaacacaacatcagtagtgaaagggaaatgttccctatccataatgcccactttgattcggatcactcccaacttccggaaggttagcatgtctacttcttctgtagccccaattacactaccaagtgcccaaaaaccgagataatgccgccaagcatgaggaacaccggtgacatgcacccatgccatatccaattcatatgagggaataacatcacctgcttcctgccactcggagatcgtcagagcaaccccatgattctttaggcgaaactcgacatcagccattcttttcagttcctcctccgatgggaatgtaactaggaaagaatctttaccgtgtggcaaagcctcccagttccaatctgctcgaataagcctggcaagctctgtctgtaccccatccgctcctaggtgtccacccgtgatcgtgactaaagctgtaggtgccggaactgtagtctcgagcttgtaatcaaagtctggcacttgaagaaaaccaagctcattcttgccaaacccaagcagcgacgcatttggtttcggcatcttcaggattgggcacttgatagacaaatgtgaatccttcttgttacatataatgcaattcaaatctgccttgcacacagcaggcaaatgtccattgcacttgcatctattcctagcgagcaggaacctcttggcgctcctcttctctgcggctctgatcaggacggcgactagcatgagtgtcagctggccggtgattgacaggacagtgttgcggtcctctgtattgccggttgaagcctcgcccggctgatcctggtgacgatggttgcctgccgcgtgcgtatatccacgtccagcatcctgtgcgccccgattatcttggtcatagttccttctttgctgtcctgtgtcttgcgcagcagcagcagcctgaactgctcccgatccttgtttgttccgcggcagcgcgccgtgcgggtgcgatggtggagcaatcaggccccggggtggcgccgctgggcggccggtcat

SEQ ID NO: 69633 - DNA, 309 bp, Oryza sativa
  unsure (1)..(309): unsure at all n locations
  Clone ID: PAT_MRT4530_70282C.1
cgagggggagatncggccgagaccgacggactgagaggattagtcagtgaaacaaaaaaaaggagagnaaatatttcaagaactgaagaatgcactgagcattagctagtagtacctatcaatgagccaagctgagattgtaatttgctgtacatggtgtagatatattttgtccatgccgattgcttgcggtggtggtggtgcggtgcttcaccctgtaacatcctccactgtttcaactttcatctgctattctatagaagaaaaaaaaaagnannaaattgggctattgggctnaaaaaaaaaaaa

SEQ ID NO: 69634 - DNA, 5022 bp, Oryza sativa
  Clone ID: PAT_MRT4530_70283C.1
atggccgaacgggcagtggagcacaacctctctccgagcgctagtggtgacgacggggagcagaacccgcgccgtcgggctcgcaccccaccgtccccctctcgccgaaatcttgggcggggggaggcgctcgagggggtcgaaagatccgcgacttcgccgcccgcgggcgacgggggaggacggcgagacggggtgcatcgccgcctcgtctacggcgatggcggcacgccccagggcgcgctccaggctatgggtgcgctcctgcgtcacccgcccgtcgtccccgatccagagactccagcccgatgttggctggatgacgtggccgacttggtcatgacggcgcagcagcgcctaggcgccggcgggcagtcctccgccaccaaggcctctggcgctgccgccgccggctccacgtcgtcgaggcggagggcgcggcgagcggcggctgttacccaccgttcgtccgccattccctcgtcaacgcctccgacccaagaagatgtgcgtgggggaccgaatgcccggctcgatatcaagcgccggcgcgacgattgtcgcgccgcccacgcaacggagggcgcttcctcgtccggagcgccacttcgttccgggcacgggggccggccccccgtgtccccggttggcggtgccggctatcgagcctttgtggcgagccttcggaacgtccgttggcccccaaggttccggcccaccatcaccgaaaaatacgacggaagcgtcaacctcgccgagtttctccagatctacacgaccgggatcgaggccgccgggggtgacgacagggtcatggagaatttcttccccatggcccctgaagggccaggcgcggggttggttaatgaacttgccacccgcgtcggtccactcttgggaggatttgtgccagcagctcaccacgaacttccagggcatatatccgcgcccaggcgaagaagcggacttgcatgcgtccgcaacaccataccgtgcatccccgcacacgcggtgatctacgcgttcagggggggcgtgcggcacaaccgcatgctcgagaagatcgcctccaaggagccccaggccaccgcgcagctttttgagctcgcggaccgtgtggctcgcaaggaggaggcctggacctggaactcctccggttctggtgtggcagctccggccgcccccgggtccgccgctcagtcagggcggcgggacaggaggaggaagaagaagtcggcccgttccgacgacgagggtcatgtcctcgccgtcgagggcgcttcgcgggccccccgaaaggggaggcctgcgagcgacaaaaagaaggaggccggcgctcccagcagggagcgcccgaccggcaagtggtgtaccgtgcacaacacctccctccacgacctcgcggactgccacgcggtcaaaagtttggctgagcggacgaggaagtgggaggaggagaagaggcaggagcgccgtgagggcaaggccccggcggctcccgccagcaaccggcgaggtgaggccaagcagaaggccaccgccgaggacatcgacgatggcgacgatgacctggggttccaggagcctgaggccaccgtcgccaccgtcgatgggggagcgtgcgctcatgcttctcaccggagcctcaaggccatgaagcgagagcttctggccgcggcccctacccatgaggcgacgcggcgggtgcggtggtcggaggttgccctcaccttcgaccagaccgaccactcgccgtgcgttgtccggggaggacagatcgcgatggtggtttcccccaccgtttgcaatgtgaagttggggcgtgtcctcatagacgggggtgcagccctcaacatcctttcccccgcagcctttgacgccatcaaggccccggggatggtgctccggccgtcccagccgatcatcggtgtgacgccggggcacacctggccgctgggtcatatcgacctcccggtcaccttcggtggttccgccaacttccgcacggagcgggtggacttcgatgtggcggacctcagtctgccctacaacgcggtcctggggaggcccgcgttggtgaagttcatggcggcagtccactacgcctatctccagatgaagatgtcgggccccggtggccccatcaccgtccatggcgacctcaaagtcgcgcttgcttgtatggagcagcgcgcggaccacctcgccgcggcgtccaagcccgcgggtggcgacgagaggctcagcacctccgtccccgccaccccgaggcagcggatggtcacgtgcgacgaggtcccggaagacgcgctcgtctccttcctgcgggcaaacgccgacgtcttcgcctggagaccggcggacatgcccggggtccccagggaggtgattgagcaccgtctcgccgtgcggccgggcgcaaggccggtcaggcagaaagtgcggcggcaggccccgaaacgtcaagccttcatccgcgaggaggtggcgcgacttctggaggccggattcatccgtgaggtcatccatccggagtggctggcgaacccggtcgtcgttcccaaggcgaacggcaagcttcggatgtgcatcgactacaccgaccttaacaaggcatgtcctaaggacccttaccccctgccacgcatagatcagattgtcgactccaccgcggggtgcgaccttttgtgttttctagatgcatactctggttatcatcagattcgcatggctagggaggatgaggaaaaaactgcgttcattacccctataggaacttattgttatacgacaatgcctttcgggttaaagaatgcaggtcctacttttcaacgtactactcgaatttctttgggtagccagttaggacgcaatgttgaggcctatgttgatgacttggttgtgaagacgcgcaaccaagagaccttactctcggatctagcggaaactttcgaaagtcttcgctccgcccgcataaagctgaaccccgataagtgcgtgttcggcgtgcctgcgggcaagcttctcgggttcttggtctctgcccgaggcatcgaggccaaccccgagacgatacgagctatagagcggatgcgcccccccagcaggcttagggatgtgcagtgcgtcaccggctgcatggccaccctaagtcggttcatatcgaggctgggagagaaggcactacccctatttaagctcctcaaacgctccgggccgtttacctggatggaggaggctgagcgggccttcactcagttgaaggcgtacctcagttatcccccagtcctggtcgctccggagccagatgaaccgttgctactctacctggcggcaaccccgcaggtggtcagcgcggcgttggtcgtggagcgcgacgaggacaaccctcactccgcgcatccccatcctgtatcgactcgacccgggagagagcagggaggagaggcccccgagccgaacggcggcccaagacccccgacggccggagctggccctccgcctgcttgtccgacggtgccaggcgcccccgacccccaggatggccccggggccactgcgggaaggccgcgcctgtcgccctctgaccccgaggtcgtcggcacagaagccgagtgcgccccgcgtggcctctgggacgaagagcgccctggagatgcggcccctggcgaagaggatcggccccgccgaaagatgcagcggcccgtctacttcgttagcgaggccctccgggacgccaagacccgataccctcaggcccaaaagatgctttacgctattctgatggcttcgaggaagttgcgccattatttccaggcgcatcgggtcacggtggttacgtcttaccccctcggccaaatcttgcataaccgagagggtactggacgggtggtgagatgggcaatcgaactctctgaattcgatttgcgctttgaaccacgccacgcgatcaagagccaggccctcgccgacttcgtggcggagtggaccccagctcccgagcccgtctccgcccccgaggccagctcgggcccctcgcagctgcctcacaccgcctactgggtgatgcagttcgacggctccctgtctcttcagggcgccggtgcgggggtcacgttgacctcgctgagcagagacgtcctcagatatctggttcgcctcgactttcgggcgaccaacaatatggcggagtacgagggactccttgcgggactcagagtggcagctggactggggatccgccgcctcctggcgtacctcgcagataagactctacccgaggaccgcgaagggagtgaacgcttccggcgcatctccaagcgctacgtgctggtggaagggatcctctatcggcgcgcggctaacggagtcctcctgaagtgcattcctcgggaacaaggcgtcgagcttctcgccgatatccatgaaggcgagtgcggagcccactccgcctcacgcaccttggttggcaaggcctttcgccaaggtttctattggccgacggctctcaatgatgcggtcgacctggtccggcggtgtagggcgtgccagttccacgccaggcaaacccatcagccggcccaggccctgcagaccatacctctttcgtggccgtttgctgtctgggggctcgatatcctgggtccgttcaggtgggccccgggcgggttcgagtatttgtatgtcgctgtcgacaagttcactaagtggcccgaggcttatccggtcatcaagatcgataagcactctgcgcttaaattcatcaggggcatcactgctcggtttggggtgcctaaccgtatcattacggataatggcacccagttcactagtgagctcttcggtgactactgcgaagacatgggcatcaagctctgcttcgcctcccccgcccaccctagaagcaatggccaagtcgagcgcgccaacgcggaaatcctcaagggcctcaaaaccaagaccttcaacatcctcaagaagcacggcgactcgtggatcgaggagctgccagcggtgctctag

SEQ ID NO: 69635 - DNA, 765 bp, Oryza sativa
  Clone ID: PAT_MRT4530_70284C.1
ggcttttgacatgtgtggcctgtgaagcccacaaggtccgacggtagtggctcttgcccccaagcagcagcggtgactcctacccctaacccatacttttactacccaaataagtcagatattgagcatgatggatcctttagagaaggtgtgattacatgtgtttcaaagatggttaaggatgaggcaacccaagacattataattacagaactcaacatgtatcaagaacaacaagggacatttggaaaggaaattgccatgaggcagaggagaaacaagaattttaatccaacaaagtggtggttgaaccatggcacaatcattcccaatttgaggatattggtgtcaaggattttgaatttgacatgtagctcctcaggttgtgagaggaattggtttgtatttgaacagagaggcagcaaagacagggatcctttagagaaggaagtaaatgatgttgtggctgataatgagaatgagttcattactggtattgtacctctttctaatgagcttgctgaacatgatccacaagatggagcatcacagggagaaacatcacaggctcaaggaaaaaggaagaggcatgtgcgccctaaaaagaagaaaatcaggagtgtgcactctttgatgaatgatgttacaatgcagcccggaccttcatcatctgactcagaagatggtgatggcaatggcgctggagatgtttcagagggatcctctgattctgataagtctcatggtgtctttgaatctgattag

SEQ ID NO: 69636 - DNA, 329 bp, Oryza sativa
  Clone ID: PAT_MRT4530_70285C.1
tttgtttattaataaaatttgcgttacacttgggccataggcaaaaacagttctacacccatggacatatggagaaagagggccatggacaacaaaagcataactggtgtcgccttaaaaccaacatatcataattaacagtacaggtatttgcacaacaatgcgcacctggcctgcgacacgacacactacacagcttgaaagctgacagggaaataaaaccagaccatcaggacggaggttggatcaacatatgccaatagtacctacccacatatattacgacacaatatcaatgattcggccaattgttgaaccaagccatgcta

SEQ ID NO: 69637 - DNA, 5568 bp, Oryza sativa
  Clone ID: PAT_MRT4530_70286C.1
ccctcgtcctctttcgtgtgcgccaagcttctcccgctcagcccaatggctgaacaggcagtggcgcacaacctctctccgagcgctagcggtgacgacggggagcagaacccgcgccgtcgagctagtactccaccgtccccctctcgccgaagtcttgggcgggaggaggcgctcgagggggtcgaaagatccgcgacttcgccgcccgcgggcgatggagaaggacggcgagacggggagcgtcgcctcctcgtctacggcgatggcagcacgccccagggcgcgctccaggctgcgggcgcgctcctgcgtcacccgcccgtcgtccccgatccagagactccagcccgacgttggctggatgacgtggccgacttggtcatgacggcgcagcagcgcctaggcgccggcgggcggtcctccgccaccaaggcctctggcgctgctaccgccggctccgtgtcgtcgaggcggagggcgcggcgagcggcggccgttacccgccgttcgtccgccattccctcgtcaacgcctccgacccaagaagatgtgcgtggggggccggatgcccgcctcaacatcgagcgccggcgcaatggtcgtcgtgctgcccacgcaacggagggcgcttcctcgtccggagtgccacttcggtccgggcacgggggccagcccctccgttggcccccaaggttccggcccaccatcaccgaaaaatacgacggaagcgtcaaccccgccgagtttctccagatctacacgaccgggatcgaggccgccgggggtgacaacagggtcatggcgaatttcttccccatggccctgaaaggtcaggcgcggggttggctaatgaacttgccacccgcgtcggtccactcttggaaggatttgtgccagcagttcaccatgaacttccagggcacatatccgcgcccagtccgcaacaccataccatgcatccccgcacacgcggtgatctacgcgttcaggggggccgtgcggcacaaccgcatgctcgagaagatcgcctccaaggagccccagaccaccgcggagctttttcagctcgcggaccgtgtggctcgcaaggaggaggcctggacctggaactcctccggttccggtgtggcagctccggccgcccccgggtccgccgctcggtcagggcggcgggacaggaggaggaagaagaggtcggcccattccgacgacgagggtcacgtcctcgccgtcgagggcgcttcacgggccacccgaaaggggaggcctgcgagcgacaaaaagaaggaggccggcgctcccagcagggagcgcccgaccggcaagtggtgttccgtgcataacacctccctccacgacctcgcggactgccgcgcggtcaaaagtttggctgagcggacgaggaagtgggaggaggagaggaggcaggagcgccgtgagggcagagccccggcggctcccgccggcaaccggcgaggtgaggccaagcagaaggccaccgccgaggacgtcgacgatggcgacgatgacctggggttccaggagcctgaggccaccgtcgccaccgtcgatgggggagcgtgcgctcacgcttctcgccggagcctcaaggccatgaagcgagagcttctggccgcggcccctacccatgaggcgacgcggcgggcgcggtggtcggaggttgccctcaccttcgaccagaccgaccacccgccgtgcattgctcggggaggacagatcgcgatggttgtttcccccaccgtttgcaatgtgaagttggggcgtgtcctcatagacgggggtgcagccctcaacatcctttcccccgcagcctttgacgccatcaaggccccagggatggtgctccggctgtcccaaccgatcatcggtgtgacgccggggcacacttggccgctaggtcatatcgacctcccggtcaccttcggtggttccgccaacttccgcacggagcgggtgaacttcgatgtggcggacctcagtctgccctacaacgcggtccttgggaggcccgcgttggtgaagttcatggcggcggtccactacgcctatctccagatgaagatgccgagcctcggtggccccatcaccgtccatggcgacctcaaagtcgcgcttgcttgtatggagcagcgcgcggaccacctcgccgcggcgtccaagcccgcgggtggcgacgagaggctcagcacctccgtcccagccgccccgaggcagcggatgatcacgtgcgacgaggtcccggtcaaggaggaagacgcgctcgtctccttcctgcgggcaaacgccgacatcttcgcctggagaccggcggacatgcccggggtccccagggaggtgattgagcaccgtctcgccgtgcggccgggcgcaaggccggtccggcagaaagtgcggcggcaggccccggaacgtcaagccttcatccgcgaggaggtggcgcgacttctagaggccggattcatccgtgaggtcatccatccggagtggctggcgaacccggtcgtcgttcccaaggcgaacggcaagcttcggatgtgcatcgactacaccgaccttaacaaggcatgtcctaaggactcttaccccctgccacgcatagatcagattgtcgactccaccgcggggtgcgaccttttgtgttttctagatgcatactctggtcctacttttcaacgtactactcgaatttctttgggtagccaaataggacgtaatgttgaggcctatgttgatgacttggttgtgaagacgcgcaaccaagagaccttactctcggatctagcggaaactttcgaaagtctccgctccgcccgcataaagctgaaccccgacaattctaccccagtcctggtcgccccggagccagatgagccgttgctactctacctggcggcaaccccgcaagtggtcagcgcggcgttggtcgtggagcgcgacgaggacaaccctcactccgcgcatccccaccttgtgtcgactcgacccgggagagagcagggaggagaggcccccgagccgaacggtggcccaaggcccccgacggccagagctggccctccgcctgcttgtccgacggtgccaggcgcccccgacccccaggatggccccggggccactgcgggaaggccgcgcctgtcttcctctgaccccgaggttatcggcgcagaagccgagggcgccccgcgcggcctctcggacgaagagcgccctggagatgcggcccctggcgaagaggatcggcctcgccgaaaggtgcagcggcccatctactttgttagcgaggccctccgggatgccaagacccgatacccacaggctcagaagatgttttacgctattctgatggcttcgaggaagttgcgccattatttccaggcgcatcgggtcacggtggttacgtcttaccccctcagccaaatcttgcataaccgagagggtactggacgggtggtgaaatgggcaatcgaactctctgagttcgatttgcactttgaaccacgccacgcgatcaagagccaggccctcgccgactttgtggcagagtggaccccagctcctgaggccgtctccgtccccgaggccagctcgggcccctcgcagctgcctcacaccgcctactgggtgatgcagttcgacggctccctgtctcttcagggcgccggactcagggtggcagctggactggggatccgccgcctcctggtgttaggcgactcccagctagtcgttaaccaggtctgtaaggagtaccggtgctctgacccgcagatggacgcttacgtgcgccaggtgcggcgtatggagtgccatttcgacgggatagagcttcggcacgtgcccagacgggataacgcggtcgccgatgaactctcaaggctcgcttcctcgcgagcccagaccccaccgggcgcctttgaagaaagggttgcccagccgtcggcgcgacccgaccccctaggggagacggacgcgcctgaacggcccccgaggcccgtcggagtccaggcctcgggacccgaggggagcgctcccagctcccttagattgtttgcttggatcgctgagatccatgcgtacctcgcagataagactctacccgaggaccgcgaagggagtgaacgcgtccagcgcatctccaagcgctacgtgctggtggaagggaccctctatcggcgcgtggctaacggagtcttcctgaagtgcattcctcgggaacaaggcgtcgagcttctcgccgatatccatgaaggcgagtgcggagcccactccgcctcacgcaccttggttggcaaagcctttcgccagggtttctattggccaacggctctcaacgatgcggtcgacctggtctggcggtgcagggcgtgccagttccacgccaggcaaacccatcagccggcccaggccctgcagaccatacctctttcgtggccgtttgctgtctgggggctcgatatcctgggtccctttaggcgggccccgggcgggttcgagtatctgtatgtcgctgtcgacaagttcactaagtggcccgaggcttatccggtcatcaagatcgataagcactccgcgcttaaattcatcaggggcatcactgctcggtttggggtgcctaaccgtatcattacggataacggcacccagttcactagtgagctcttcggtgactactgcgaagacatgggcatcaagctctgcttcgcctcccccgcccaccccagaagcaatggccaagtggagcgcgccaacgcggaaatcctcaagggcctcaaaaccaagaccttcaacatcctcaagaagcacggcgactcgtggatcgaggagctgccagcggtgctctgggcgaaccgaaccacgccaagccgagcaaccggggaaacgcctttcttcctcgtctacggcgtggaggcggtcctcccatctgagctcaccctgaggtcccctcgggccaccatgtattgcgaggctgatcaagatcagcttcaaagagacgacctcgacttcttggaagagcgaaggcggcgcgcggccctccgagcggcgcgctaccagcagagcctgcggcgctaccatcagcgtcacgtccgggcccgatcactctgcgtcgatgacctcgtcctacgccgcgtccaaacgtgtgctggactgagcaagctctcaccaatgtgggagggtccgtatcgagtgatcggcgtcccccggccgggctccgttcggctggccatgggcgacggcacagagctgcctaacccgtggaacatcgaacaccttcatcgcttctacccctacacgctcgtgctcgatcctgccctcggcggcctcgtgcgccgccagtgttgcctcccgggtggcgacggcggcctcgaggtccgccagctccctctccttcgcgtccagggcgcgggcgcgctcctccagcgccgtggcgcgaccctcaagggcctcttcgcgccgccgggacgccgcctcgttctccgccgcccgctgttcccgggcagctgcggcgtcaaggactccccgggcggcgtcgagcttcttttctag

SEQ ID NO: 69638 - DNA, 4716 bp, Oryza sativa
  Clone ID: PAT_MRT4530_70287C.1
atgaacttccagggcacatatccgcgcccaggtgaagaagcggacttgcacgcggtacagcgaggggacgatgagtctcttcgctcgtacattcagcggttctgtcaagtccgcaacactataccatgcatccccgcacacgcagtgatctatgcgttcagggggggcgtgcggcacaatcgcatgctcgaaaagatcgcctccaaggagccccagaccaccgcggagctttttcagcttgcggaccgtgtggctcgcaaggaggaggcctggacctggaactcctccggttccagtgtggcagctccggccgcccccgggtccgctgctcgatcagggcggcgggacaggaggaggaagaagaggtcggccctttccgacgacgaggggcacgtcctcgctgccgagggcgcttcgcgggccacccgaaaggggaggcctgcgagcaacagaaagaaggaggccggcgctcccagcagggagcgcccgaccggcaagtggtgctccgtgcacaacacctccctccacgacctcgcggactgccgcgcggtcaaaagtttggccgagcggacgaggaagtgggaggaggagaggagacaggagcgccgtgatggcaaggccccggcggcccccgccggcaaccagcgaggagcctcaggccacggtcgccccgtcgatgggggagcgtgcgctcacgcttctcgccggagcctcaaggccatgaagcgagagcttctggccgcggcccctacccatgaggcgacgcggcgggcgcgatggtcggaggtggccctcaccttcgacatgacagaccacccgccgtgcgttgcccggggaggacagatcgcgatggtggtttcccccaccatttgcaatgtgaagttggggcgtgtcctcatagacgggggtgcagccctcaacattctttctcccgcagcctttgacgccatcaaggccccggggatggtggtccggccgtcccagccgatcatcggtgtgacgccggggcacacttggccgctaggtcatatcgacctcccggtcacctttggtggttccgccaatttccgcacggagcgggtgaactttgatgtggcggacctcagtctgccctacaacgcggtcctggggagacccgcgttggtgaagttcatggcggcagtccactacgcctatctccagatgaagatgccgggccctggtggccccatcaccgtccatggcgacctccaagtcgcgcttgcttgtatggagcagcgcgcggaccagctcgccgcggcgtccaagcccgagtgtggcgacgagaggctcagcgccttcgtcccggccgccccgaggcagcggatgatcatgtgcgacgaggtcccggaagacgcgctcgtctccttcctgcgggcaaacgccgacgtcttcgcctggagaccggcggacatgcccggggtccccagggaggtgattgagcaccgtctcgccgtgcggccgggcgcaaggccggtccggcagaaagtgcggcggcaggccccggaacgtcaagccttcatccgcgaggaggtggcgcgacttctggaggccggattcatccgtgaggtcatccatccggagtggctggcgaacccggtcgtcgtccccaaggcgaacggcaagcttcggatgtgcatcgactacaccgacctcaacaaggcatgtcctaaggacccttaccccttgccacgtcctacttttcaacgtactactcgaatttctttgggtagccagttaggacgcaacgttgaggcttatgttgatgacttggttgtgaagacgcgcaaccaagagaccttactctcagatctagcggaaactttcgaaagtctccgctccgcccgcataaagctgaaccccgacaagtgcgtgttcggcgtgcctgcgggcaagcttctcgggttcttggtcactgcccgaggcatcgaggccaaccccgagaagatacgagctatagagcggatgcgcccccccagcaaacttagggatgtgcaatgcgtcaccggctgcatggccgccctaagtcggttcatatcgaggccgggagagaaggcgctacccctatttaagctcctcaaacgttccgggccgtttacctggacggaggaggctgaacgggccctcactcagttgaaggcgtacctcagttctcccccggtcctggtcgccccgaaaccagatgaaccgttgctactttacctggcggcaaccccacaagtggatggccccggggccactgcgggaaggccgcgcttgtcgccctccgaccccgaggtcgatgacacagaagccgagtgcgccccgcgcggcctctcggacgaaaagcgccctggagatgcggcccttggcgaagaggatcggccccgccgaaaggtgcagcggcccgtctacttcgttagcgaggccctccgggacgccaagacccgataccctcaggcccagaagatgctttacgctattctgatggcttcgaggaagttgcgccattattttcaggcgcatcgggtcacggtggttacgtcttaccccctcggccaaatcttgcataaccgagagggtactggacgggtggtgaaatgggcaatagaactctctgagttcgatttgcactttgaaccacgccacgcgatcaagagccaggccctcgctgactttgtggcagagtggaccccagctcccgagcccgtctccatccccgaggccagctcgggcccctcgcagccgcctcacaccgtctactgggtgatgcagttcgacgggtccctgtctcttcagggcgccggtgcgggggtcacgttgacctcgccgagcggagacgtcctcagatacctggtccgcctcgactttcgggcgaccaacaatatggcagagtacgagggattccttgcgggacttagggtggcagctggactggggatccgccgcctcctggtgttaggcgactcccagctggtcgttaaccaggtctgtaaggagtatcggtgctctgacccgcagatggacgcttacgtgcgccaggtgcggcgtatggaacgccatttcgacgggaaagagcttcggcacgtgcccagacgggataacgcggtcgccgacgaactctcaaggctcgcttcctcgcgagcccagaccccaccgggcgcctttgaagaaaggcttgcccagccgtcggcgcgacctgaccccctaggggagatggacgcgcctgaacggcccccgaggcccgtcggagtccaggcctcgggacccgaggagagcgctcccagctcccttagattgatcgcttggatcgctgagatccaggcgtacctcacagataagactctacccgaggaccgcgaagggagtgaacgcgtccagcgcatctccaagcactacgtgctggtggaagggaccctctatcggcgcgcggctaacggagtcctcctgaagtgcattcctcgggaacaaggcgtcgagcttcttgccgatatccatgaaggcgagtgtggagcccactccgcctcacgcaccttggttggcaaggcctttcgcttgggtttctattggccgacggctctcaacgatgcggtcgacttggtctggcggtgcagggcgtgccagttccacgccaggcaaacccaccagccggcccaggccctgcagatcatacctctttcgtggccgtttgctgtctgggggctcgatatcctgggtccgttcagcggggccccgggcgggttcgagtatctgtatgttgctatcgacaagttcactaagtggcccgaggcttatccggtcgtcaagatcgataagcactccgcgcttaaattcatcaggggcatcactgctcggtttggggtgcctaaccgtatcattacggataacggcacccagttcactagtgagctcttcggtgactactgcgaagacatgggcatcaagctctgcttcgcctcacccgcccatcccagaagcaacggccaagtggagcgcgccaacgcggaaatcctcaagggcctcaaaactaagaccttcaatatcctcaagaagcatggcgactcgtggatcgaggagctaccagcggtgctctgggcgaaccgaaccacgccaagccgagcaaccggggaaacgcctttcttcctcgtctacgacgcggaggcggtcctcccatctgagctcaccctggggtcccctcgggccaccatgtattgcgaggctgatcaagatcagcttcgcagagatgacctcgactacttagaagagcgaaggcggcgcgcggccctccgagccgcgcgctatcagcagagcctgcggcgctaccatcagcgccacgtccgggcccgatcactctgcgtcgacgacctcgtcctacgccgcgtccaaacgcgtgctggattgagcaagctctcaccaatgtgggagggtccgtatcgagtgatcggcgtccccggccgggctccgttcggctggccacgggcgacgacacagagctgcctaacccgtggaacatcgaacaccttcgtcgcttctacccctagtaggggtcgggtgtcaggtctcgggctcgggccaaccccgcaccccccccggggcgtgcagggttggccgggggctaccacatatgcatatacctatcttttttctcttctgtatttcaataaaagcatttttcgatttcctaaggactgtgtctgtgccattgtttccttttgctga

SEQ ID NO: 69639 - DNA, 525 bp, Oryza sativa
  Clone ID: PAT_MRT4530_70288C.1
atgacactcgagcgtcatcgttatcggtctggccaaggccgggctgggttttcactggccatccaccacctaccaatataccacagatgcaccattgctccactgccaactaaacctccgccgccgcgtgggcacaccgcaccagtgccccccgccggccagtctccacatgcagctacctcactgggctccacctccattggcttcgcctcccgttgcgcatccatcgtgcgccagccgtccttgacgccgccggccacactgcaaggctaccggccgcaacactctaccggcattggccagccacagcccccggccctcgtcgttgccctctgccgcaggcgcggcctcctgcccctccaccgccgtcacggcctccgcacctccatctccagcacctccgcgctgtcgcgcccgccgctgctagccgcaccctccgtcaccgacgccctgttaacagtgaaatttgcctgcttcttgattgccaataagggtttcatcggggtttcagccggatcaaattga

SEQ ID NO: 69640 - DNA, 228 bp, Oryza sativa
  Clone ID: PAT_MRT4530_7028C.1
atggcggcggccgcgcggaggctggcgaacgcggcgagcaccgcaggcatcgtggggcccacgttccccttggtcccagtacgcggcgggatatgcgactgggactcggacgcgggggaggggaggagggtgcggcacggaaggcggaaggcgctcggcgccacgtcggccgcggtgagttttttggaggatggatttttggtccagggaaaactggtgatgaaatga

SEQ ID NO: 69641 - DNA, 577 bp, Oryza sativa
  unsure (1)..(577): unsure at all n locations
  Clone ID: PAT_MRT4530_70290C.1
ctggtattccatttgtgatctgaattgccaagggggatatgtttcttgagtagaaagttctcatagtgaagagtcaagtccctacttagaaactaatgaatctgaaatgtagttggtttttttgtaccatagttgatcaatgcaatactattgtctcatctgactgagtttttggccaatgctagagtttacagatactattttaatactgcagtcctcgcaaacaagattatgagaaacttaaccatgtactattttcagttagttttacataacanaactgcatcttgtgcccatagatgttggatgaatcatactatgcttgccatccctactatgcgtcgtgaaattgttgtataaattatcatctatccggaactgcttctggggactttggttataaaaagaactatttaggttaaatattgttcttatcacgctgtaggtacatgaggaattgatattgttattatgtaatcttcttggacaaacctttttctgtgagttatagccttacatgctacaataccgcgcagcatagcgcgcgaactcattctagttaaaaaaaaaaaaaaaa

SEQ ID NO: 69642 - DNA, 2567 bp, Oryza sativa
  Clone ID: PAT_MRT4530_70291C.1
tcagtccgggcatgggggccagcctcccatgtccccggttggcggtgccggctgtcgagcttttgtggcgagccttcggaacgtccgttggcccccaaggttccggcccccatccccgaaaaattcgacggaagcgtcacccctgccgagtttctccagatctatacgcccgggattgaggccgccgggggtgacgacagggtcatggcgaatttcttccccatggtcctgaaaggtcaggcgcggggttggctgatgaacttgccacccgcgtcggtacactcttgggaggatttgtgccagcagttcaccatgaacttccagggcacatatccgcgcccaggtgaagaagcggacttgcacgcggtacagcgaggggacgatgagtctcttcgctcgtacattcagcggttctgtcaagtccgcaacactataccgtgcatccccgcacacgtggtgatctacgcgttcagggggggcgtgcggcacaatcgcatgctcgaaaagatcgcctccaaggagccccagaccaccgcggagctttttcagcttgcggaccgtgtggctcgcaaggagaggcctgcacctggaactcctccggttccggtgtggcagctccggccgtccccgggtccgccgctcggtcagggcggcaggacaggaggaggaagaagaggttggccttttccgacgacgaggggcacgtcctcaccgtcgagggcgcttcgcgggccacccgaaaggggaggcctgcgagcgacagaaagaaggaggccgaagctcccagcagggagcgcccgaccggcaagtggtgctccgtgcacaacacctccctccacgacctcgcggactgccgcgcggtcaaaagtttggctgagcggacgaggaagtgggaggaggagaggaggcaggagcgccgtgagggcaaggccccggcggcccccgccggcaaccggcgaggtgaggccaagcagaaggcccccgccgaggatgtcgacgatggcgacgataacctggggttccaggagcctcaggccacagttgccactgtcgatgggggagcgtgtgctcatgcttctcgccggagcctcaaggccatgaagcgagagcttctggccgcggcccctacccatgaggcgacgcggcgggcgcgatggtcggaggtggccctcaccttcgaccagaccgaccacccgccgtgcgttgcccggggaggacagatcgcgatggtggtttcccccactatttgcaatgtgaagttggggcatgtcctcatatacgggggtgcagctctcaacatcctttcccccgcagcctttgacgccatcaaggccccagggatggtgctccagccatcccagccgatcatcggtgtgacgccggggcacacttggccgctaggtcatatcgacctcccggtcaccttcggtggttccgccaacttccgcacggagcgggtgaacttcgatgtggcggatctcagtctgccctacaacgcggtcctggggagacccgcgttggtgaagttcatggcggcagtccactacgcctatctccagatgaagatgccgggccctggtggccccatcaccgtccatggcgacctccaagtcgcgcttgcttgtatggagcagcgcgcgaaccagctcgccgcggcgtccaagcccgagggtggcgacgagaggctcagcgcctccgtcccggccgccccgaggcaacggatgatcacgtgcgacgaggtcccggtcaagaaggaagacgcgctcgtctccttcctgcgggcaaacgccgacgtcttcgcctggagaccggcggacatgcccggggtccccagggaggtgattgagcaccgtctcgccgtgcggccgggcgcaaggccggtccggcagaaagtacggcggcaggccccggaacgtcaagccttcatccgcgaggaggtggcgcgacttctggaagccggattcatccgtgaggtcatccatccggagtggctggcgaacccggtcgtcgttcccaaggcgaacggcaagcttcggatgtgcattgactacaccgaccttaacaaggcatgtcctaaggacccttatcccttgccacgtatagatcagattgtcgactccaccgcggggtgcgaccttttgtgttttctagatgcatactctggttatcatcagattcgcatggctagggaggatgaggaaaaaactgcattcatcacccccataggaacttattgttatacgacaatgccgttcgggttaaagtatgcaggtcctacttttcaacatactactcgaatttctttgggtagccagttaggacgcaacgttgaggcttatgttgatgacttggttgtgaagacgcgcaaccaagagaccttactctcggatctagcggaaactttcgaaagtctccgctccgcccgcataaagctgaaccccgacaagtgcgtgttcggcgtgcctgcgggcaagcttctcgggttcttggtcactgcccgaggcatcgaggccaaccccgagaagatacaagctatagagcggatgcgccccccccagcaaacttag

SEQ ID NO: 69643 - DNA, 327 bp, Oryza sativa
  Clone ID: PAT_MRT4530_70292C.1
atgggtgcttgggcgggcggaggcaacgaggacggggaggaagacggtaggcgggacatgggtagacggtgtcggttaattaaaaaaccgacacccaaatcgagccgaggtggctggggtggcaacggcgggcggagccgcatctgggatcggcatcggcgggcggagcagtggcggcggtggctcccgcgacggatccggcgacgtggcggcaacggtgattgtttctatgaaattgttgagggatctgtgatttgctttggatctctcggggtgacgggtctcggggtgaaggggaacgactcaatgttcgagccgatgcattga

SEQ ID NO: 69644 - DNA, 5397 bp, Oryza sativa
  Clone ID: PAT_MRT4530_70293C.1
atgtgcgtggggggccggatgcccgcctcaatatcgagcgccggcgtaatggtcgtcgtgctgcccacgcaacggaggacgcttcctcgtccggagcgccacttcggtccgggcacgggggccagcccccccgtgtccccggttggcagtgccggctgtcgagcctttgtggcgagccttcggaacgtccgttggcccccaaggttccggcccaccatcaccgaaaaatacgacggaagcgtcaaccccgccgagtttctccagatctacacgaccgggatcgaggccgccgggggtgacgacagggtcatggcgaatttcttccccatggccctgaaaggtcaggcgcggggttggctaatgaacttgccacccgcgtcggtccactcttgggaggatttgtgccagcagttcaccatgaacttccagggcacatatccgcgcccaggtgaagaagcggacttgcatgcggtacagcgaagggacgatgagtctcttcgctcatacattcagcggttctgtcaagtccgcaacaccataccatgcatccccgctcacgcggtgatctacgcgttcagggggggcgtgcggcacaaccgcatgctcgagaagatcgcctccaaggagccccagaccaccgcggagctttttcagctcgcggaccgtgtggctcgcaaggaggaggcctggacctggaactcctccggttccggtgtggcagctccggccgcccccgggtccgccgctcggtcagggcggcgggacaggaggaggaagaagaggttggcccattccgacgacgagggtcacgtcctcgccgtcgagggcgcttcgcgggccacccgaaaggggaggcctgcgagcgacaaaaagaaggaggccggcgctcccagcagggagcgcccgaccggcaagtggtgttctgtgcacaacacctccctccacgacctcgcggactgccgcgcggtcaaaagtttggctgagcggacgaggaagtgggaggaggagaggaggcaggagcgccgtgagggcaaggccccggcggctcccgccggcaaccggcgaggtgaggccaagcagaaggccaccgccgaggacgtcgacgatggcgacgatgacctggggttccaggagcctgaggccaccgtcgccaccgtcgatgggggagcgtgcgctcacgcttctcgccggagcctcaaggccatgaagcgagagcttctggccgcggcccctacccatgaggcgacgcggtgggcgcggtggtcggaggttacccccactttcgaccagaccgaccacctgccgtgcattgcccggggaggacagatcgcgatggtggtttcccccaccgtttgcaatgtgaagttggggcgtgtcctcatagacgggggtgcagccctcaacatcctttcccccgcagcctttgatgccatcaaggctccggggatggtgctccggccgtcccagccgatcatcggtgtgacgccggggcacacttggccgctaggtcatatcgacctcccggtcaccttcggtggatccgccaacttccgcacggagcgggtgaacttcgatgtggcggacctcagtctgccctacaacgcggtcctggggaggcccgcgttggtgaagttcatggcggcggtccactacgcctatctccagatgaagatgtcgggccccggtggccccatcactgtccatggcgacctcaaagtcgcgcttgcttgtatggagcagcgcgcggaccacctcgccgcggcgtccaagtccgcgggtggcgacgagaggctcagcacctccgtcccagccgccccgaggcagcggatgatcacgtgcgacgaggtcccggtcaagcaggaagacgcgctcgtctccttcctgcgggcaaacgccgacgtcttcgcctggagaccggcggacatgcccggggtccccagggaggtgattgagcaccgtctcgccgtgcggccgggcgcaaggccggtccggcagaaagtgcggcggcaggccccggaacgtcaagccttcatccgcgaggaggtggcgcgacttctggaggccggattcatccgtgaggtcatccatccggagtggctggcgaacccggtcgtcgttcccaaggcgaacggcaagcttcggatgtgcatcgactacaccgaccttaacaaggcatgtcctaaggacccttaccccctgccacgcatagatcagattgtcgactccaccgcggggtgcgaccttttgtgttttctagatgcatactctggttatcatcagattcgcatggctagggaggatgaggaaaaaactgcattcattacccccataggaacttattgttatacgacaatgcctttcgggttaaagaatgcaggtcctacttttcaacgtactactcgaatttctttgggtagccaaataggacgtaatgttgaggcctatgttgatgacttggttgtgaagacgcgcaaccaagagaccttactctcggatcttgcggaaactttcgaaagtctccgctccgcccgcataaagctgaaccccgacaagtgcgtgttcggcgtgcctgcgggcaagcttctcgggttcttggtctctgcccgaggcatcgaggccaaccccgagaagatacgagctatagagcggatgcgcccccccagcaagcttagggatgtgcaatgcgtcactggctgcatggccgccctaagtcggttcatatcgaggctgggagagaaggcgctacccctatttaagctcctcaaacgctccgggccgtttacctggacggaggaggctgagcgggccttcactcagttgaaggcgtacctcagttctcccccagtcctggtcgccccggagccagatgagccgttgctactctacctggcggcaaccccgcaggtggtcagcgtggcgttggtcgtggagcgcaacgaggacaaccctcactccgcgcatccccaccctgtgtcgactcgacccgggagagagcagggaggagaggcccccgagccgaatggtggcccgaggcccccgacggccggagctggccctccgcctgcttgtccgacggtgccaggcgcccccgacccccaggatggccccggggccactgcgggaaggccgcgcctgtcgccctctgaccccgaggttgtcggcacagaagccgagtgcgccccgcgtggcctctcggatgaagagcgccctggagatgcggcccctggcgaagaggatcggccccgccgaaaggtgcagcggcccatctactttgttagcgaggccctccgggacgccaagacccgataccctcaggcccagaagatgctttacgctattctgatggcttcgaggaagttgcgccattatttccaggcgcatcgggtcacggtggttacgtcttaccccctcggccaaatcttgcataaccgagagggtactggacgggtggtgaaatgggcaatcaaactctctgagttcgatttgcactttgaaccacgccacgcgatcaagagccaggccctcgccgactttgtggcagagtggaccccagctcccgagcccgtctccgtcctcgaggccagctcgggcccctcgcagctgcctcacaccgcctactgggtgatgcagttcgacggctccctatctcttcagggcgccggtgcgggggtcacgttgacctcgctgaacggagacgtcctcagatacctggttcgcctcgactttcgggcgaccaataatatggcggagtacgagggactccttgcgggactcagggtggcagctggactggggatccgccgcctcctggtgttaggcgtctcccagctggtcgttaaccaggtctgtaaggagtaccggtgctctgacccgcagatggacgcttacgtgcgccaggtgcggcgtatggagcgccatttcgacgggatagagcttcggcacgtgcctagacgggataacgcggtcgccgacgaactctcaaggctcgcttcctcgcgagcccagatcccaccgggcgcctttgaagaaaggcttgcccagccgtcggcgcgacccgaccccctaggggagacggacgcgcctgaacggcctccgaggcccgtcggagtccaggcctcgggacccgaggggagcgctcccagctcccctagattgattgcttggatcactgagatccaggcgtacctcgcagataagactctacccgaggaccgcgaagggagtgaacgcgtccagcgcatctccaagcgctacgtgctggtggaagggaccctctatcggcgcgcggctaacggagtcctcctgaagtgcattcctcgggaacaaggcgtcgagcttctcgccgatgtccatgaaggcgagtgcggagcccactccgcctcacgcaccttggttggcaaggcctttcgccagggtttctattggccgacggctctcaacgatgcggtcgacctggtccggcggtgcagggcgtgccagttccacgccaggcaaacccatcagccggcccaggccttgcagaccatacctctttcgtggccgtttgctgtctgggggctcgatatcctgggtccgtttaggcgggccccgggcgggttcgagtatctgtatgtcgctgtcgacaagttcactaagtggcccgaggcttatccggtcatcaagatcgataagcactccgcgcttaaattcatcaggggcatcactgctcggtttggggtgcctaaccgtatcattacggataacggcacccagttcactagtgagctcttcggtgactactgcgaagacatgggcatcaagctctgcttcgcctcccccgcccaccccagaagcaatggccaagtggagcgcgccaacgcggaaatcctcaagggcctcaaaaccaagaccttcaacatcctcaagaagcacggcgactcgtggatcgaggagctgccagcggtgctctgggcgaaccgaaccacgccaagccgagcaaccggggaaacgcctttcttcctcgtctacggcgcggaggcggttctcccatctgagctcaccctgaggtcccctcgggccaccatgtattgcgaggctgatcaagatcagcttcgcagagacgacctcgactacttggaagagcgaaggcggcgcgcggccctccgagccgcgcgctaccagcagagcctgcggcgctaccatcagcgccacgtccgggcccgatcactctgcgtcgacgacctcgtcctacgccgcgtccaaacgcgtgctggactgagcaagctctcaccaatgtgggagggtccgtatcgagtgatcggtgtcccccggccgggctccgttcggctggccatgggcgacggcacagagctgcctaacccgtggaacatcgaacaccttcgtcgcttctacccctag

SEQ ID NO: 69645 - DNA, 173 bp, Oryza sativa
  Clone ID: PAT_MRT4530_70294C.1
aaaggagtttttgttggtggaggaaaagtgtcaagcaacaaagggggaatatcacgtgtctggatgatctcaacaatttttttgttctgaaattcaggtcagttgtaaatattgtctggtttgcttaacaatgccctctaagtccctacattgctgggaaaaaaaaaaaaaaa

SEQ ID NO: 69646 - DNA, 416 bp, Oryza sativa
  unsure (1)..(416): unsure at all n locations
  Clone ID: PAT_MRT4530_70295C.1
ggccgcgggttttgnnnnnnnnnnnngcggttttgttttttttttttttttagtttttttttgtgtttttttttttttttttttttttttttttgggttaaacaaggggacagggaaaaatttccatttattcaaacaaacagccaaagactattccaaattttattacaggacacacacgaggggggggggccctttatttacccaactatataaatagggggggccacacccccaaaaaccggaaggcccaggaacaacttggcagggggggctgcaggccctaggggagaccccaccaagggggggcaaatggaaagccacccgggccggggcccgacctgggggcccgccaacaaagccggcaaaaaaaggcacttgcgggaggaaaaaccgccccagggggcaaaaagccc

SEQ ID NO: 69647 - DNA, 381 bp, Oryza sativa
  Clone ID: PAT_MRT4530_70296C.1
ccaaaggccccagcgaatgtttcctggcgcaagccacgcgccacggggaccttgagctgacggtatgccggcgggcgcacgaggcagaacccatgccgggccagcgcatccaagcgcgcagctggggtgacgacgcacgacggcggccagacggctgcccggccgtcaggcgacccacaaaggtggcgctcacgcaggagggagatcagggacctgcaccacctatgaggtggtcgggcgccgcccgcaagcagaggaaaccggcggggactgcggccgatgcgacggcaactccgaagggcatgaggaggccatgcctgttggcgctcgtaccggggcagggacacaggctcccaaaagggccgtaggtgaccgcctgtg

SEQ ID NO: 69648 - DNA, 264 bp, Oryza sativa
  Clone ID: PAT_MRT4530_70297C.1
atggccaaaagtgagcttgaggttgagcttggggtcaatggattggcgagttgtcaagtgacagacttattccggttgcacttaaattggattccatcgacggacaacggcacagacgccacgctcgagcagcgcgaccacccccacgggaggagaaagggaagtgctttcgcggtgctcgaagcctccgccacacacgccggcgcctccaagttctggacgctagttggatgggcgcgcgcccgcttcgcttcggcgccataa

SEQ ID NO: 69649 - DNA, 846 bp, Oryza sativa
  Clone ID: PAT_MRT4530_70298C.1
gtgttctcggcagaaagaagaaggaaagaagaagacgggagaaggagagagaaagagaaaagaaaaagaaaaggagaacggagtgacagtcattgttgctcgctgctcgccaccgctgcccacttcctaatggacccaaagctcgctgccagcggcttcttcgaccgctaccatggcggggactccttggcagccaccatggctcaggaagagagaaggcgaccactaagcagtagccatagaagcttggtggcatgccacctagatccgcttgcggccccgaagctcgcgcctgtggccttctcggccactgccatgggggatacgggccagaggccacatcacagcaccgtggggcgggtgcgctatcagcgagtgggcgtggccgacgtgatccagcccagtattcgagccgcacacggagcgcgagagaaaacaagacggacgaggccgcctgcctgccgcccgcgccgagcgccacgcgaggggcagatctggccgcccgatcgaccgctatccggccgcggaacagtggagcttgtgacggtgatccccgcggcgcattccgtggctatatatccacttgcgcaatgtcagtgcgggcgtacggtacgtcggcggtatctcgtccgcggcagctgcaatattctcggaacgaccaaggccaacggcgcttttttactgccaaacgggctgcagtcttctttcccgtcgagaatcctcaaggctcaagccagtgtccgtgtcttggtgtacgtacgagccctacacagcgacgcgatgcgatattgcgatgctgcatttattgattactacttactccctccgtcccataaaaaaccaaca

SEQ ID NO: 69650 - DNA, 318 bp, Oryza sativa
  Clone ID: PAT_MRT4530_70299C.1
gtgatgtgagtgaagagagagacacagccaaagctcagctcagctaagctaagctctactcctactagtagtccctcttcaccctcactctacctcaccctcccccgagaaaaccccaagaaacgatcaaaaagagaccgaccagcaaggccgtagcctcaaagagcagccaaaaccacggagtttttaccatctatcttagctctagcttagctacctagctagcgccggagcagtgaaagagagagtgagaagaagaagaggaggtggaaagaagtgaaagaaatgtgtgggctccggggcggcagggggaggggg

SEQ ID NO: 69651 - DNA, 477 bp, Oryza sativa
  Clone ID: PAT_MRT4530_7029C.1
atggcggcagcggagcggcggtgtggcggcagcgaagcggcggcgtggcggcggcgttgcgggcgcggcggcggcgtggcgcgcggcggcgcggtgtcggcggcggcgcggcatcggcgtggcgcggcggcggcctggcgcgcggcgcagcggcagcatgtcgcgcgmcgcggcggcggcgttgcgcggaggaggcgtggcagcacggcggtggcgtgccgcggtagcgtcgtggcgtcccggcgtcgtcgccactgccggcacgacgtcgtcgccggtggcggccgcatcgaggtcggggtcggcatcgtcggcgcggcggagtcgtgtttggccgcgacgacgtcggcggcggcgtcggcaacgaggcggccggcggcgagatgcggcggcggcggaggcggcggaggcggcgactactacgcccgcgagacgacggcgagatacgacggcggcgtcggcactgggatgccctag

SEQ ID NO: 69652 - DNA, 310 bp, Oryza sativa
  unsure (1)..(310): unsure at all n locations
  Clone ID: PAT_MRT4530_702C.1
tccggtggatccgctccgggaggcgaagagccgggtgcaggaggagataaagagggngttcgcngcgatcatggcgacgggcgcngtacaggccggcgaggcggcggtgctcgcgacgaggngggtcatggagcggcacgggctgcgttcngncgccgtngccggcggcggcatgcagcgagggtagaacggtcacatttgcacccacacgagcatgttcaattgtatatatatacgtgcaagaacagggaagctcattgcgtaaatccatttatatttacactcttaaaaaaaaaaaaaaaaaaaaaaa

SEQ ID NO: 69653 - DNA, 338 bp, Oryza sativa
  Clone ID: PAT_MRT4530_70300C.1
cggacgcgtgggtgagctggtagtggacacagagagttctgcactctctttcactgaggagagcagaacagaacaagaggaggagaacaaaaaaaaaaaagagaaaaatcctatggcctcttgtgcatcaccaaggctcaaatccctgtgccaccatccactcttcatcatcttgcttgctctctcattgctgcagacaatcacagcagaggatgagcaggaggctgatagggttgccttcctccctgggcagccaaggagcccacagatgtctcagttctcaggctacatcactgtgaacagccagaatggcagggcactcttctactggttctttg

SEQ ID NO: 69654 - DNA, 284 bp, Oryza sativa
  Clone ID: PAT_MRT4530_70301C.1
cgaatcgctacaaaccctatccactgccgctggactcgtcgccgtgattcacctcgtgccgccgctcgcgcagtgccgacccgccccgccccgccccgccccggcgtagtaggagatgaagcggcgaaaaatcgccaaatcgacagcaagccgggggagcaggtccggtgtgaaatccccaaatccacggagcagagcagcgaatccgagccggaccggcggcttcttttctgatgaactccgattgggcagatggacttgttaccacggggaggaggaggagg

SEQ ID NO: 69655 - DNA, 722 bp, Oryza sativa
  Clone ID: PAT_MRT4530_70302C.1
ataaaaaaagatctcaaaaaaaaatatagtgccatggtgaggcccactagtgatgcttgcagcgacttgtacagcaattgtttttttctgggatgactatatgatctggacttctggagtatgaagaaatgacaccgctcgtatgaaaggacaacgggcataaatgtgacgtagtattactcccagaaaacaattaaaccccacaactaagtactccccagttaaattagctcacctcgcaagtttctttttaaccccatctgagtagtacagaacagaacaaagccagagaggaactcgaactcattgacccacatgatagagtctcctggtgtactgttacatgacaacctggcctagtgccttttagaggttaccaacacgtcttcgcacgatgagcagtgcaacaccgtgcattctaacagagtaacaggcaacacgatcaggccaaggtaaatcacgaaattttaaggcgtcttcaagctacttctcgttcaaagctgccttatttccatttacctgaatcctggccagttttagagcctggcatgctggtcacagtttcaccacaacttcagcggattgacgacgacccgcgacaacttcagaactagaccaaagaattgcatttgcacaggtcgtcaaaacgggacatggcttagtttcaggctgccaacataattgccttgactctgcgcatgagctgcaagctgttgtgaatc

SEQ ID NO: 69656 - DNA, 466 bp, Oryza sativa
  Clone ID: PAT_MRT4530_70303C.1
caaggggaaacaaaaagattttttggaaacaaaggaaaaaaaacggggggggtcccccgcccacccagttacatacatacttccaagggggttatttttttctttttttaaaaaaaactaaaaacggttgggaacaaaccagtcctatttacatgaccagaaccaagggggtcaaatggcaggtttggaaaaaaaaaccacctttgtttttttccccctttaaaaaaaagggggggagggaaaaaaaaaaaaaaattcattggtatttcccccccacctttaatgggcttgggaaaaaaaaaattaaaggctgataaaataaaaaaaaaagcggatctttactccaggggcggggttgatctttagggcccgccgagttcggttatgaccagggggaaaaaaagggggggccccggtaattttgcccaactccggggagggggccaatcattttgggcgtgaaaaa

SEQ ID NO: 69657 - DNA, 348 bp, Oryza sativa
  Clone ID: PAT_MRT4530_70304C.1
aacgctaaaaaaaaggccccttttaagtttaaaaactgacaaaattatcgcggaacactttacgggccctgcaggaaaaacccaggattgggagaaaaacgagaacagttgatacatacacgtttattcgggggggggtgtaaaagggctttcaaacagggggccataaagaaaggtcatgggtggcctaaaaagcattttaaaagggcttttgaaaagtttatgtgatgacggggggagcaaatcggccagggtacttttgcatttttgacaggtttggggcaacatcaaccaggggggcgggggccttctgcgaatccctgccggtcttggaagaatccctcttat

SEQ ID NO: 69658 - DNA, 390 bp, Oryza sativa
  Clone ID: PAT_MRT4530_70305C.1
aacacatcaaagtctcaaaacttgagaagcaaatcgttttaacttccaaaaaagtaacaaactaaaagcaaaagaaaactccataacattgtttaaaggataacatctctgagataagtagcaacagataaccaaacatgaaactttctaagaagaattgtgatataacaactcttacttcgtgacacggttgtaaaacctcatcttctcaagggaggtctggaagcgaccatgtccaaaaatggaggcggtgtcaataaacttgagtttgatctcctccaaggcaagacgggaagtctgagtgagaagtgactgtctgagagttacaactctcttcttgggaccaacacagcaccccttaatcatcaaggagtcatccttcacaatacc

SEQ ID NO: 69659 - DNA, 239 bp, Oryza sativa
  Clone ID: PAT_MRT4530_70306C.1
aagcttgcaccatcaacaatgagaatcaaaatcattgctccacctgaaagaaaatattcagtttggattggaggatccattcttgcttccctctccacctttcaacaaatgtggatctcaaaagaagaatacgatgaatctggacctgcaatcgttcacagaaaatgcttttaagtttttttcaaaagcttagaaaagaccaaacaaaaaaactaaaaaaattcaaaaaaaaaaagctt

SEQ ID NO: 69660 - DNA, 615 bp, Oryza sativa
  Clone ID: PAT_MRT4530_70307C.1
ccttcatccaccgcgctgcttccatctccgcccccagccacctcttcgcccttcccagcctcactcccccagccagggaaggacagtggagcgcggatccgccgcctcccgtcctcggtaacgatggcggcgcatgaatccagcggcctccgtcctcgggaacggcctggagcacgcggatccgccctccggagcggcggcggtgtgcttaggcaggcgggagcgagcagctacggcggcggcggaggctacggcgacgacggcgccggtggctgcaacgacgacgacggcgccgatagctgcgacgacgacaatgacgatgaccagcggcaggtcggcggcttgcaatcgcggggcgggcaggtggcgcggggccgcggggccgcgggggcgcgccggcgcgggggcctcctcgccgccctcgaccgtcgacgccccgcaccacctcctcgccgctcacgaccgcctcctagcgcggaggcttcggacgctcgtcgtcagccaacggtggttcgaggactgcctcaaggaggggaggcgcctccccaagaaaccctacatgttggaaaggttctgattgcgagcatcagcgatggtctgattcctccctactga

SEQ ID NO: 69661 - DNA, 1165 bp, Oryza sativa
  Clone ID: PAT_MRT4530_70308C.1
atggttgtggaggaggccgtcgtcgcggccggcaatgagatgagcctgtccaacatggtgctcgggttctacgaggaggccgagctccagagctcgccgccgggagactgcgccgccgccgccggtgacgacgacgacggcagcgacgacgaggggtccggcggcgccgccaagtgcagggcgttctggaaggagcagcagtcgcaactctacgaagcgctggccaagatgagctcggcggagagcaggatccaagcggacgcggaggaggccatgaggcagatgcgcgcggcggcggcgggcgcctgctcctgcgcgagccgcggcgcggcggcggcggcggcaggcagcggaggctgccggagctgcacgctccggtttctcgccgagcggctgcgcgacgccgggtacaacagcgcgatctgcaggtccaaatggccgcgatcgccggaaattccttcaggggagcacagctacgtggacgtggtggcgccgaccaggagcggcaaggcggtgcgggtggtggtcgagcccagcttccgcggcgagttcgagatggcgcgcggcggcgcggggtacagggcgctggtggcgtcgctgccggaggcgttcgtcggccgcgccgatcggctgcgcggcgtggtgcgcgtcatgtgcgccgcggcgaagcagtgcgcgcgggagagcggcatgcacatggcgccctggaggaagcagcggtacatggaggccaagtggctcgccacgccggagcgggtcgcgccgcccggcaacgccggcggcgccggcgacgcggtggcggtcgggtcgccgtcgtcgccgctgtcgccggggatgacgaacaggcagatgcagcccaagttcagggcgtccatgctcacgctcgacttcggcggccggaccgccgtggaggtcgtgtgagctagcgatcgatgggtgagaagttgagaagattgttttgattttgaatttttagttttatttttaggtatgtgcacgcgtggttttgaccttgttttgacttctgaagaacaaggcacggagcagctaggctctgaaattgtgaggattatgtaatgatgaggatatatagcttggccattttggtaaatattttatattgaagaaatttaatagggaaaaaagaggaaaggcaatgcatatt

SEQ ID NO: 69662 - DNA, 118 bp, Oryza sativa
  Clone ID: PAT_MRT4530_7030C.1
tcagaaaacaacgaacaatctcaaactcagggagaatatttatgcattcagatctgtagacagctttccataactgaatacactatatactcaaataaagtatcaattttatacaata

SEQ ID NO: 69663 - DNA, 472 bp, Oryza sativa
  Clone ID: PAT_MRT4530_70310C.1
attttctgcaggcatatatccaaaaccttgagagtagcagattgaaacttactcagatagagcaagagcttcagcgggctcgtcaacaggtagaagctcaatatttttcttgcaggatttatcagaagtttcaagagataaacatgtattcggtttaattgtccaacatgtgcttcagggcatttttatatcaacatcgagtgatcagtcccactcagcgagtggaaatggtaatagtgtactgacttttctctttttctagaattgttggttaatataagcagtgctgtctgttgtattttatcatgtgtcttttaatcatcatttttcttcggtattacttgggataaaggagacaaataaagagagaagaagatagacacgaacatgaccaactatgactagctatcacgatacactactttatacttaagagtcttgtgcaagaaaaaaaaacttctttaggtataat

SEQ ID NO: 69664 - DNA, 192 bp, Oryza sativa
  Clone ID: PAT_MRT4530_70311C.1
atgtcctcggtgccaatgacacctgacgccgacatcctcgcccttcgtggtaactacgtcgctatcatgaagggatcaatgccattggcgcgtgacccctttacatctcggttgctagggaacgagggtttcaatgccattgccattgacaccgagatgttagatctcggcgctgttaggtgtattccttaa

SEQ ID NO: 69665 - DNA, 5730 bp, Oryza sativa
  unsure (1)..(5730): unsure at all n locations
  Clone ID: PAT_MRT4530_70312C.1
atggcgcataacctctctccgagtgctagcggtgacgacggggagcagaacccgcgccgtcgggctcgtactccaccgtccccctctcgccgaagtcttgagcgggaggaggcgctcgagagggtcgaaagatccgcgacttcgccgcttgcgggcgatggagaaggacggcgagacggggagcgtcgcctcctcgtctatggcgatggcagcacgccccagggcgcgctccaggctgcgggcgcgttcctgcgtcacccgcccgtcgtccccgatccagagactccagcccgacgttggctggatgatgtggccgacttggtcatgacagcacagcagcgcctaggcgccggcaggcggtcctccgtcaccaaggcctctggcgctgctaccaccggctccgcatcgtcgaggcggagagcgcggcgagcagcggccgttacccgccgttcgtccgccattccctcgtcaacgcctccaacccaagaagacgtgcgtggggggccggatgcccgcctcaatgtcgagcgccggcgcaatggtcgtcgtgctgcccacgcaacagagggcgcttcctcgtccggagcgccactttggtccgggcacgggggccagccccccgtgtccccggttggcggtgccggctgtcgagcatttgtggcgagccttcggaacgtccgttggcccccaaggttccggcccaccatcaccgaaaaatacgacggaagcgtcaaccccgccgagtttctccagatctacacgaccgggatcgaggccgccgggggtgacgacagggtcatggcgaatttcttccccatggccctgaaaggtcaggcgcggggttggctaatgaacttgccacccgcgtcggtccactcttgggaggatttgtgccagcagttcaccatgaacttccagggcacatatccgcgcccaggtgaagaagcggacttgcatgcggtacagcgaagggacgatgagtctcttcgctcgtacattcagcggttctgtcaagtccgcaacaccataccatgcatccccgcacacgcggtgatctacgcgttcagggggggcgtgcggcacaaccgcatgctcgagaagatcgcctccaaggagccccagaccaccgcggagctttttcagctcgcggaccgtgtggctcgcaaggaggaggcctggacctggaactcctccggttccggtgtggcagcttcggccgcccccgggtccgccgctcggtcagggcggcgggacaggaggaggaagaagaggtcggcccattccgacgacgagggtcatgtcctcgcggtcgagggcgcttcgcgggccacccgaaaggggaggcctgcgagcgacaaaaagaaggaggccggcgctcccagcagggagcgcccgactggcaagtggtgttccgtgcacaacacctccctccacgacctcgcggactgccgcgcggtcaaaagtttggctgagcggacaaggaagtgggaggagaggagtgaggccaagcagaaggcccccgccgaggacatcgacgatggcgacgatggcctggggttccaggagcctgaggccaccatcgccaccgtcgatgggggagcgtgcgctcacgcttctcgctggagcctcaaggccatgaagcgagagcttttggccgcggcccctacccatgaggcgacgcggcgggcgcggtggtcggaggttgccctcaccttcgaccagaccgatcacccgccgtgcgttgcccgggggggacagatcgcgatggtggtttcccccaccgtttgcaatgtgaagttggggcgtgtcctcatagacgggggtgcagccctcaacatcctttcccccgcagcctttgacgacatcaaggccccggggatggtgctccggccgtcccagccgatcatcggtgtgacgccggggcacacttggccactaggtcatatcgacctcccggtcaccttcgatggttccgccaacttccgcacggagcgggtgaacttcgatgtggcggacctcagtctgccctacaacgtggtcctggggaggcccgcgttggtgaagttcatggcggcggtccactacgcctatctccagatgaagatgccgggccccggtggccccatcaccatccatggcgacctcaaagtcacgcttgcttgtatggagcagcgcgcggaccacctcgccgcggcgtccaagcccgcgggtggcgacgagaggctcagcacctccgtcccagccgccccgaggcagcggatgatcacgtgcgacgaggtcccggaagacgcgctcgtctccttcctgcgggcaaacgccgacgtcttcgcctggagaccggcggacatgcccggggtccccagggaggtgattgagcaccgtctcgccgtgcggccgggcgcaaggccagtccggcagaaagtgcggcggcaggccctggaacgtcaagccttcatccgcgaggaggtggcgcgacttctggaggccggattcatccgagaggtcatccatccggagtggctggcgaacccggtcgtcgttcccaaggcgaacggcaagcttcggatgtgcatcgactacaccgaccttaacaaggcatgtcctaaggacccttaccccctgcctcgcatagatcagattgtcgactccaccgcggggtgcgaccttttgtgttttctagatgcatactctggttatcatcagattcgcatggctagggaggatgaggaaaaaactgcatttattacccccataggaacttattgttatacgacaatgcctttcgggttaaagaatgcagacgcgcaaccaagagaccttactctcggatctagcggaaactttcgaaagtctccgctccgcccgcataaaactgaaccccgacaagtgcgtgttcggtgtgcctgcgggcaagcttctcgggttcttggtctctgcccgaggcatcgaggccaaccccgagaagatacgagctatagagcggatgcgccccccagcaagcttagagatgtgcaatgcgtcaccggctgcatggccgccctaagccggttcatatcgaggctgtgagagaaggcactacccctatttaagctcctcaaacgctccgggccgtttacctggacggaggaagctgagcgggccctcactcagttgaaggcatacctcagttctcccccagtcatggtcgccccggagccagatgagccgttgctactctacctggcggcaacgccgcaggtggtcagcgcggcgttggtcgtggagcgcgacgaggacaaccctcactccgcgcatccccaccctgtgtcgactcgacccgggagagagcagggaggagaggcccccgagtcgaacggtggcccaaggcccccgacggccggagctggccctctgcccgcttgtccgacggtgccaggcacccccgacccccaggatggccccggggccactgcgggaaggccgcgcctgtcgccctctaaccccgaggtcgtcggcacagaagccgagtgcgccccacgcggcctcttggacgaagagcgccttggagatgcggcccctagcgaagaggatcggccccgccgaaaggtgcagcggcccgtctacttcgttagcgaggccctccgggacgccaagacccgataccctcaggcccagaagatgctttacgccattctgatggcctcgaggaaattgcgccattatttccaggcgcatcgggtcacggtggttacgtcttaccccctcggccaaatcttgcataaccgagagggtactggacgggtggtgaaatgggcaatcgaactctctgaattcgatttgcactttgaaccatgccacgcgatcaagagccaggccctcgccgactttgtggcagaatggacaccagctcctgagcccgtctccgaccccgaggccagttcgggcccctcgcagttgccttacaccgcctactgggtgatgcagttcgacggctccctgtctcttcagggcgccggtgcgggggtcacgttgacctcgccgagcggagacgtcctcagatacctggttcgcctcgactttcgggcgaccaataatatggcggagtacgagggactccttgcgggacttagggtggcagctggactagggatccgccgcctcctggtgttaggcgactcccagctggtcgttaaccaggtctgtaaggagtaccggtgctctgacccgcagatggacgcttacgtgcgccaagtgcggcgtatggagcgccattttgacgggatagagcttcggcacgtgcccagacgggataacgcggtcgccgacgaactctcgaggctcgcttcctcgcgagcccagaccccaccgggcgcctttgaagaaaggcttgcccagccgtcggcgcgccccgaccccctaggggagacggacgcgcctgaacggcccccgaggcccgtcggagtccaggcctcgggacccaaggggagcgctcccagctcccttagattgattgcttggatcgctgagatccaggcatacctcacagataagactctacccgaggaccacgaagggagtgaacgcgtccagcgcatctccaagcgctacgtgctggtggaagggaccctttatcggcgcgcggctaacggagtcctcctgaagtgcattcctcgggaacaaggcgtcgagcttcttgccgatatccatgaaggcgagtgcggagcccactccgcctcacgcaccttggttggcaaggcctttcgccagggtttctattggccaacggctctcaacgatgcggtcgacttggtccggcggtgcagggcgtgccagttccacgccaggcaaacccaccagccggctcaggccctgcagatcatacctctttcatggccgtttgctgtctgggggctcgatatcctgggtccgttcaggcgggccccgggcgggttcgagtatctgtatgtcgctatcgacaagttcactaagtggcccgaggcttatccggtcatcaagatcgataagcactccgcgcttaaattcatcaggggcatcactgctcggtttggggtgcctaaccgtatcattacggataacggcacccagttcactagtgagctcttcggtggctactgcgaagacatgggcatcaagctctgcttcgcctcacccgcccatcccagaagcaacggccaagtggagcgcgccaacgcggaaatccttaagggcctcaaaaccaagaccttcaacatcctcaagaagcacggcgactcgtggatcgaggagttgccagtggtgctctgggcaaaccgaaccacgccaagccgagcaactggggaaacgcctttcttcctcatctacggcgcggaggcggttctcccatctgagctcaccctgaggtcccctcgggtcaccatgtattgcgaggctgatcaagatcagcttcgcagagatgacctcgactatttggaagagcgaaggcggcgcgcggcttttctacctctgcgctcctatcgaagcctgccacnctnccatcaccnccacgtcccggcccgatcactctgcgtcgacgacctcgtcctacgccgtgttcaaacgcgtgctggattgagcaagctctcaccaatgtgggagggtccgtatcgagtggtcggcgtcccccggccgggctccgttcggctggccacgggtgacggcacagagctgcctaacccgtggaacatcgaacaccttcgttgcttctacccctag

SEQ ID NO: 69666 - DNA, 333 bp, Oryza sativa
  Clone ID: PAT_MRT4530_70313C.1
atgacccccagcagcaccaacaccccaagtacgagagagacactatgcatggacatgtggcagtgggtgttcctcctggactaccgcggtgtccacctcctactcttccgcaaccatggcaccaccgtgaagctcgccgtcactgacccatcgagacgcgcctgctaccctatcaatgtgcccaccaccgacatccttgtcggcctcctctcctgccaccggcgcagtctggttcacgcactagcgcaccacaccccttgtataagagggagcagtagtcgtggccggatgggagcggtacaaaattctaccttcgagtacttgggatattag

SEQ ID NO: 69667 - DNA, 200 bp, Oryza sativa
  unsure (1)..(200): unsure at all n locations
  Clone ID: PAT_MRT4530_70314C.1
accgncaccgncaccggccgtccacatncgacggcgccgatggcctnctncgccctngccgnntncgtncgccaagccagccgngtctnctccngtcnncgtngccgaggtaaccccgcagagnaccctcctnccgcagtgccggngcgtccgcgctgncccggtcgtncggntccgctcgnnacncgcccgcggcgtgt

SEQ ID NO: 69668 - DNA, 229 bp, Oryza sativa
  Clone ID: PAT_MRT4530_70315C.1
ctggtttcagggctggtggccgagcaccagggcctgcttaacttagcatctccacgctggctcgaccccctggtgttgttggtttcttggcagttgtggaaggaacggaacgctagggttttcgactctgcgctctcttctatctcagtggttctggagtccatccactcggagggccgtcctgtggtctttagctggcgttgccgcttttggagacttgttgggagtg

SEQ ID NO: 69669 - DNA, 651 bp, Oryza sativa
  Clone ID: PAT_MRT4530_70316C.1
gcacgaggagagagagagagagaactagtctcgagttttttttttttttttttttttttttttttggatgaccaaagtaagaaatataccaaaatgttgtcacatacaataaaacaactatcatcaaagaaggacgcgtgaaaaacaagaaaaattaatcataaatcaaggctatcctagctgtgccgaccgcctcaccttttcagatagacaaggggatttcacatcaaaatgtctgtacaagaagcataaattggtcatgaactcaataaagtgtcatgttcacatttgaagtcacacccgcatttttgctgaacaaccaacttttgatcaccctctacaagttcataaattggataggctgagacgtgcaccacggcaggccatcaaactcgcgaaattttgggatgtgagctcgactgcgaggtaaacatgagtagcgcgtcttaaatcgtctttgcacgaatgatttgagtagtgtttgcagtggacaagctttttttctgcatttgaaaccacaatactcattttatcatcaccaaattgtcagattaagatgacttcaaacgagtttgccctttggcctttcttctttttgatttttcagttttccagcaggggaacagaccatgacagccaggtgctccgggc

SEQ ID NO: 69670 - DNA, 1874 bp, Oryza sativa
  Clone ID: PAT_MRT4530_70317C.1
acatacagaagggccgccatccttaaaaatcacgcctctgcacaagacccagatttttatatatatgaatatagatatcaaacaatgtcccttttttacatttgaacaagaggggctagctgtatcttcattgtctctctcactatatgggacctccttgttgctgtctattcgacgaatgtacggcggcgaggagggcagccccgacccccgacccatcctccgtcaccctcagcgtcacgttccgcgccacctcctcccccaggatctccaccagggcctcgtccaggtactccctgaacaccgggtaaccctggtacagcccgccctcgatcgccaccaccgtcctcctcggctgccctctacctctcccgctcgacgccgcgccgctcccatccctccccagcttcttcagtatccccacgatgcctgcagcggctagacgggcggctctgcgagtcacaatgtcgcagactttcacgaccagccgtcgagttttcagaggagcatcgggaatcttcagatgttctcgaagtatccttctgacttcgctcagatctggtgaatcgtcctcgcgaattgcggccagaaacggtgtgctcaaaatgaaagggttggatagactatcagcagcatcaccaaaaacatctgattcctgggccattctatgaaataccaatcttgcaatttccccaagatacattcctgatatcattttctcaaagccctgatcattgcgattgtgtgtttcatcatccagcaagatgtcatatggcgtccttggcaaatgtgatgaccagaaattcccccactccatgtttactaccatgcctccagagttcgttagaagaccctggcacttgataattgcatcagtgcgttcaatgtagcaagcgttggtgccagacccaattatcacagcagccactgtgtcttcatcatagtaatgccctagagctaatgtccccactgtatcattcaccaatgcagtgacccgcacatttagcccacaattggcaagcgcttcatttaagcactgagcaacatctctgccaacctgcttcctctgggacaaccttccctgaagcaaggcggccgggggatccttgttggcaggagcaggggccattttcgggtagccctcgcccatgcagttggctatggcgctggcgccgccgctgctggggtcatcggaggcgaagacggcgattccggctgccacgaagacgcgggcttgaaccatagaaaaatttacaatatttaccaaaaccactagcgtgtctctgatggaaaatccttttgtccacctaattaatgaccctgaagacactgaaatttgtctaacagggaaagaaaatgtaaaaccaagtgccatttttccatcttggtcatcttctccttcaagaaaattctttagtgccagggcaacaaagttgaataaaccctcagtagtgcctttggtcagttcctcagggatgggttgctgttcaaccttttggttgacgatcacagatcccgcaccaacttgtaccctcaagactctgaagtttgttcctccaagatcaatagaataatatacaccttcttcactcccgctggggagcgcgtcgacgaaggtgagcagcatcttgagcttgctgccgccatcggacgcgaggccggcgtgcatctcgacgaccatggcgtccacgacctggcgcagcctcgcgggcggcgtggcacacccctcctcgaactcccgcagcagcgccaccgcccgccgccaccgcgcccgcgccgacgccctgcgcgccacgagcgccgcggcgatcgcgcaggtcaccgccgcgcaccccaccgccacgccgagccccaccctccccatctcctcctcc

SEQ ID NO: 69671 - DNA, 240 bp, Oryza sativa
  Clone ID: PAT_MRT4530_70318C.1
atggctgcgcgatggcgcatagggagcagcggcagcgggctgcaggctcgagagaggccagggcttgccgggagctgcttggcggacggtggcggcctaatctgccgccactgggcccttaatggccggatccgcgggcaccggccccgtgatggccggcggtggacggcggcaaccagatccgcctccgtcggccccgcggcagccgattccaccgccaccgagctcgcgacgagctga

SEQ ID NO: 69672 - DNA, 707 bp, Oryza sativa
  Clone ID: PAT_MRT4530_70319C.1
gcacgagggtgaccacagatcgctcttcttctgatttcttttctggttcttcttgcgttgatactgcagctacctcgacgacgatgggctcctgtggtggtgcggcgcgcgctgctggatcggccgtcacggtgggcaagctggtgaagctgctgctggttctcgccttggtcgtctctgctgcggccgcgcacggcgcggacgccgcgagggcggtgccgggcacgggcagcgctagcgctggccgaggcggtggcggggccggggcgaggtcgctgctgtcgaggccgcagccgtcgtgctgcacgcacgacggcaacacggtgggcacgggatgctgcccggggaagcggcatcggcggcagcggtggctggtgttgctcgaggcaagggggctcgtggccataccgtgtgtggatccgaagccaccaacggcggcggtgacaagcgcatttggcgacatcttccccgttgtgggcggatctgacgacgacgacggccggcgtttcatcaagcaggtcgcagacctgaatgcgccgccagagatccttcttcaacccaacaccgccgcaaagctgtgtgcctgtgatcagttcaacggcgcagcacggcagcaccatggcagcgacaccgatgcgtttcagtacccagttcagtcggcgggttccggtggcccgatgatcatcagtgattcgctcggcgagtga

SEQ ID NO: 69673 - DNA, 207 bp, Oryza sativa
  Clone ID: PAT_MRT4530_7031C.1
atggaggttgacaagtggcccccgctcaagggcggtctggtaactctccaagggacatcgtatgggactgcgcccattaagccagcattcccgggggaccccatgtttcccggggtgcactgctcgaggctgaggcgtgataacgatgtaccttggccttcacctagggtgttgagccaacagtatcaaaggacctccaagaactaa

SEQ ID NO: 69674 - DNA, 451 bp, Oryza sativa
  Clone ID: PAT_MRT4530_70320C.1
gatctatatctagatataactaactacacaacaccatattgcattgatcacggtacaacctggacagaagtacacactaccggtacagagatcacgctatgtgcaatactcttacatgcatccacgcgggccataagaatacgtacatatatacggctcacgtacgtacatcaactgtaacgggtacacacacgcacactctgatgtagagacgcgcattgtcgtctacctatctagcttatgctgaaggcgatgcatcttcatggcataacggtatagccatgctgctcacttgccgtagacgaagttggcggtccaagcccaagcgttgatgacgacagtatcgaccaggtggtcatcgaggacctctagggggcctttgtcagggactagggtctgctccaagaaaccaaccatggagaacatggctaggcggccggtcttgatctac

SEQ ID NO: 69675 - DNA, 377 bp, Oryza sativa
  unsure (1)..(377): unsure at all n locations
  Clone ID: PAT_MRT4530_70321C.1
tttttgtttttttggggnngtgcgggtttcccccctttggttttttttttttttttttggggcccgacccccaatagggggggggtcgcctaattggcccttgggaaagggggggtcccccactgggtcctggaattcccgggcgggggccagataaaacccggggtcccccaaactggagggggaacgtcacccccccaataattcccaacaaagcaggcggggggaaacagccgccccccttaaaaccggcttgctcggggtgggcctctggcccgggataatcgctgaggccgggtccgacccgctttggaagggaattgcccgggggcccccctggggggggatggccacaggggccgcccccatggaggggc

SEQ ID NO: 69676 - DNA, 143 bp, Oryza sativa
  Clone ID: PAT_MRT4530_70322C.1
gggagggaaaacataggttattctgataaatggggaattacatagagaggggccatttatttagtttaagtgacagcacaaatttgaaaattcataattatgaaaatggggaaattaaagttacacaaattgaaaaatttatt

SEQ ID NO: 69677 - DNA, 251 bp, Oryza sativa
  Clone ID: PAT_MRT4530_70323C.1
gaaagttagaatctacacagggcaggcacacacaacccacatcaaacacggcggccacctgctgccgcacaagaccacaaagcccccaaccacgacaccgcaccacatccccgccgcacaccgccagtacaggtgtccggtggtgtcccctccctcctccggcagcgcgagggagggaggagaggcgggggccattgccagccgctccagcaacggcgggcgccaccacaatctccctgtccctgcagggg

SEQ ID NO: 69678 - DNA, 1401 bp, Oryza sativa
  Clone ID: PAT_MRT4530_70324C.1
ttcgccactcctgggctcgtcgtaggaggatccgcctctccgcctcgcctgagctcgattgtcgtccaagccacgccggatctaggagaagagagagaagggaggggagcggagaagttagcagatctggaccgagccacctctccctccactacaccatcgcgcaccgggccatgctcgccggcgtattcggacacggacaacagcaccaccgacgacgatgtggcctccatgggcaaggcgctcgacgccgaccaactccgcgtcgcctatatccagaagaggctcgctggcgacaccggcgacggcgcggatccacataagtttgttgagggtggagacactcatgtggtaagtagcctccagacgacggcgacgactaattcggcaccggatggcacgtcggcggtgagccagacggtgatcatcgactcgggcagcgacgtgccatgggtgcaatgccagccatgcccgctgctggtgtgccacccgcagcgggaccccctgttcgacccggccacctcgaccacgtacgccgccgtcccttgcagctccgccgcctgcgcgcggctcggcccctaccgccgcggctgcttggccaactcgcagtgccagttcggcatcacctacgccaacggcgcgacggcgaccgggacgtatagctccgacgacctcacactgggcccctacgacgtcgtcaggggcttcctcttcggctgcgcgcacgccgaccagggaagcaccttcagctacgacgtcgccggaaccctggctctcggcggcggctcacagtctttcgtgcagcagacggcgagtcagtacagcagggtgttctcgtactgcgtcccgccgtcgacgagctccttcgggttcatcatgttcggcgtgccgccgcagcgcgccgcgctcgtcccgaccttcgtctccacgccgttgctgagcagcagcaccatgtcgccgacgttctacagggtgctcctccgctccatcatcgtggcgggacgcccgctccccgtgccgcccactgtcttctccgccagctctgtgatcgactccgccaccgtcatctcgcggattccgccgacggcgtaccaggcgctgcgcgcggcgtttaggagcgcgatgaccatgtaccggccggcgccgccggtgtccatcctcgacacgtgctacgacttttctggcgtccgcagcatcaccctgcccagcatcgccctggtgttcgacggcggggccaccgtcaacctcgacgcggcggggatcctgctccaaggctgcctcgccttcgcgcccaccgccagcgaccgcatgccagggttcatcggtaacgttcagcagcgcacgctcgaggtggtgtacgacgtccccggcaaggccattcgattccggagcgccgcctgc

SEQ ID NO: 69679 - DNA, 1230 bp, Oryza sativa
  Clone ID: PAT_MRT4530_70325C.1
atgggcaaggcgctcgacgccgaccaactccgcgtcgcctatatccagaagaggctcgctggcgacaccggcgacggcgcggatccacataagtttgttgagggtggagacactcatgtggtaagtagcctccaggtcgctactggtgctggcattggccaaaagccccatctaactacgacgaggttaggaacgacggcgacgactaattcggcaccggatggcacgtcggcggtgagccagacggtgatcatcgactcgggcagcgacgtgccatgggtgcaatgccagccatgcccgctgctggtgtgccacccgcagcgggaccccctgttcgacccggccacctcgaccacgtacgccgccgtcccttgcagctccgccgcctgcgcgcggctcggcccctaccgccgcggctgcttggccaactcgcagtgccagttcggcatcacctacgccaacggcgcgacggcgaccgggacgtatagctccgacgacctcacactgggcccctacgacgtcgtcaggggcttcctcttcggctgcgcgcacgccgaccagggaagcaccttcagctacgacgtcgccggaaccctggctctcggcggcggctcacagtctttcgtgcagcagacggcgagtcagtacagcagggtgttctcgtactgcgtcccgccgtcgacgagctccttcgggttcatcatgttcggcgtgccgccgcagcgcgccgcgctcgtcccgaccttcgtctccacgccgttgctgagcagcagcaccatgtcgccgacgttctacagggtgctcctccgctccatcatcgtggcgggacgcccgctccccgtgccgcccactgtcttctccgccagctctgtgatcgactccgccaccgtcatctcgcggattccgccgacggcgtaccaggcgctgcgcgcggcgtttaggagcgcgatgaccatgtaccggccggcgccgccggtgtccatcctcgacacgtgctacgacttttctggcgtccgcagcatcaccctgcccagcatcgccctggtgttcgacggcggggccaccgtcaacctcgacgcggcggggatcctgctccaaggctgcctcgccttcgcgcccaccgccagcgaccgcatgccagggttcatcggtaacgttcagcagcgcacgctcgaggtggtgtacgacgtccccggcaaggccattcgattccggagcgccgcctgctaa

SEQ ID NO: 69680 - DNA, 960 bp, Oryza sativa
  Clone ID: PAT_MRT4530_70326C.1
atggtgttacaacaggtgttggctattcaacttgctggaaagattctacccaagaccagcggcggcgggcgaccacgggcggcgggcgaggagctgaggccggcgacgagcgggggtggaggcgtcggcagcagacggcgggtgggcgtgaggctggcgacgggcgggggcggaggaggcggcgggcggcggtcgaggagccgaggccagcgacggggcggtggcggagaaggcactgggccaccgggtgggcgcgaggctgggcgacgggccagggacgaggcggcagccagcggcggtcgaggagccgagggggatccataccccggtggggggtcgaggacccgtggccgcgtgttgcttggaggcactcatctcattctagcccaccaaagccggtgcggctgcaccggctttggaaagtcacacttgccccttgccggcgcccggagggtggtcgccaaattgtggagaccgtttcccaccgcccatccatgcttgcccggtgggctttgcctccattgccgacccccctccgcgcatcccctttggcccgcgtggcctccacctccgtcgccgtccgccgtcgtcctcgagccccctcctccacccgcaaatggctccgcccccgcgcgctgccgtccttacctcaccgccgccacgctcctccgccgcctccgcctccgcgccgccgtccgcgccgccgtctgcgccgtcctcgccgactgcacgtgcccaccgcccgtcctcgctgtgcgcgctgcgcgccggccttctctgtccccgccagttgccggcctcggctcctcgaccaccgcccgccgcctcctccgccccctcccgtcgccagcctcgcgcccacccgccgcccgctgccgcctccgtccccgcctgtcgccggcttcagctcctcacccgccgccgccgacccacccgagagagaggaaaaggaaggcatag

SEQ ID NO: 69681 - DNA, 227 bp, Oryza sativa
  Clone ID: PAT_MRT4530_70327C.1
atattcaaaacaaaaaaatataattccattcaaatatcataaaatctatattgaaaaaaaagacaattaaaattacataaaaagatctcccaaaacacactaatttttattacaaccaccaccacaatattaatcttacttactctaaagctcaaaaaacaaatcatttttaatcttttgcggatatccaactctctaaaggcttataattcctcaacaaatcccat

SEQ ID NO: 69682 - DNA, 228 bp, Oryza sativa
  Clone ID: PAT_MRT4530_70328C.1
atggaggagtccaccgcctccgccgacggcgacgccccacccaggagcaggattgagaacgacaagaaaagtttcgattcgtttgttctcgaggcatctgatttctcggtgatcaaggatggagccgctggcgtgatagctggcggcgcccgcgtggaaggagcggcagacagcgcggaggcggacgtggtcggggagggacgagaggtggaggagcatgagccctag

SEQ ID NO: 69683 - DNA, 779 bp, Oryza sativa
  Clone ID: PAT_MRT4530_70329C.1
cgatttaaatgccaatctagtgatttgatgcaattaaaaaaaatcaaattcaacttcaaaatttaaactaaaaaagggcgaaaaaagaaaagaagaaccaaatctgtccgatcaaaaaagagcgaaaaaaaagaaaaagaaaaacgaatccgattccgcggtaaaaaaagggcgaaaagaaataaaaaagaaatctgtctgattcctaaaaaacgggcgcaaaaaaaaccaggtgaaaaaaacgaccagccaataaaacgaatccgcgtggacgcggtaaaaaaaagagcaaaaaataaaataaaaaaaacaaatctgtcggattaaaaaaaagaattatgttaaaaaataaaagaaatttccgtcgtccgttgggaaaaaaaagcgataaaaacaaaagatcagaaaaaaaagtccgactcctccggtggaaaacagagagaaaaaacaaaaaacgaagagaaaaaaaaacttccatcgcaaaaaaaaaaatgtccgactctaaaaaaaatccaactcctcggtggagaaaaataaaggcgagaaaaaacaaaaaaagagaaaaaaaaacttctactataaaaaagaaaaaaaaaacgtcctacatccctgcccgcgtgatgaaacgccagccaaagcaaaaaaaacaaaattgagcaaagggataaactagattgaagttcccaaaattaaaagatgataaacgatattgaaactcccctaactcgaaaagagggaataaaatatattgtaatttcccgacaaaatgctctaaattt

SEQ ID NO: 69684 - DNA, 1389 bp, Oryza sativa
  Clone ID: PAT_MRT4530_7032C.1
atgggccccacgcgtcagccgcacccgagggcgcgggcggctgacggctgggccccacgcggcggccacacggcgcgcccggaggcggccacgacggtgcagccggcgggaggcggcgcccgcgcccctatggtcgccggcggcggccataggcacggcggagtggcggccgagagagaggaagggaagggggaaaagaggcggcggtccacggctcacccagggtcgacggcgacgacaaaggaggcggccggagcggaggaaggtggcagcgcggctcgggtggacggggacgacggtgctccggcggtcggcgagctcggcgaggtggtggacggggtcggcggcgatgcggcgaagccggagaaggcgacgccgaggcgggagatggtcccggcgagcggagagggccggccggaggtcgtcggcgacggaggagagagagggcgacggcgcgagctcgtttccggcgaggagacgggcaatagctatgttgtcaatataatcatcagggatttggttcctgctgagccttggtggtatatagcatgcagcatctgtaagagaggcacagctagagaaggaaacgcatataaatgcccgagatgcagcactgatgcaatagaaacaaggtatagagtagctatcatgggtatcgatccatcagatttggcaaacgatcaagccaaagctgctgagtttaccttttttggagaaatcggtgaacaattgattggcaggcctgttcttaacctggttgcatctgttcatggagcacgagatatagtaccaccagagatcaaagcaatttttggcagacaatatgtcattagaaccagtgtgtcacgtggctcattgcaaagaaatcgggtatcctaccaggtcatagctatagcacagctagataaaaaacataaatcttctacggctgatgagaatcttggccatggaggctcatctcctgatgaacatgattgtcgcaagccttctgttgtgcgcacactgttcgtacacaagctgccaccggagccgccaaaatgacttaagcctcccatgtaatatccctagagcgaagtgaccttttgcacctggcatggcaacacgtatacttctctctctgattgaagcaaagctaaaatactatggtcaatctattttgcagtgccaacatagaaaagagaaatgttcttttgcgcaagccattggaccaatcgatattagttttacctgttacgggctcactacccctaatagctagccaaatgataaatgaattagtatcagcagtgtttggtgtctataatatatgcacgttctgacaaatatcgctgcaagtgataagacatagtcttattaatagtactatatctattctgcttatactacttc

SEQ ID NO: 69685 - DNA, 121 bp, Oryza sativa
  unsure (1)..(121): unsure at all n locations
  Clone ID: PAT_MRT4530_70330C.1
tntaaaggatcattatgaaggaccaaatggcaaacaattttttaggggaaaaccaacatttttcaaatgggggaagggtcgctccaaacacgcacagaccattttacttgcgtgcatgtga

SEQ ID NO: 69686 - DNA, 169 bp, Oryza sativa
  Clone ID: PAT_MRT4530_70331C.1
actgaaattacaagtctgtgttcagataaaaccggagaaacatcttgctgtaaatgttcaaaagtccggcacaatggacactctcatctgataagcattattttatgggaataaatatatcagcgggtactgactgtacaatgaacagagcctctcacgcttggaataa

SEQ ID NO: 69687 - DNA, 900 bp, Oryza sativa
  Clone ID: PAT_MRT4530_70332C.1
atggcagtgactcgggtggcggtccacagtggaccgagtccacggaccggagaagggggaggcacacgacgtggcgctgacgtggcgccgacgtggcgcacacgtggcggccacatggcacgccacgcgggtggccgaaccgacggccccgatctacccgagagtagatcggacggcggcggggagcacgcggccggcacacacgggcggcccaagccggcccgatggccacggtgcacagcggcgctaccgcagggcggcggcggcagacagcggtgaccgacggcaagcggcggcggcgcgacggcgcgggtgatgctagcggcggctaagcagctaggcggcagcgcggcgactaagcggcgtgggagagagagggaggaaggggaggaggtgtctcaccgacggcgattgatgacggcgagcgacggagggcgatgacggcaacgggacgagctctggaaccacctagcgaacacgatgaaaggggttagagagagagcaagatggaagagggcgaggacgccggccgaaggcggtggccatggcggtgctcaccggcgcaaggcgcggagtgggttccggaggcggaatccgacgggagaggggcggacggggtgacctgcacgacggcgaacgtgacggcgtcgacgacgcggctcggcgcagcggctagcggcggctagcagcgaccggagcggtggcggcggcggcggaaaggagggcgacagcgctagggcgatagagggcacgggagagctcgcgaaatggagaaaaagagagaggggagagtggggatgcttaaataggggagagggagctcgaacgtggctaggagaggcgggaatcgccagccgacgtggggtagtgggagaggagagagaggcgggatttgaaaat

SEQ ID NO: 69688 - DNA, 291 bp, Oryza sativa
  Clone ID: PAT_MRT4530_70333C.1
atggggctagggagtaagggcctagggcacaccatgaagaacgacaggatcatctgttttttcgctagggaatttggagataggatcggctggaggtatagaggtatagatagatacatagatgatgagagggagaaattggaggccagctgggcctcctttcctggtgctcattcgtcctcccccttgtcaggcatctccgccggcggatctccgcgcatctgcctcttccactcaaggaaccaacccatccagcgccgtcgcagcctgcacgcctcccgccttccctag

SEQ ID NO: 69689 - DNA, 2834 bp, Oryza sativa
  unsure (1)..(2834): unsure at all n locations
  Clone ID: PAT_MRT4530_70334C.1
atgggggtgttcgaccggctgccgccgatggaccgcctgcggtccgagaagatgtgcttcgtgcagctcatcatccccgccgagagcgcgcgcctcgccgtcacctacctcggcgagctcgggctcctccagttcaaggacttgaatgaggataagagtccttttcagcgtatatttgtcaatcaggtaaagcgatgctctgaaatgtcacgcaaactaagatttttcaatgatcagatcaacaaggcaggtgtatattcctctgttcgaactgcaatgcagccagatatagatttggaggagcttgacgctaaagagcgagataattgatacgatcatcatgatatgaaatcaatttgtgctaaaataatatttacatgcaatggtttcacggactcaccgatcgctttctcgggaccacgtgaaattgatccttcttttcgaactaatctcacctcagttgagtcgtgattacttcaactttagtataatttaagtacatcaaatggaaatacccatttgaatttgtacttggcgcagtcaccaatactgcatcgtatcttcggctttgggcattaaggtttgcttttaatgtgctaggaaatggcttttgagaggatgttattgcgagctacaagggggaatatgtttttcaatcaggcgcctgcaggggaacctgttactgatcccatttctggtgaagaggctaaagcaaaaatattaaagatttgcggttcatttggagcaagttgctaccctgttcccgaggagatggttaagcagagacagatttttcgcgaggtatctggacgccttgctgatctggaagccactttggatgctggaatccagcacagaaacaaagcactagagtcagtaggttcacaattatggaggtggacaatcatggtgaaaaaagagaaagctgtatatgatacattgaacatgctgaattttgatgtcacgaagaaatgccttgttggggaaggatggtgtcctatatttgctaaatcacagatcaaggatgttttgcagcgtgcaacgcttcacagtaattcacaagttggaataatatttcatgagatggacactattgattcaccgcctacatatttccaaaccgataagttcactaacgctttccaggagatagttgacgcatatggtattgctcgatatgaggaagctaatccagctgtctattctgtcatcacattcccatttctttttgctgtgatgtttggagattggggtcatggtatatgtctattgttaggagcatgtgttcttatacttcgtgagaagaaactttcctctcagaagcttggtagctttatggagatggcatttggtgggcgttatgttatccttctgatggcattgttctcaatatactgtgggcttatatacaatgagtttttctcagttccatttcatatattcgggaaatcagcgtatgaatgtcgagagaaaacctgcagtgatgcacatactgctgggctcattaaagtccgtgatccctatccttttggagtggacccaagttggcgtggaagtcgatctgagctaccctttctaaactccttgaagatgaagatgtctatactaatgggtgtaacccagatgaacttggggattgtattgagttattttgatgcaaagtttcatggaaatgctcttgacataagcctctttggctacttagcactcctaattctcatcaagtggtgcacgggctctcaagctgacctatatcatgtgatgatatatatgttccttgatccttctggcaatcttggagaaaatcaactattttggggccagaaggaacttcagatacttttgttgcttatggctattgtagctgttccgtggatgctcttcccaaagccttttatcttgaagaaacttcacaaggagaggtttcaaggtcacacctatcgctttcttgggacctcagaaatggatccagattctgaaccagactcagcccggtcacgtcatgatgacttcaactttagtgaagtttttgtgcatcaaatgatacattccattgaatttgtacttggcgctgtctccaatactgcatcgtatcttcggctttgggcattaagtttggcgcattctgagctatcaacagtcttctatgagaaactgctggtacttgcttgggggtatgacaatcttgttgtgaagttagtggggcttgtaattttttcttttgctactgcctttatattgctggggatggaatcattgagcgccttccttcatgcacttcgtctacactgggttgagtttatgaacaagttctaccatggggatggctataaattcagacccttttcattcgctctgctagctgatgacgaagactgatgcatacaaaattcagcagataaagagattaagcttgtttcttgccatttttggagcacgtgagtggaattctttcgaccaagatgggtttccccaatacacagcattttgtcagaccgccgggcttcttccgaacgcatgtgtgcagtcctggttgagattgccagcgtggtgggaggagattttgtaagttcacggcaatactgtagagggcaggtttctcgtacagttcctccagtggagaagcagattatagatgctaacaacaaagatagaaatgtagatttgctatgtctacttttagctcttatactttgtccaagtgactgtcccagtatcccttaccacttgaaaatggaagttgcagtcgttttttttaatcattacgtgattaggttgtaacgaagggtgacaattattgaactacaatgtttgtcaattcaataagntaagct

SEQ ID NO: 69690 - DNA, 790 bp, Oryza sativa
  unsure (1)..(790): unsure at all n locations
  Clone ID: PAT_MRT4530_70335C.1
gcgtccgtccttgaagatgaagatgtctatactaatgggtgtaacccaaatgaacttggggattgtattgagttattttgatgcaaagtttcatggaaatgctcttgacataaggtatcaattcataccacagatgatctttctgaacagcctctttggctacttagcactcctaattctcatcaagtggtgcacgggctctcaagctgacctatatcatgtgatgatatatatgttccttgatccttctggcaatcttggagaaaatcaactattttggggccagaaggaacttcagatacttttgttgcttatggctattgtagctgttccgtggatgctcttcccaaagccttttatcttgaagaaacttcacaaggagaggtttcaaggtcacacctatcgctttcttgggacctcagaaatggatccagattctgaaccagactcagcccggtcacgtcatgatgacttcaactttagtgaagtttttgtgcatcaaatgatacattccattgaatttgtacttggcgctgtctccaatactgcatcgtatcttcggctttgggcattaagtttggcgcattctgagctatcaacagtcttctatgagaaactgctggtacttgcttgggggtatgacaatcttgttgtgaagttagtggggcttgtaattttttcttttgctactgcctttatattgctggggatggaatcattgagcgccttccttcatgcacttcgtctacactgggttgagtttatgaacaagttctaccatggngatggc

SEQ ID NO: 69691 - DNA, 371 bp, Oryza sativa
  Clone ID: PAT_MRT4530_70336C.1
aaaaccaagttcttgcttgctcacaacctcgctgggctcagaacatccgatattatttattttcgaaaaagggtagggatgaaaacggagcagatagttttcgttcgctttggagaaaaacgaatacggatacttttcgaatcggataattctcagatagttcatatactgatacggatacggatattttctctcggatacaaatacgaatatggtatcggggtttctgtcggatacgtataataattcggatatctgaaaaaaatatttccgtattcgtgtccaatcatatttgattcttattcgtatttaagatagtccgtatttgtttcagtatccagcaaaaaaaaatgaaaacaaatatggtatga

SEQ ID NO: 69692 - DNA, 376 bp, Oryza sativa
  unsure (1)..(376): unsure at all n locations
  Clone ID: PAT_MRT4530_70337C.1
gtagttggtaaatttttgttttttaggttttgggttctagggtttggggttggctgtatacaagaacctactacttgtttccaggtaacctgcacgcgatgtttgcaaaacnnagggaagaggaaaaagggggcaggtgtcaaggagagatcgttaaattgtggggtgccaccccaaatacaggcaaacgccggtcggagggaccaggacacacaagggggtccacaccaccccccaaaaggacctgagggaaccagagggcgcaagctaacacgggtggggaacagacccgctggcggacaaaagcccccggggccaccaggaaaaaaaaaaaggcgggggcaggcgaataactaattgggaaaccgggggcaaa

SEQ ID NO: 69693 - DNA, 237 bp, Oryza sativa
  Clone ID: PAT_MRT4530_70338C.1
atgtggcagattccgctgtgcgtgctcgtcggctcgttgcgcgccggccgcaaacgagaggatagcgcagaggtggtggtggcctggtggcgtggtaggcttgagttcgtgcagatgtggttgcctggccaagtgccccgatccgtgtggggagaagtggagaaggcccagatgggtatcccctgtgtcaggcgagtgacggcgctggccctcactcaaggacaagctgtgatttag

SEQ ID NO: 69694 - DNA, 318 bp, Oryza sativa
  Clone ID: PAT_MRT4530_70339C.1
aaaaaaaaaatttgggggggttttattttaaaaaaaaccaccttggaggtgggatttaaacaaaaacccagtttttttaatttaaggggtaataaaaaaaagggtggcctttttttttttaaaacccttccagttaaagtaccgaattaatggggaaaaagccaaacctttggaaccacttaaagttgggggggggaaaaaacccattttggggggcaaaaattttccggtgatgtggtctttgggggaaaataaacccggcccggtgggttaacccgtaaatttttgaccggtgccttggaggaaaaaaattttttt

SEQ ID NO: 69695 - DNA, 858 bp, Oryza sativa
  Clone ID: PAT_MRT4530_7033C.1
atgacgtcaccgacagcggcggcggctcggcggagcggacggctcgggcggcgcacgctcgccggcgaacggcggcactaggacgcaaacggaggccaccggcacgtagaggacaacgcggcgaacacaccggtgaccaaaacggcggcggaagaacaacggacgacgacggcgacgaggaggaaacggcggaaaccttcgggttgacgacgacgacgaagctccggcgatctccggcgatggcgaaggggcggacgaggacggcgacgcgacggcgaacactacggcggccttcccgagcgacggcgacggctgaaacgacggcggcgcacggctggagcggcggcggcgacggcaaagctagggcacacggcgctagagttcttccggcgacgagaggcgaaggcgagggtggctacgggtagaggagacaccggggaagcttttaaaggggctcggaggcggcggcgaaggcccacggcggcggcaacggcgaaggaaagctcgcggcttgaaggaaagaggccgatccgaatcgaactcgaatccatcgatttccgaaccgatctagccgaagcttccaaagaagaaaaggtagaggagatcccgaggatcatttcccctcttttgattcggccggagaaggaaaggagcggccgaatttggaaaggaacggcggcggtggcgcgctagggtttcggccgggcgacggcggctcggggaagacgaacctgacaagcgggacccacctgtcagcgacagcgagggcgcgcgcggctgcggactgggccgacttgggccgaggagagagagagcggttttgggccgactttcggcccaaagccaaaagaagacttt

SEQ ID NO: 69696 - DNA, 895 bp, Oryza sativa
  Clone ID: PAT_MRT4530_70340C.1
ctctccctcccccggtggcgacgaggacggtgcccgccaactgttcgatgtaatgcctccctcgggtagttgcatgatcgacttttttgcttgcttaccggcgtatcatgtttggtagttcttgacatctccttgaggtgcttttaccgcattagaagaatttctctatgaacatctaaaaataggatgggagttttcggtgctctctccaaatattccttgggaggtcgaggatatatggagaacatttgcagcttatttctttatctttcatatccctttcagctttggagggcttggtgtagtggccgaactgctacattgcccttcacttgatccactcaccacagtttcttccacggtcgttcttcaattgacagagcttactttggctttagcactattgcagtactccacgaaaaaggatcataaactttgggccttctttcaagggaagctttatccacaacacagctgggtaaaagaaactgtgctaggtttgatatttctgatgaccgtggtttcactcacaaccgtagtagctgacagattgataggtcttgaggatacatatgatcctatgttaagggaaatactttctgacagtccaacctctaggctattgtgtgttttcctatactgtgtgattgctccattgtcagaagaaaccatttaccgtggattcctcctaacagccctgtcatcctcaatgaaatggaaggatgccgtaattgtcagttcactcatgttcagcatagcacacttctccataaataattcattccagttgtttgtcatcggatgtatcacagggttagcttattctcgaactggtacattggcagcgccgctcaccatccattcattatataatgctgcaatattgcatatgact

SEQ ID NO: 69697 - DNA, 252 bp, Oryza sativa
  Clone ID: PAT_MRT4530_70341C.1
cccacgcgtccgcccacactgctggcactctactcgagcgactttagagcgaatggttctttaccagatgatgatgaaatgtcaatatgactgatatctatgatgactaaactctcatgatgcatattatgatcaagctcttgatctcaatggagatatcgggaaataaagacggtgcctgggatatcgtatatcatgactggctcgatgaggcatccatgctgatgactgattgactggatcatgctcgat

SEQ ID NO: 69698 - DNA, 2397 bp, Oryza sativa
  Clone ID: PAT_MRT4530_70342C.1
atgcgtctcccgcccgtccgcttcctgccgtcgagcgcggcgccggcggtggtggcggcgaacgcgcgcatagcccacctcgcccgggcggggaacatcgagggcgcgagggcggccttcgaggccatgcccctccgcaccaccgcctcctacaacgccctcctcgccggctacttccgcaaccgcctgccggacgcggccctcggcctcttccgccgcatgccctcccgcgacctcgcctcctacaacgccctcatatccggcctctcgctccgccgccagacgctcccggacgccgccgccgcgctcgcctccatccccttcccgccctccgtcgtctccttcacctccctcctccgtgggtacgtgcgccacggcctcctcgccgacgccatccgcttgttccagcagatgccggagcggaaccacgtctcttacaccgtgctgctcggtggactccttgatgccggccgtgtcaacgaggctcgcaggctgttcgacgaaatgcctgacagggatgtcgtggcgtggacagccatgctgtctgggtactgccaggctggtcggatcactgaggcacgcgctctgtttgatgaaatgccgaagaggaatgtcgtgtcatggaccgcgatgatctccggatatgctcaaaacggtgaggtgaaccttgcaaggaagctgttcgaggtgatgcctgagcgcaatgaggtctcgtggactgcaatgttggttgggtacatacaagctggccatgttgaggatgctgcagagctgtttaatgcaatgccggaacatccagtggccgcctgcaatgccatgatggttgggtttgggcaacgtggaatggtggatgctgccaagacagtgttcgagaaaatgtgtgagagagatgatgggacatggagtgccatgattaaagcgtatgagcagaacgaattcttgatggaggcactatctaccttccgtgagatgttgtggagaggtgtccgtccaaactacccatcagtcatcagcatactcacagtgtgtgcggcactggctgttcttgattatgggagggaggtgcatgctgcaatgctgagatgctcctttgacatggacgtctttgctgtgtcagcattaatcacaatgtatataaaatgtggaaatctggataaggccaagagggtctttcacacgtttgagccaaaagatattgtgatgtggaactccatgatcactggttatgctcaacatggattgggggagcaagcacttggcatatttcatgatatgaggttggcaggaatgtcgcctgatggaattacttatataggggccctcacagcttgtagctataccggtaaagttaaagaagggagggagatttttaattctatgactgtgaattcttccatccgacctggagctgagcattattcttgtatggttgatttacttggtcgatcaggccttgtggaggaagcatttgacttgataaagaatatgccagttgaaccagatgctgtcatctggggagctctgatgggtgcctgtaggatgcacaggaatgctgagattgctgagtttgctgctaagaagctattagagctagagcctgggaatgctggaccgtatgtcttactctctcacatttatacatccgttgggaggtgggaagatgcttctaagatgcggaaattcattagctcaaggaatttgaacaagtcaccaggctgtagttggatagagtacgacaagagggtgcatcttttcacatctggtgatgtattagcacatccagaacatgccgctattcttaggatattggaaaaactagatgggctattgatggagtctggttactcggctgatggaagctttgtgcttcatgatatagatgaggagcaaaagtctcatagcttgcggtatcatagtgagagacaggctgtggcatatggactactgaaaatcccagaaggaatgcccattcgtgtcatgaaaaacctcagggtttgtggtgactgccattctgcaataaagttgattgcaaagatcacttctagggaaatcatactaagagatgccaatagattccatcatttcaaagatgggttttgctcatgcagggactactggatccaggtttcaaaacgtccatttgaccgtgaagtacaccatccgttgcaggctaactgcatctggtcaattgtcctgtcgaggagttgggtttggagtggagttgtgaagctgtctaaatccagctgcacctctttagttcattttgtgagagcacttcagccagctccacccgaagctccactaccttttcgggtggagctgaaaccgtttgattgggctccagctccaggagaggtggagctagagccaaagctgtgccaaacagaccctaagtaa

SEQ ID NO: 69699 - DNA, 679 bp, Oryza sativa
  Clone ID: PAT_MRT4530_70343C.1
acgaggagtggtcagcatcggtattgtgctctctcattaggggggtgtcaattgaatttcatggtagccatagacttcacagcttcaaatggaaatcccatggcttccagattccttgcattacatcgaacccactggtcggccaaatggtttttggcacgcagtactggaaacagagatgcactacaatgctatgaccctgctaagcgattccccttatgggggctttggagctagacctattgatgtcctgtttcctatttccactgtttcaacctgaatggcagcatctatcaacctgaggttgaaggaacacaagggattatgtcagtttatatcagtgcacttcgtaatgtatcattggctggccaacactattttgtccagtaattagcactactactgcaatagcaaaccaatcacttgccatgaatcagcagaaatacttcgttctgttaatagtcacaggtggtgcgatgactgatttgcaagagactattgatacaatcataaaggcatctgattttccttcgtccattcttgttgctggagttggtggagcggacggaaatggagataatgggactggaaagttgcttgcaatcatatgactctctggtttctattaatttaaaatatgatgttaatgtactctttgttcgagcattgtagtagctgt

SEQ ID NO: 69700 - DNA, 684 bp, Oryza sativa
  unsure (1)..(684): unsure at all n locations
  Clone ID: PAT_MRT4530_70344C.1
tttctgtggacaggagtgcagcctgatgctgatacaggtaaactggtgtacctataattatacaagtcccgggctgcagccctgcggcgcgtggcacaagttgaacctgttagcagtggcatcaggttgccattggcatcttaatgctgcttggcgctgatacgtactctttctgttcctaaatatgtcctgttgggtctgtgatagtgtttcacaattttaaacttctactcttagtacataagagtacttttattggattttgtcttnttcagaaatacttccacaacatatatatgcatattattattttttttacaagatatcatatgattatagtaaaaaaaaaattagccaacacattgtggatatagcgtactgtaatttatacaaaatactgacttatatttttatactgaaggagtatttagtggaggaacaataggaattaggactctttagngcggagtggctttcttggaggcctgtcttcttcgaaactcgaaattcattttttcaaaagaaacagtagttttgatggaaaaataatcttgcctgtccaaactgttgtattgatttgacaaaacactgaaacatgcttatgtgctaatttgcagtctatgctgcagcagttgatatttaattttgtctcctattctccttcgaatgggagtcttggatcca

SEQ ID NO: 69701 - DNA, 540 bp, Oryza sativa
  Clone ID: PAT_MRT4530_70345C.1
cagacagagttagctgcagagaaggtgggggaaagactagttgggacttgggagaggatggcgaccatgaaagccaaggccgaggacgcggcatcctccgccaaggccggcgtccacaaggccaaggccaccgccggcgagaaggtggagaaggcgacgacgggggacccattgaagaagcgggaggcgtaggagcggaaggaggacaggaagctggaggcggagtccgacgagcgcgtcgagaaggagggccacgctgacgagaagtccggcaagcacacctttaccaccgccacggggcctagcccgaccgccgggccgtttctgggctttcctactagcacgctgggccggcccggcctggccaggcccggccggcacggcatggctcgatcgctggtggatcgtgtctgggctggtggtcgctggtctagctcatgggctggcacggcccggcacgaagtggagaccagctcatgggctggcacggcccagcacgaagtggtgaccgtgccgtgccgggcaggccttatgggctag

SEQ ID NO: 69702 - DNA, 222 bp, Oryza sativa
  Clone ID: PAT_MRT4530_70346C.1
atgaaaaacttgttgctggtgggggtttctgtaactatttgggccatatgcaagactaggaacaaagcttgttttgataatatccttcctaaagaccccattgagaatttggaggcaaacggaagaaagttggagctgggagccagagtggtaaagcaggtggcaagtgatgttttcaattcaagatacggttggagaccttgtgttaaaaggctggaatga

SEQ ID NO: 69703 - DNA, 342 bp, Oryza sativa
  Clone ID: PAT_MRT4530_70347C.1
atggagaggaacatggagcacttggaaagagacgttcaaatcaagatggagggcgaagacgaacctaacagtacagtacctaaagctcttataccacttgatggcaactggatgcccgatcttttgtcaggtgaagataactatcgatttggtggaaacttgacacacaagatctggcttctgatcaagacgatgcaaaccctacaatcgcaacacaatgtctcctttggttatcaaccatgccgaaacctgattgacctcacgagaacggtaatccttacatgtgaatcgaagaacacaagcaagaacaagaaaaacaggaactcaattctagatgaatga

SEQ ID NO: 69704 - DNA, 456 bp, Oryza sativa
  Clone ID: PAT_MRT4530_70348C.1
atggcggcggcgcactttgtgttcgtcccgctcatggcgcagggccacctcataccggcggtcgacaccgcactgctgctggccacccatggcgtgctctgcaccgtcgtcgccacgccggccacggtggcgagggtgcgtacccaccgtcgaattggcccgacggtccacctggaggccgtgctcgaggagaagtctggcgagcttgcattcccgaggacgaggcaggtgttcatgctgaacaacacgcacgccatcgtgcgccacgccgtgcgctccaacctcgccatgttcctgccgtcgggatgggcacgtgcctgggaggagcgcatggagggctacgtcaagagctacctcgacatgtcgtgggcgcccatcgtatcacgcctcgccgccggcgccgccaccacggcggcgacaaagccagccaccgtgagcgtgctccggcggcaatga

SEQ ID NO: 69705 - DNA, 281 bp, Oryza sativa
  Clone ID: PAT_MRT4530_70349C.1
atatcactcagggtttctggctagataaaaaagtgcaccatccatctgatgagcttcttgttacacattccataacctcgcaagatattgtcagcctatcgaaggccatatacaaacaaagcccatactgcggcagtgccaactttcaaactgacgaacactgttctttgtgtttgcgtaccaccaattgccctccgggtgggtgcatcttatcacgcgtaccggttttttggtgcgaagcattgagggcagccatattcatcatgctgtgattcgaaagg

SEQ ID NO: 69706 - DNA, 1149 bp, Oryza sativa
  Clone ID: PAT_MRT4530_7034C.1
atgttggcaacagcctttcaaaaatcacagaatgggaacagcccagcaggggaaacaaacgttcaagcccttacagtcaagcaccagtgcaagttatcagaatttctcaaaacggggcttccaacctttgccattgccgtcgatcctatggaagccagtgattggttgcgcacaatcgagaagaagctagggttgattcagtgcaccgaccaggagcgggttggcttcgcaactcatcagttggttggaccggcttcagagtggtgggatagctacgaagcatcacggccagaaggacataccatcacctggaacgagttttcatctgtattcaagagatcacatgttcccgcaggaatgatcacactaagaaaacgagagtttcgctacctgaagcaaggagatttgaccgtcacagagtacctgcacgagttctatcgtttggctcactatgcaccagaagatgtggaaacggatgaagacaaacaagagaagtttctccaggggttaaaagatgagcttgcagtgcaactactcctagaggattatgaagattttgagaaacttgtggacaaagccatgcaactcgaaagtgagcataatcggatgacgaactgcaagagaaggattgtcaacatcccagtaattccatgtggtaaccaaagacagcgcactgagccacttcagatcaccggatcttctgttgtgcatcaagagttcctgccccaagaagacggacgcaatacagacaacaaccctagcaatactaatggtgatgataccaccaacaaccatggttcttgccccattagtgaccactcgaatcaagcgtgcaattttgacactgagaaagactccaattgtgatagcaactacggtaccactgatgccaatgttagcaaggatttccaaccaccaattccaactcctagtcagaacgatcgttcccagacggacaactcagcaaagaagacgttgatttgttacaactgcaaagaaccaggtcatttctctagagattgtccacagccgaagcgtaacctgcgccatcactccggccattatgcaagaagaagacaggtcactcgccttgtggtcactggagcaaacgccgtacctgtgaggcctcatgttaattctaacccatag

SEQ ID NO: 69707 - DNA, 1368 bp, Oryza sativa
  Clone ID: PAT_MRT4530_70350C.1
atggccggcgtgggcgtggtagtagatccggaggcggtgggcggcggtggagatggaggtggagatgggcggatgaaggaagggttggcgcggcgggcggtggaaaacctgaggttccggtcggtgtggggcgaggtgaacggcgccatgggcgacctcgggacgtacatccccatcgtgctgtcgctggcgctgtcccggcagctggacctcggcaccaccctcgtcttcaccggcatctacaacgccatcaccggcctcctctacggcgtccccatgcccgtccagcccatgaagtccatcgccgccgccgccctcgccgacccctccttcgccatcccggagatcatggccgccggcatcctcaccgccgccttcgtcctcttcctcggcctcacccgcctcatggacctcgtctaccgcttcgtcccgctctccgtcgtgcgtggcatccagctcgcccagggcctcaacttcgccatggccgccgtcaagtacatacgctacgagcaggacttgggcaagggcaagtccctcgggcggcgcccctgggtgggcctcgacggcctcgtgctcgccatcgcggcggtctgcttcatcgtgctcgtcaacggggccggagaagagcaggagcagcgtcagcagcagcagcagcagcaacagtggtggcgtcgtcggttgggttccgttccttcggctgtggtggtgttcgtggtgggcgttgcgttcgcggtggcgcgtcacccagcggcggtgagggagctgcgcgctgggccgtcgcggatgcgggtggtgcacatctctcgggaggcgtggaagcaagggttcatcaagggcgcgctgccgcagatcccgctgtcggtgctcaactcggtggtggcggtgtgcaagctgacgcgcgacctgttcccggagcggaaggagtcgccgacgtcggtgtcggtgacgatgggagccatgaacctggtggggtgctggttcggcgccatgccgtgctgccacggcgcgggagggctggcggggcagtacaagttcggggggaggagcggcgggtgcgtggcggcgctgggcgtgctgaagctggcgctgggcctgctgctgggcggctccatgctgcgtgtcctcgtccagttccccgtcggtcttctcggcgcgctgctgctgttcgccggagtggagctcgcggcggcggcgagggacatgtccacgagggcggaggcgttcgtgatgctgctgtgcacggcggtgtcgctggtgggctccagcgccgcgctcggcttcctctgcgggatgctcgcccacgcccttctctacctcagggcctgcgcgctcagggaacgcatcgtctcatctcaaacggatttgtaa

SEQ ID NO: 69708 - DNA, 197 bp, Oryza sativa
  Clone ID: PAT_MRT4530_70351C.1
attcggcacgaggcctcgtgccgaattcggcacgaggctctcctattgtttgcccacatatttttgtaacataatgggtttgccagttttctcatcaccacaaacaagaggagtggcatcagtagcatttctggctggttcattgtccttcttttggctccttttccctgcgacgagcccaaaactatataattcta

SEQ ID NO: 69709 - DNA, 306 bp, Oryza sativa
  Clone ID: PAT_MRT4530_70352C.1
atggtgctgtgctgtgccatggggctgggtcagctcaccgcccgcctgggggcccagtggcaccaacaatatctgccacccgttgctaggtcgctgccaatccagggcattgtcatattgtggagtagggacattccacaagttagtccatatgtctactttggcccaacactgctccagatcaagatggttcgtcatctcaacacgcttgtagcttgtgatgctgctactagccatcaccccgctgccactcttggggaagacaatttcctggggaagatgggggtcagggtgttccaccattga

SEQ ID NO: 69710 - DNA, 171 bp, Oryza sativa
  Clone ID: PAT_MRT4530_70353C.1
atggataggaggttggagacgacggtggtgggcggtgaggctggcgggtggggacgcgccccgtggacggagagtgcggtgcaggaggctcggtctaggcaggaggaccgcgctggtgggaggggtgagaaaggacacgggaaaggtggtgcgtggactgggtgcatatga

SEQ ID NO: 69711 - DNA, 552 bp, Oryza sativa
  Clone ID: PAT_MRT4530_70354C.1
gcacgagggcattaccaagttgataactacttaaatctttatttgcatgcatactgtcattatcaatggcgacatgttgacaaactctcaacaggagcatgcatagccctcttataaaattcgcaaaaacaaaaaaaactactctgcatgatcttccatgctctatgatcatctccatcatgtaacacaattagttacatcaattctttaaaaaaaataaaatttaacaggtgaaatttttaggaaaaacaacacgattagtagaagtacatgctactgtgtgacatgccaaattaagatgcaaaatcagttgctggccggggtccgtacgagtgataagagggcaccactgcatgatgaatctggatggactggtgtggtaccgaatcgcattgcatctcgcatgtgttgtggcagcagctagatagttagaattggtactagcctttttttttcacatttcattttttttctcttttgtgcatgtgcaacaattaattggagatataggagtactgttggcactgtagtgggtccagtatagagaggaga

SEQ ID NO: 69712 - DNA, 1007 bp, Oryza sativa
  Clone ID: PAT_MRT4530_70355C.1
atgttggacccaagatcggaaatctaccccaccatagcgtatcgtcctatccagccttccgatctcgaggttcttgagaatattcacctcgcgctgtttcccataagatacgagagagagttcttcttgaacgtggtcaacggcaatggtattatttcttggggtgctgtggataccagcagatcagatgaccgcagagatgagctgataggctttgtaaccacgagaataattgcagcacaagatagcgagattgaggacttgtttaggtataacagctcacgcaaagatctgacacttctgtatatcctgacgctcggtgtagtggagagctacagaaacctcggcataggttgttacctgctcgtccaacttagttttacagtttgtgattatgatctgattaatcctcacaagcattcgcgcttgcagcatcctcactggtccgagaggggtgtctatttgcatgtcatctcatataaccaacctgctatcagcttttacaataagatgctatttaagcttgtcagacgacttccacatttctattacataagagggcagcattatgattcatacttgtttgtgtactatgtcaatgggggccgttcgccttgctcaccactggaggtcataacttcatttgttgttgacttcagggctttcctgaagatggtggttgccaggttctggaacaaagaggagagaagtacacccagatggtccaggtgcaaggaatcgaccactctcttggtatctcagaataacaagaggatcattggtggtgatgatacgagatgtcatgtctaactttaggtgcagctgggatgttgttttctcttgtttttgtggaaacctcagtttgttttaaaccgtagcttgctacgttgttgtatctgataagttagcaaaccaggtacataatttctcgatagtcatagtcacattcatttgtaaagagaggaaaactgaaaggagagaaataaatgtcacctgcttcttgtcaa

SEQ ID NO: 69713 - DNA, 110 bp, Oryza sativa
  Clone ID: PAT_MRT4530_70356C.1
ctattcataggctctaacttataaatttaccttttacaaccttggtcgttgtataatttaaacattggaaaatattttcactttaaccctaatacggcaggtattatcat

SEQ ID NO: 69714 - DNA, 419 bp, Oryza sativa
  Clone ID: PAT_MRT4530_70357C.1
gagcgggcgctctttttttttttttttttgttgggggaaacgagtgaaagggttatagctagaacagcagccttttcttcatagtgcttagtgatcacagcaggcactggattatcatctatgtgagactaatacccagattgcccagcccaaagacaacagaactggctggccacaaagccctcccaccacaaagatccagtgttaagctacggtgccccacttcactagaacggggacgaaactggcggcgtacgcccaaccgttgttgtggacggggtcatgcaggcggccggcgaggttctagaggaggcccttgccgcagacgatggcctggacgaagaatccgaacatggagaacatggcgaggggtccgtacttgatctacttcacctggggctgcgccaacgcctcagact

SEQ ID NO: 69715 - DNA, 528 bp, Oryza sativa
  unsure (1)..(528): unsure at all n locations
  Clone ID: PAT_MRT4530_70358C.1
aggttatcagatgaccgcagagatgagctgataggctttgtaaccacgagaataattgcagcacaagatagcgaggtatgacatgcaagattgcatcgatcttactgatgagctcggtggaactaataatttggcttgcagattgaggacttgtttaggtataacagctcacgcaaagatctgacacttctgtatatcctgacgctcggtgtagtggagagctacagaaacctcggcataggttgttacctgctcgtccaacttagttttacagtttgtgattatgatctgattaatcctcacaagcattcgcgcttgcagcatcctcactggtccgagaggtgattaaatatgctgcaagtatctcaaattgcaggggtgtctatttgcatgtcatctcatataaccaacctgctatcagcttttacaataagatgctatttaagcttgtcagacgactttcacatttttattacataagagggcagcattatgattcatactngtttgtgtactatgtcaatgggg

SEQ ID NO: 69716 - DNA, 201 bp, Oryza sativa
  Clone ID: PAT_MRT4530_70359C.1
atggccatgggttccatcaaggtgcaggccgtgatcctcacctacgtcctcctcgccgtcctcctccacccgctgctctgccagggctcgccggcggcgtctctcctcgaggcccagaccagcgacggtaaaacgatcgaccagggcatcgcgtacattctgatgatcgtggctctcgtcgtcacctaccttgtcggatga

SEQ ID NO: 69717 - DNA, 6157 bp, Oryza sativa
  Clone ID: PAT_MRT4530_7035C.1
tacatagaatttacgtagttggtcaatgttctaagagtttgccaactcgcggccatcgccgtctgctatcttgaatgcacctggtcacaagacttgtgtgatcgtgtaaggtccttcccatttgggtgagagcttgtttcgccctgcttggctttgaacccatcggaggacgtagtcgccgatcgaaagtatgcgtgctcggatgtgcttctcgtgataatggcggagggcctgttggtaactggctgctcggactgcaactcgttcgcgatattcctcgagtagattcacatcgtcgtttccctgttcctcctgatcctcgtcggaatacttctgtactcgtgtactttgatatcgtagctcgctggggagcatggcctcagagccgtacacgaggaagaagggtgtttccttgttagacgtggtcggtgtggtgcgtacggcccatagtagggtcttgatcccttgtagcactatgccgtttgccctctcgacttgtccgttgctttgaggatgagagaccgaagcgaagcatatcttgactcccagcccgatgcagtaatcttggaaatcggcgctgatgaactgggagccgttgtcggtgatgatgcgatgtggtagtccgtatctgcaaaatatccctttgataaatttgatggcgttgtcggccttgatttcccccgtgggtatcgcctcgatccattttgtgaatttgtcgatcgccacgaataggaacctgtagccgccctgtcctcgtgggaatggcccgagtatatctagcccccaacacgagaacagccaagtaagaaggatagtctggagcgcttgtgtgggtagctttgtgtgtttatatgtcgcatgcatctttgagggcggttggctagaaaaacccttgttgaaaagcattcccgaccaacgtccgaccggcggcatgtgacccacagatgccttcatgtatatcgaggaggaggtgtctaccgtcgtcggacgaaacgcatttgagaagtaccccgtttggcgctttcttgtatagatcgttgccgattatgcaatagatttttgttttacgggttattttctcagcctctgcgtcatcctcgggcaactcatcgctgttgatgaatttgatcagtggggtgcgccaatcgtctgtggtttcaatatcggcaacgacgcgttctgcctctgtggcctccgagctgatgtcgggggcgtctaggttaacgtcgccgctgacctcttttactgatggttttgtcaggacgtccagaaaagtgccgggttcgagcggttctcgtctggacgcgcgccgtgctagatcgtttggctcgatgttgtccttgcggtatacgtgtcggacttcgatcccatcgaaccttttctccagcttcctgacttctgcgagatacttggataactcagggttagagcatttataatctttgtgcacctggtttgcgactagttcggagtcccctttcacgatcagtcgtttgactccaagtgcggctgcagctcttatcccggcgagtagtccttcgtacttggctgtgttgttggttgccctgaagttgaggtggattgcgtgcttgaattgatctccggaaggagatgtcaagatgaatcctgcccctgctccttggctgttgagtgcaccatcgaacgccattatccacgtttcattgtcgatttggttgtctgatttgttatcaggcatagtccagtcagctacgaagtcggcgagcacctgggacttgatggctgttcgtggcacaaagtggacatcaaactggcttagctcgactacccatttcgcaatgcggccgacaacgtctttgtttctcacgacttcgccgagagggaaggaggagacaactgtgactctgtgggcctgaaagtagtggcgtagctttcttgacgtcatgattactgtataaagcagcttttggatctgaggatatcttgactttgcgtcgtggagagcttgcgtcgtggagagcttcgctgacgtagtagactggtcatcgtactttctctctctcgacgacaatgacggtgctaacggaatatggcgtggcggcaatgtagaggaataattcttcattaggttggggagcaacaagtacaggggggtttgataggtagcacttgagtgcaataaatgcctcttcggcttccagtgtccatacaaatttgtcttgcttctccagcagagcgaagaagggttgtcctcgttctcccatcctagcgacgaacctgcttagtgctgccatgcatccggttagcttttgtactttcttgagtcttgtgggcgacttcatgttctcgattgccttgatcttctcgggatttgcttttattcctctgccagagacgaggaaaccgagcaacttgcccgacggtactccgaacgtgcacttcactagattgagcatgaggcggtatcattagaggttgtcgaacgtttcccgtagatcgtcaatcaatgagtcgcttgtcttggtcttgacaacgatgtcgtcgacgtattcctcgacgttgttgccgagctggttgctaagcgcgccctggaccgtgcgctggaaagtattccctacggttatcagtccgaaaggcatcttaacataacaaaataccccgaacggcgtgatgaatgctgtcttctcttcgtcctctttcgccatgctgatttggtggtagccagagtaagcgtcgaggaagctcaatagctcacagccggctgttgagtccaccggttgatctattcgatgaagagggaagtgatccttgggacacgccttgttgaggtcggtgaaatcgacgcacatcctccattttccgttggcctcccgcaccatgactggattggctagccactctagatggagcacctctctgataaagccagctttgagaagtttgtcgagctcttctcatatggcttgttttcggtctggtgcaaatcgccgcagtctttgctttactggcttcgcatcgggtcgcaccatgagtttgtgctcaatcacctccctagggacccctggcatgtcggacggctgccaagcgaacacgtcagcattgtcgcggaggaaggtgatgagcgcgagttcggtcttgttggggttgccactagtgagtggaacgatcttgatcgcgctgtctggtttcggcatcttgtttgtcttgctcactttcttgggaggctcagttgtggcgggtgggctgggcgtttgctcgaccatgtcgaggctcgacttgtcgcattgtaccgctagcttagcgttcccttgaatagtgattgttcctttcggtcccggcatcttgagcacttgatatgcatagtgagatgcggccatgaacttcgcaagtgcagttctcccgatgatggcgttatacgctgtatcaaattcagcgacatcaaaggtgatctgctctgttcggaagttgtttgcttgaccgaaagtcacaggcaacgtgattttgcccaatggtttggacgaggactggggagtaattccatgaaagggttgatcggtaggtgtcaactcgcttcgtgggattcccatcgcgtccaaggtgctggcgaaaagaaggttgattgagctgccaccgtcgatgagaactcgcgcgaccttgatgtttcgaatggtgggctcgaccacgatcggattgcgtcgctgtggagcctccgaaaatgtgtgagacgtggaggtcggagtctggatatgctgagtctgattcctgagcagccgcctccacatccttttcgaccacgcgtactcgcttgcatttttccaacgccatatgtttcttgagcgacttcttcaaaacgaggcagtcttccaaagagtgtctatccgtcttgtgtattgggcaccatgctttctttgcgtcgctaccctgtgggtctaggcatttggatgggttcgcgtattctgctgcgagaacttctgcttgagcttttcttttcccactcttgcgactttaactctagtcgtgatgcgtcttgtcgccaactcctgggtggtatagcgatctcggactccagacttaaaggcgcgaattacagaagcgtcggtgatctcagggattgtattcctgcactcgttaaagcgccgaacaaattcccgtagggattcacccgagttatgtgtcaacgcatgtaggtcatcttcaatcgcgtggcgcttgtaagttccttggaaattggcgatgaactgctgccacaggtctgcccacaaagaaatcgagtagggcgggaagtgcatcagccatgagcgtgtagagccttttaatgcagatggcaaataatttgccaacgcgttgtcgtccgctccggcagcatagagtactgtggagtagacttgaaggaattcttctgggtcagtactcccatcgtacttctctattgctccgggtcggaatatctcaggccatcggacatcacacagggaacgaccgaaagctctacatccagcgctgggggcggtgggttgtcggcgatcgtgtgtccttcgtggatgtctgtctgacgatgaggatgaataagaagatgacgatgacgatgaatcgcttggttccggtgtgggattacggggtcgtcggctgggttctcgagaatcctgtcgtcgccctccgttgttgtcccggcgccgatctccgtcgtcctcgtcgttatggcggcgtcctcgaccagtatcgccctgcgtacgcctctcgcgatcatcatgatcgtggcgattgtggcgattagcgcggtctcggtgatgtcgggaagagacgcgatgttgggagcgattcccgtcgtctcgcatgcgccgtgcctctcggcggccgttgagatggtcacggagatcgccggtgccacgaggtggaggggtagcttgatggggtgactcccgctgttcgggattttcgccatcgacaccgccggttggtggttgttcccggtgcgtagcagcagcggcttctttgaacgcgtggctgaggttggttactgattcccgtagccgttcctgccaccacgcgagatcattgttcagaacgggatcgtaaggtctctctctcagtattgtgttaagggtcctgatgtgctgggccggtgtagtcacttgattttctgcctccgcattagcgtgtgctgacgtgctggtcccgtcgatagctaatacctcgcgtggcgtactcgttggagatgagctgtagtcctcgagtagatgcaggactgatggttcgtgggaatcgatgtcgattacgccgacgaatcgatctgagaccagcgttcgttgttccttgtcttcatctctaagggatatgcctgactgttggtccttaggaggtgacgtcttcgtggcgctgagaaagaccttgcagcttgagaggtcgtgattctttgtcttgtgaataggacagtaaacatcacgcgttggagaaatacgctgaattccacgctcgttgcaagcgcgaatttcggcgcggacgttgagaaaaacccagcaggcttgcaaagtgtgtttcctggttttgtggataggacaccaggaccttgtcgcttcagaagttgttctcgtcggctcgtggttcttgtcggaacaacaaggttcggccgcattagaatccttctcgagcttagatgttgtcgacgttctgttctccgcttcggcgggaggatccttcgacacggagtcgtcttgggttgcaaccactgcgttctcgtttccggtcattgacggaccggctgagatcggtatcgtggtgtaaaccgggaagacgatttcaccgacttgagtccacaccaacattgttgaagcaggaaacccgtggttgaggttggtgttgacgctgttgtcaacgaagctggatgacatagtagtagaaccttgagcaccaagtccccctacctggcgcgccactgtcgacgggtgatacccgtagaccggatatagagggtattggggtacgttggtacaaggatttcgtaggctgtgggggtggtgttggctgtgagattcgatgccttaggtcctcccagggagtcccttttatatcgcagatcaggtggtctccaagtagaactcggagacatcggacctcatttcgtcctataaaaaccaacctagcactggatttggcatattctattactatgaattttgac

SEQ ID NO: 69718 - DNA, 320 bp, Oryza sativa
  unsure (1)..(320): unsure at all n locations
  Clone ID: PAT_MRT4530_70360C.1
attcggccgatnaanggacancgtgtgcactcancgcggctcctccgcctccgcctncctnctccnctctacctggcttcccacttcagatcnacngcgcgccccagcactttgttaggaaccgtcgatgtngnacnancagnagnngnggcaggagcaccagcgcanngacatnggcgccggaagcttcgtggtgancgagncgacnacgntggtgntgtccccccggatacgtccgagcnngaacnacnccgccaacatcncgtcggtggcnnggnacatggacgctgccnnctagaantgctgatacatacgtaaat

SEQ ID NO: 69719 - DNA, 480 bp, Oryza sativa
  Clone ID: PAT_MRT4530_70361C.1
atggccacgacacccccgcgcgcactgcagcagtcgcgctcggtcgttttcagtagtggtactactcgtgggcgcaacgttacgtcttggcatggcgtccggcggagagggagagagagagagagagagagattcccgtggccgttgagagagacgcgagaggaagaggaggagatcgtggaccacctcgtccccccgtacgtgccagagcagagcagatgggatccgtccgatcgagagcgacgccgaaacggaacggacgacctgcgccagtgccaggcccccggcaagtcgcgcaagtgtgcagcaacagcttggttctctgcgcgtggcgtgcgtggtttttgctggttttcgccgcgattccgcgccggtctcgcggcggcggcggcggcgtcggcgtacgtggcgcgaggggagaggaggagcgtggcggccacgggcgccatacattccacgggggggggggggggggggggg

SEQ ID NO: 69720 - DNA, 488 bp, Oryza sativa
  Clone ID: PAT_MRT4530_70362C.1
gagctatgacgccggatgcacgcaacgacagctcgcaacctctggtgcaggcgacctacatttttggccagtggaatcacctgaaacaaacccgtgaacgctttgggctggagatggcccggcaaaccctaattgatgaactgattagctacagcagacaccaaggctatcaaacccaagtggcattccatgctcagtaccaacaaagccctgctagccaagagcatcccagcccccacctttccatccactacactgactggctccagactgccgatacgctcattgaaaagcggagggcccattatcgccgtcacacctatgagtatgccggccggctaattgtcgtcacctccgatcgcgctcaggtaataaccgtgggggggcaccgcgcagaatggatgtcggcccaactttttgcccaggaggtggatcaaaggcgagctaaaaggtcgcaacaggctaaacagtacggtgaaaagagtcaa

SEQ ID NO: 69721 - DNA, 444 bp, Oryza sativa
  Clone ID: PAT_MRT4530_70363C.1
gtcaaggcttccattggggatattcataacagagtaacttcggcgttggcgttcaaaacatatttctgaaaccgtctgtcatgaactcctcatattctctcatgcttcttcacagcaatcatctagggaagtcaaactgtacatccttcttaacatatatgggggtggattttttaattaattattgtgaagtggaggaaggttagaaaataatatgtacaagtaggaccgtaccacataaggccctttaaatgcaccatgctcaaaatcttgttcacttgggaagttatctgcgatgccttgcgatgactgtaatgtttgtttgcttgtgagctgtgactttatctctgacttgttatttttgactgctgaattcaccacttttgaactgaaggtgtcaaacggagatccaatgattttgaatttttaaccaagatctatgtc

SEQ ID NO: 69722 - DNA, 879 bp, Oryza sativa
  Clone ID: PAT_MRT4530_70364C.1
atgatgcgtttgaagaagaagggtacgatggataatactggtacgcccaagaggacgaggtggtcggagaacaaggctcagcaggacgggaaagatgagacgaccaagctgacctactccatcgagcgtgacgcactggagtgtcccatttgcttcgttccttttgaagatcgagtttacatgtgcaagaacggccacgctgcgtgcggctcctgctacgccaagatgaacaccatgtgcccgtgctgcatcgagcccatcggtaacatccggtgcaggccgctggagaaggtgcttgcggccatgtctgctccctgcaggttcagcacgagcgcctacatgaggttgatcagggcgagcggctgcacggagatcgtcgcctacaccgagaggcggaatcacgaggcgtcgtgcccacacgccccgtgtgtctgcccgttcgacggctgcaactaccagggacacttgctgtacagccacatccaggacgaacacgccacggacgccgccgtcgtcgccacaggctgtctccggggcaccggcaccaccgtgacgctgcacaagagcaagccgttccacgtgctcctccaccgcggcggcagccgcgtcttcctcctgctcaacggcgacaacgtcctgtcgggccgctcgctgtcgctggtctgcatcagccctcctcccccgttgcccaactgcgagctgctgtacaagattgagcttggcgccgtgtcgcgggcccccggcgagctcggtctgtccatgtcgggtaccgtcccgtgcgtccgccggctggaggggttcgacgcgaaggcgttcctgttcgtgcccgattcttactggggctcgtccggcaccatctctgtcaccgtgcacctctga

SEQ ID NO: 69723 - DNA, 378 bp, Oryza sativa
  unsure (1)..(378): unsure at all n locations
  Clone ID: PAT_MRT4530_70365C.1
tacacattctgggctgcagggaggggccgggacttcagcttcctgggccctgtcctagttcgcctgggtgggtgtgctggtcgtgtttgcgttcaggtcagaggcggattcccgctgggcgaggatctcgcagatgatcgatggcggnatcgcgtcgcgcgtcttcagtggctacatncgctacgacacggacgacatcgtcaagcgctacacctgcgagcagtacgtctgggccgcccgctgccgctacctcgaggtgatcaacctcttcctctccctcatgaccctgttcagggcagccgactgaggtcctcgcatcgcgtccgatcgngttcatatacgtgttcatcagtgaatgggaaaatgctctgcctttat

SEQ ID NO: 69724 - DNA, 226 bp, Oryza sativa
  unsure (1)..(226): unsure at all n locations
  Clone ID: PAT_MRT4530_70366C.1
gttagcttcaagcatacatggcagatncattcctatnttaaatacattagaattggcctagattatttatctncagaattaatctcatcctatcattatgacgatcttggtcgagtggctgactcattgctggatgatggttntcttgcaggcggtgatggaggcggcaaggtggggctnctggcgttggatgttgcactngcgttcccgcagccacgacgtncca

SEQ ID NO: 69725 - DNA, 189 bp, Oryza sativa
  Clone ID: PAT_MRT4530_70367C.1
atggcggtgcctgtcgctttgatacgcggcggcgacggcggcgagagcccgccagcccggcattcgcgggagactacggagtggccgtcgcagcaccagcaaactacactgacaacgatcagaaactacggctatcaatcagtagatgaagtggccgaaactacagtgcaaaacacttggcaagactag

SEQ ID NO: 69726 - DNA, 1053 bp, Oryza sativa
  unsure (1)..(1053): unsure at all n locations
  Clone ID: PAT_MRT4530_70368C.1
accgcatttaacaccaccacctcaaaacggcaactgcatgacctccaccacctccacctcctcctcttcactcccaagaactcgcaatcgccaccgccgccgcggcggcgcagcttgataccggcggcgcgagaggaaggcggaggagggagagagaaatgggcaactgccaggcggcggaggcggcggcggtcgtcatccagcaccccggcgggaaggtggagcggctctactggcccaccaccgccgccgacgtcatgcgggccaaccccggccactacgtcgccctcgtcatcctccgcatctccgccgacaaggccgcctccgccgccgccgcgggggacaacaagaccaacgccggtggagccaccggcggcggcggaggcggcgccaagatcaccagggtcaagctcctcaagcccaaggacacgctcctcctcggccaggtctaccgcctcatcacctcccaagaggtgacgaaggcgctgcgggcgaggaagaacgagaagatgcggcggtgcgaggccatcaggcagcagcacgagcagctccggcgaggcgacccgctcgctggcgtagccgaggaggaggaggaggaggagagcgcctccgacgatcaggacgggaagagggaccggcaccggagctccggcgccggcgcgccgccggccgccggcggcagaggccggcactggcggccgtcgctgcagagcatctccgaggccgcgagccagagcggcggcggcggcggcggcagcagcatctctgaatccgccgcaagatgattcccctgtttggtgctgtattgtctggttttcttttctttttttttctttcttcttcttttcttttttttcttttctctcttagtataaagtgcttggaagttggaactacctccaaaagaaagcagaaaaaattgtaaatcagagtaatcagagcaggatcaataggaaggaaagcttgtttcaaaaaaaaaaaaaaaaaaatggtgaaaaactgaaacttcagtgtgcaaaaaaaaaaaaaaaaaaaaaanaaanaaaaaaaaaa

SEQ ID NO: 69727 - DNA, 389 bp, Oryza sativa
  unsure (1)..(389): unsure at all n locations
  Clone ID: PAT_MRT4530_70369C.1
ggagacgatggggctccggtgtcaccatctgcccgagatggccacaggccagagcgagcagcacccacgccgccacagtcgttgaacagcacagcacgccgcncagcaccgtctctccagatgggggtggtgagcagcattcagctcggcgaggatgcagcagcgaggacggggaaccaggtgatggagagccgacagcccatgaagacgaggaacggcgcgtagcccgcccgccggcagcccgggagctcccgcggaggacgaaggcgacagccgacgccagcacagcgaacgggagcgagatccccgcggcggcgatggcgaaggcacgcgcccgctctagagnatccaagctacgtacgcgtgcatgcaacgtcatagctcttcna

SEQ ID NO: 69728 - DNA, 2427 bp, Oryza sativa
  Clone ID: PAT_MRT4530_7036C.1
gcacgaggcgcggctctccggcttcccccctccacgcgaccatcgtcgagtgttttttgtcgaagccggccgcgggacccccgcaggaggcacacacgccggactctccccttctctctgtctcgctccttcgttcgctcgctttatcccccccgaataaaggcgagaagccgcagcggcggacgaagaagagggcagatagaaatggcggcggagacgttcctcttcacctccgagtccgtgaacgagggtcacccggacaagctgtgcgaccaggtgtcggacgcggtgctcgacgcgtgcctcgcccaggaccccgacagcaaggtggcgtgcgagacgtgcaccaagaccaacatggtgatggtgttcggcgagatcaccaccaaggccaccgtcgactacgagaagatcgtccgcgacacctgccgcggcatcggcttcgtgtccgacgacgtcggcctcgacgccgaccgctgcaaggtgctcgtcaacatcgagcagcagtcgcccgacatcgcgcagggggtgcacggccacttcaccaagcgccccgaggagatcggcgccggcgaccagggccacatgttcggctacgccaccgacgagacccccgagctgatgcccctcagccacgtcctcgccaccaagctcggcgcccgcctcaccgaggtccgcaagaacggcacctgcgcctggctcaggcccgacggcaagacccaggtcaccgttgagtacctcaacgacgccggcgccatggtccccgtccgcgtccacaccgtcctcatctccacccagcacgacgagaccgtcaccaacgacgagatcgccgccgacctcaaggagcacgtcatcaagccggtcatccccgacaagtacctcgacgagaagaccatcttccacctcaacccctcgggccgcttcgtcatcggcgggccccacggcgacgccggcctcaccggccgcaagatcatcatcgacacctacggcggatggggcgcgcacggcggcggcgccttctccggcaaggacccgaccaaggtcgaccggagcggcgcctacatcgccaggcaggccgccaagagcatcgtcgccagcggcctcgcccgccgctgcatcgtgcaggtgtcgtacgccatcggcgtccccgagccgctctccgtgttcgtcgactcctacggcaccggcaagatccccgacaaggagatcctcaagatcgtcaaggagaacttcgatttcaggcccgggatgatgaccatcaacctcgacctcaagaggggcggcaaccggttcatcaagaccgcggcgtacggccatttcggccgcgaggatcccgacttcacatgggaggttgtcaagccgctcaagtatgagaaggcatcttcctgaggaagaagataaagatgatgaccatgagaggggggtctctctctcgctatctacctccattgccggccgttgtcggcgccgccgccgcctacctgatgtgtctttgatcagtagtgactggttgctccatggaagaagaagaagatgggaagatgatgaaagggttgaaatcgacttgcgaagttgctagtgatatcggtgtagcagccagagttttagtgttcagatatcttcggcgttttatccttttttcatttttttgagtcagctgaaactgcaagagagctctgcagtttgctctatcagtttgtcttgttctttttttttttcaggttgttgtgtaaccgcatctgtaatactgtctctttcaatatgaaggaaccatatgtgatactggcaccataattcatccaaaaaaaaaaaaaaaaaaaaaaaaaaaatagaaaaaaaggtagatttaagaaaaaccggaaaaaaaaacccaattgcggccgggtgcaccccggcggacgggggcgtgtccatgccggggtccgatgacggcgtggcgggcgtcgcggtggacggcggggacgacgacgccgtcggggtgggggtggtggcggccgccgcggagaccgtgacggcgagcttcatgccgccggagcagtggccgctggtgccgcagatgaagtagcgggtgccgggcttggtgagcgcgatcttggtgttctggtcgctgtaggactggatcgagttgctggcggagcacgcgctgtagtcagccgagctcacctccgccaccgtgtgcatcatgctgtactggaacacgagcgagtcaccaacgctgaaggttttgctcttcgcccaggtatcgtagtccacgccactgctccagccggatgtgtcgccgacggtgtagtccacggcgaaagccggcgcaacggcggcgaggagtagcaccaccagacctgcagctgcaagtccatgtactccagccatgatggcagagttaattagcaaacgcgaactgattagagccgtactagtactggtgaa

SEQ ID NO: 69729 - DNA, 355 bp, Oryza sativa
  Clone ID: PAT_MRT4530_70370C.1
gcgataccgacgagatcatagtcgagttggttcgactagatcacccggcgacttggctcttgtaggctctggcttcgtaggctgtggtgggtgtgttggcggtaagattcaatgccttaggtcctgctcggggggtcccttttataccgcgggtcagtcgatctccaagtaggactcagggatatcggaccccacacgatatggtaacgacccagttttattcgagtaggactccttccatctatggactccacttctatcacgtgatagatttccttaacgtacacaggaaatatccgtatacgcgcgggtataccatatcagtatacaacgtatattcaagaatagagagtat

SEQ ID NO: 69730 - DNA, 2025 bp, Oryza sativa
  Clone ID: PAT_MRT4530_70371C.1
atggcaggagggcccttgaagctgtggaatgcgtgggcaacacagatcctagttctattgagcctcacactgcagatcgtcctcctcctcttcgctgggatccgccggcgtgagtcatctgccttgctgaggttcttcctctggttggcgtacctgctggctgactccaccgcgatatacaccctcgggcacctctccctgagcagcgtgacacgtgaccacaagctggtggcattctgggcgccattcttgcttctccaccttggcaggccagacaacatcaccgcctatgcgctgcaggacaaccagctctggttgcgccacctgcagattcttgtcgtccaagttcttggagccgggtatgtcgtctacaagcgtcttattgttggtggagagaagacgattctcctgctggccactgtcttgatgttcatggttggcctcgtcaagtattgtgagaggacttttgcactgaagcgcggcgacttcagcagcatccggagctatgtcaaggagctaccgggtaagcaactccgttggtacagaggttacttgcagagtgaggatcattacaactccaatgatgaattccttctgcagcgcgcccactccctattccacatctgcaagcgtgggatagtagactcggtgatcaatgtggatatggataaaaccgaggctgaaatcacaagaaaattaatcaaccagatcaggaatccacaacagcccatggtcatgtggaaggtgatggagatggagttgtccctgttgtatgatattctctacaccaaagcagccgtgatccacacatggattggctacttaatccgagacatgacaccggttgccatcgtctcgtccttccttctgttccattttagtgatagcaaagatggccagaatgtggttgacatcactgtcacttatatcttgttgggtggtgccctcatgatggagatgacatccctgctgagcgcactagggtcgagttgggctcttgctttcctgtgtgccattccatggagctcacttcggcatgcagttttatgtgctggaagatggcaccggctccgccgagcagtcgtgacccttcgccaggttgtcatggcaatgaccggaggtttcctaggaagatcaaggaagtggtcaggcaccataggtcagttcaacatgctctacttccgtgctgcacagatccatgcaacgaaccgacggttcggcacgctagctaagaagctggggtgtgaggattggtgggacagcacttgttactcacacagtatcaagattcccaatacggtaaaggaacgggcagtgaaaatggtctcgaagcgtgctatcaacaccctgggcttgctcaggcataggtggggcgagctggcactagataaaaagaagtatcctaagctggtaggagatctggaggaatgggagggtgttgacttccacgagagcatcatcatttggcacatcgccaccgatctcatcctctgtgggagaaacaggtccagtaacgactcaacaaaaaagaaagaagttgaacgtgtccgttcaatcagggcaatgtcaaattacctcatgttcctccttgtgactcgccctgacatggttcctggccttccccagaactggttgtaccaacgaacctgcgataacctcgacaaaatatgcaaagagaatcgtgtgcaactcatttcttccggtggcagggcttacaacattgtgttcatggttctcatgaagttgatccggggcaacaataacaatagcacaacatcttatgggcttgagcagaccaacgaacttgccaaaatcctacttgggatgaaggtatcaggcaaattcgatccttcagttcctcgcctcacatatgcacatgggatcgctaagacagtgttaggttggaagtggttcagtgtaaaggtacatggaatatacacttccatagatcctctgatcagtgttggttccaaacagctatcagtgccaattttggaaccggcacaacagttgccgcacttatga

SEQ ID NO: 69731 - DNA, 932 bp, Oryza sativa
  Clone ID: PAT_MRT4530_70372C.1
gatataggttcatcaaaactgtgtcagattaaagtattctcagcacccttatgaaggaatcagacagggataactgtattttcacttgtgatttcatcatccacatctgaaaaaaaagcacaaagaatttaacaaaaatcacaaagcaaataaccttaaacaaaatcatatcaattgaggaatctatcagatcttcctattcaatatgaaagaaatgtcatggaacgccacaatccgcagattggacgctttcctttcagagtttcgcatcatttagatccccaaaagacaaaattcacataaacgaaaaaaatactatgtaaatatatgtggcgtttccaggattagactggcaccaagaacgccaacaatcaggatatgaccacacatcagaagaatatcatctggcgtccgagccattataccgtgaagaactgaataatcctccggaattggtaatggacgcatctaatcaagagatctaaaacctaatcgaaggataaacaacagcctaataatctaaaagcaacagtatgttttgtgagatctggaagctcagacagccaagggtttggtcttcaactaccacaaagtagcagtatcagaaactctagtccaaataaaaattgctcatcaccgctaccaagatctcaaatcagctgccgcaaacagaaatataaaacaatctaaatctaattcagaatggtcgtagcgatggatagaatgaggagctcagacagccaagggtttggtcttcaaatactacaaaagtagtatcagaaactctagtccacaaaaaattgctcatcaccgctccaacatctatttgtctaccagcgaaacgaaaatacaatagaaatcaaaccaaattcgagagcaatcagacgaaaacgagatcaaaacgggaagagattacggaggaaacaggcgac

SEQ ID NO: 69732 - DNA, 224 bp, Oryza sativa
  Clone ID: PAT_MRT4530_70373C.1
gatagtttcagtttgtcgctcgacaagacacaaggagaaactagggcatgcttaaaacgcgccttgctttttggaagagagcaacgatgcacccatcattgcagccatcacatgaaatacttacatcagtgatgtaacgaacaggcaacccaccttacctaattacatcaacacatacacccattgctacatctacaagatcgaacacatgcataaacgcaggg

SEQ ID NO: 69733 - DNA, 468 bp, Oryza sativa
  Clone ID: PAT_MRT4530_70374C.1
acttacagctctttaattattacactgaatgaatattttttgatagcctggggtctgggctactaacttaatatatcgacacaatcaaactgctctcatgctgagggaaaaaagagctactactttctttatcacaagctaagatcactgttgctgaaaattttttaatcttaggttgattcctgaaacctattaatcaatagcgtaaacccttataatcaaccccataccggcataccgatacaaaaactagacttgattttatacacataatattcaatcagataaaagggagctatcttgataagactaagggacagactatatctccagtgagaagtcacagactcacaggtcaccactataccaagaccttaaaacattatgcttgtcatgctccaggaacaactagcatagtgtgacgcacatgacatctgcttcagcacttgtcttttgctctcacatgac

SEQ ID NO: 69734 - DNA, 346 bp, Oryza sativa
  Clone ID: PAT_MRT4530_70375C.1
catcgagcagcgtcgtcgcgaggagcagccgtgccatcacgagcctccccctccgacgcaacaatgagaaacagccgcgctgccatgagcttcccatcgccgatgacccaaatctggagaggagcagctacggcggctccgggagcggcgccgacgacccaaatctggagaggacaccggggtcagagcaggcaacgctgccaagaccaccaacaccaaatcccgagctcgcacaaccgccgccatcttcatctgctcatccaccccattgcaatcaaggtaggaaggagaggggaagaagaacggcggcggggacaaggagactgcgctgtccattgcctctcca

SEQ ID NO: 69735 - DNA, 573 bp, Oryza sativa
  Clone ID: PAT_MRT4530_70376C.1
atggacggggaggaggggagaggtggaggcatcgtcaaagaaaatgagaaggggatcagtgaggagatagagaaagagggagaagcctccctcaacgtccacgtggcgcttcccccgagggggtcaggcccgtggatgggtggtagctgcccctccctagcccgaggggttggactgccccgactaggggtgaaaacggcggcgccgccctcgggagggccagatctggcggccccggccccgagccgcgccacctccgctgccgccgccgcgggccccgcctccctcgcccgcgccgcgccgctctccacggtggccgccgccttccgccgcaccagccctctcctgtccggggacaagccggcggcggtggaggacgtcgtgcccatcaccatggggctggagcgcaaggagctcgcggcggagctcaaggtccacgacggtggtgggagcggtcggcgatgcgggcgatccgtcggtggtagcggatggcggtggctcccacgacggctcgagcgcggcggatccggcgcggtggcgagcggcggcggcgacgtgggcgccggcgggtag

SEQ ID NO: 69736 - DNA, 796 bp, Oryza sativa
  unsure (1)..(796): unsure at all n locations
  Clone ID: PAT_MRT4530_70377C.1
ccacgcgtccgagcgcgtcttgagaaaatgagaaagaaacggaggaaaaaaaaaaggaaggatcggcgcatggcatttctctcccaggcgctgccacaaacgtctccgtgcccttccgccgccgatcccgagagaaggccccgaccagagcgcctcccccgcgccccaaggccgaaaccctagccgcgccacctcccaggtccccacgatcgccccggaaggcggtggtggcgacggtgggtgggggaggaggacggaaggcacacaggccggtggtgccacggcgaccaccatgtccgctgtagtgtgcggcaagcgggcttcctcttccttcttcgaggatctcacccacccgaccggcggctcccctcccgctgccaagcgtacccgctgcgggggcgcctttttcccgccgccgccgccgcccacctggccacgcggcgtcaccaagaacgaccttgtcgcccgactctctacgcaattccctgccatgagcctcgagatgattgaaaaggctctggacaaatctggaaataatgtggattcagcaataaggagtttgcttaatctacatttggaatctgtgcacaataacagtggcgttgcatttgaacccatacaagataccactgatgttcaggtgtctgctgaagataatgtctgangaaaaactatgtacaagacactcttggcgaatttgtaaggcttggcacatanatcaccaaatggaacagcatgactctacagatatattcctacatgcacctgggtcttggatagcanacatatcatattg

SEQ ID NO: 69737 - DNA, 299 bp, Oryza sativa
  Clone ID: PAT_MRT4530_70378C.1
tattacctctcattgagagggcctaaacctgtttaaatccttgtctccgcatccatccacttttaggtctcgtgcgctacccccttttattattgccgaattcatgtttcgacagttggcgcgctaggtaggggtgcgtcgagtttctatcgacaagtacgatggaatcaacttcacgagtcgccggcttcctctttacttcgggagctgcaacttcctcgtcgccgacgaattcgctaagcttttcttctccaacttggatccaatctagccggcaagattaatttaagcgatggatc

SEQ ID NO: 69738 - DNA, 861 bp, Oryza sativa
  Clone ID: PAT_MRT4530_70379C.1
atggacggggaggaggggagaggtggaggcatcgtcaaagaaaatgagaaggggatcagtgaggagatagagaaagagggagaagcctccctcaacgtccacgtggcgcttcccccgagggggtcaggcccgtggatgggtggtagctgcccctccctagcccgaggggttggactgccccgactaggggtgaaaacggcggcgccgccctcgggagggccagatctggcggccccggccccgagccgcgccacctccgctgccgccgccgcgggccccgcctccctcgcccgcgccgcgccgctctccacggtggccgccgccttccgccgcaccagccctctcctgtccggggacaagccggcggcggtggaggacgtcgtgcccatcaccatgggggctggagcgcaaggagctcgcggcggagctcaaggtccacgacggtggtgggagcggtcggcgatgcgggcggtgggcctcctactgcctggatccggcggcggttggcctcctcccgcccggatccggcggcggcgagcctcctcttgcccagatccgtcggtggtagcggatggcggtggctcccacgacggctcgagcgcggcggatccggcgcggtggcgagcggcggcggcgacgtgggcgccggcgggaagccaccgaagactggcgaggccggggcacttcgccgccattgagttaaggagaaggagaggggggaggccggccagagggtgggtgggttgggggctcactggcaccatccacgacttccagccagctgatgaggttgggcagcagcgtgttggggcagcggtgctagaggaggcaagcggaacgctcatggtcatgcgactgtga

SEQ ID NO: 69739 - DNA, 280 bp, Oryza sativa
  Clone ID: PAT_MRT4530_7037C.1
tcacccaccatcgttttttgtataccttttactcctccaggggggacttattgacttatgggggggttacaacacccaccggcggtaaccacccgccaccgggagcgaacacccctatataaaccgtcacgccacgccacggccaccaactccaaacacaacatggggccctctctcctcaccaccccgtcccatgccctggccctctcccccggcgccgcccccatccgcatcttcatcactaccacaatgtcctatcggcttatcttctccatctggc

SEQ ID NO: 69740 - DNA, 177 bp, Oryza sativa
  Clone ID: PAT_MRT4530_70380C.1
atggggagcgcagtctgcgggaggaagaatgggtacggcagtcgctggggacaaatgataagtgtttgtgtgcgccacacgccaccaagagtggcagatgccacccacgtggaggcattcaaccttgcacaggaagcagcggatgatgtcctagatgaggctgtcggggagttgtga

SEQ ID NO: 69741 - DNA, 361 bp, Oryza sativa
  unsure (1)..(361): unsure at all n locations
  Clone ID: PAT_MRT4530_70381C.1
cagccaccaactactggtggttcgtaaangggacngangggtcgacggggctggtgatgctggtgctcatgncagtngcnttcacctcnccacaccgtngttccgccgcggcccgnctccacctccccccncccgctcaaccncctcaacngggttcaactccntctngtactcccaccactgcttcttcatcntctacnccctcctcatcattccacngntatanctcttcctttaccaangantggnnaaannaaataccaacttgnatgtaccttgcggtnccnaatgttcctgtacccttccaaaaagctnnacaaaggcnnancccgtccaacctnaagccngtgaaacaaactcc

SEQ ID NO: 69742 - DNA, 1123 bp, Oryza sativa
  Clone ID: PAT_MRT4530_70382C.1
cttaacatagagttgtatcggagtattagccgatatgtgctagatctatctgatcggctaaagaccaggatcgccgcagttcatcactcaccccatcgatccatatcacctaattatggtgatgaaggaatagcaacttttagctgagacctacgtcgagtggactggctggctgacttcaaaccaactggtatcgagaagtacgatggcaaaaccggccctgagtcatgtctcaccatttacaccttggccattcgcgcaacaggagaagatatcaaagccatggtgaactacttgcatgtggcacttactgattcagtaagaagttggcttttggggcttcggtatcggtttgttgcaaattttcaaggcacctacgtgaggcccgggatacagttagatgtttaccatgtcatacaacagaaaaatgaattattaaaggactacatccgacgtttctttgagacaagcaacaagattccagaagacacggacaatgtcatcatcgctacttttcaaaaaggaatctgtgacgaaaatctcatcggcaagttcacccgcaaaccgccacttaccgtcatgaagctcttcaaaacagccaattcatacgccaattcagccgaagccatcaatgttgtgcgggaggacaagcaatcaagtactccacatctggtgaataataataatgagtattacaagaaggatcgcaatcgaacacctgaaaacttggtggccgcaacgtcttattttcagtcacattgtcggcgtgctagaaaattacaaccgaatcttgaacgggccctgtccaaatcacccaaattccaaacactctgctaaggactgtttcacattcaagaaatttgttgaagacaatgctaagcagttgaagctaacagctggaaaaggaacttcaggacagaacaaggacaatactggtgaagctaatccggatggtttccaagacccagagttgagctaaaccacatctttggtcgccctttagcttataagttcaagagaaagaagctgatcgatcattatcaacgtaatacactcagcaaatatcaattcccaaaatagtacaaaagaggagtacaacgattaaaagtactaaccaatatga

SEQ ID NO: 69743 - DNA, 333 bp, Oryza sativa
  Clone ID: PAT_MRT4530_70383C.1
atggaagctgctgtagcatctgggctgttgaaggtcgcaggacacaagttagtttcactgataggcagcgagtttgctgccatagcgcgcgtggccgaagacctatctgagctccatggtatacatggtgaaattactagctggctgtccacagttcgtgatggatcaatagagtgtgatccacagttccgttgggtgattaaattgaaggatgttgcttatgatattgatgatctactccatgaagtccaactagaatatgagaaacacaagatacacagcaatggtgacaagcatgctatatttgacacgttacgtgaaaaaccaaagtga

SEQ ID NO: 69744 - DNA, 377 bp, Oryza sativa
  Clone ID: PAT_MRT4530_70384C.1
acaatatctcatcaaagaacaattcatcaatatcttcattcatcaacatcccatccaacaagaacaaacaaggagactccgagatcgagattgaaagatacccaagaacatcaaagaacaaaattaagcacataattaagaatttcaagcacacgagaaatatatatatatatatatatatatatatatatatatatatatatatatatatatatatatgtatgtatgtatgtatgtatgtatgtatgtatgtatgtatgtatgtatgtatgtatgtatgtatgtatgtatgtatgtatgtatgtatgtatgtatgtatgtatgtatgtatgtatgtatgtatgtatgtatgtatgtatgtatgtatgtatgtatgt

SEQ ID NO: 69745 - DNA, 195 bp, Oryza sativa
  unsure (1)..(195): unsure at all n locations
  Clone ID: PAT_MRT4530_70385C.1
ggtgccggnaattcccggcgtcgacccacgcgatccggcaggtttcctgtctgtttctcaccatatgagggaggggagagagaaggaaggaagaggaaaaaagaaggatcatcaaccatgtcgaattcggcgtcgggaatggccgtgtgtgacgagtgcgcactgcggttcctggcgcttacggcgaccgggagc

SEQ ID NO: 69746 - DNA, 339 bp, Oryza sativa
  unsure (1)..(339): unsure at all n locations
  Clone ID: PAT_MRT4530_70386C.1
cacagtgacacacacaccgcgagcncgccgctcngangntagagtgggagttcggttcggcgaggcgagaccggccatggcggcatcggagaccgcgccnatcnggtctcggcggcatccaagggcggcggcggggtggcgggggcnagggcgcanacggngcaactggcggtggcggggcgggtgcacgacgcgctcgttttcgcggcgggcgcggtggcggcggtgctcgtnctgctggccacggcgtcgttcctgtcgcccatgcccgtaangaacctcgtcgcgttccgntcccttccggtgtcggtcggcttcangtccgccggcttcgcggga

SEQ ID NO: 69747 - DNA, 654 bp, Oryza sativa
  Clone ID: PAT_MRT4530_70387C.1
atggccctggccatgccctacccggctaagccaagtatccctttttccgtcagccccgcagtatggtcgcgctcggaggcttacgacctccaggccacccatcccaccctggtcagaccttaccggctgagccaggtggctggcaacctcctaggggttgaaggaagaccttgggttcttgggcttgacgcctcgccgccaccaccgcctagctcaccggttgccgccggccatctccggcgaggtagcgccgccatctccgtcgtcgtcaccgcttgctgccgccgcattcaggtgcgccgtggtgaggggaagcccggccgcccgttctccgccgtcgccgatcaccggagccccgtcgccgccgtcgaccgaagccgcgccgccgctagaccttgtcgtcggccgtcgtcgttcgtcgatagacgtgctggacggctacttcgtcgccgccaggaggcttacacctccacgccagctacctatgtggctacgtcgctgccgagtgacatcgtccccgtgcaggacggctacatcatcgccgcctggaggcctaaaccaccacgccggccacatttgacattgttgggtgacatcgtctccatgctggacaactacttcgtcgcctcctggaggcttgcacctccacgatag

SEQ ID NO: 69748 - DNA, 1704 bp, Oryza sativa
  Clone ID: PAT_MRT4530_70388C.1
atgggagaggtgcaaactggtgtgcaacaacaaaaccttattcgaccattgaacaggtgctcgtgtgcggagcgtgcgctgaattctcctgaagtgaaggctaccagcgccgtattggcacatcagggatatcaacttctacaacaaaaactgctcattagttcccagatgcagggtggtgcctcagctaccattctttgggaatggatcttgttaggcaccaaaaactccaatggggaggcaccacttttttttagcacttatgatcatgcagcagtgctcaatctggctatggacaaggtcgtcggaatattgaggggagtagctggtgttgctgctgacgccaatgcattccgtgaattcttccactgggtcacaccacacgtcttagctgccgtacgttctcaacagcagcagcagctgctgcaactggattcaggagggccagtatcagcatcaactggaaacaacagaacagctccactgcatcagattcaggatgatcttcagaaactcgagcacaacctttgggtgatccaaacaactattacatccacgatgcatgatctcatcgaccgccttgagtggcatagccacagggaaacagaagccaggcaccttcgccagatcaaggatgcagtgtacgatgccgaggacctccttgatgagtacaattactatgctcttaaggtgaaagtggaggcgagcaagaacttggggcaagatcactcacatggacccgttttagagttcttggacagtgtcaacttcaatggcaacttcagcaaagtgatggaaatccaagacagactgaagcatgttttcgaccaatccatgggtttaggcttgcacaaaacacccaagaagtttgatcgattagtcaggccagagacatgccgtgtccttgatgagtcacagatatttggtcgtgagcaagaactgaaggagttgatgcaaatgctaggagtagatggacacaagagaggcaggcctgcagcacacactaacactactgaagcaagaaggatggagttgcctgtgttgccaatagttggcatgggaggtgtcggcaagacaactatggcccaacaaatctgtgaggatccagaggtgcgcaaacattttcatcaccgcataatctggatatgtgtctcagatgaatttgaggtaaacaggttaacaaaagatgctctgaagtctcttggagtcaagtcagaagataccgatacaagggataatcttatggttaatttacgtgatagtgtcaagtcaaagaagtttttgctcgtccttgatgacatgtgggatgatgtcttaaaggatgagaaaggatggagaacatttcatagaactttaagcaatggtcttgatggcagtatgattttggtcaccactagatcttccaaggttgctaacttagtcagcgacggtaatcactatgagctgaaaggattgcaagatggggttttctggaatttcttcaaactatgtgcatttggatctgtccagagttggagcaacaggccagagttgcagcgcattcgtccagaattggagcgcattggtagagctatacttcccaagttgaagggttcacctttggctgccaaaactcttggacgattgttgaaatgcaaccgaagcatagagcactgggaagacatattgaaaagagctgtggcgattagaacaagaggagactga

SEQ ID NO: 69749 - DNA, 1846 bp, Oryza sativa
  Clone ID: PAT_MRT4530_70389C.1
ccggccggccgggatcttcttgctggcccactcctctcctcctcgtctaccttacctagcagcagcagctagctagcttaattagctatagcagccatggcggcgacggcactgagcagccaggtccggttgccgatgtccctgcgggtggcgacggcgccggcgccggcgcgcgtgtcggtgctgccggcgagcaacaagctgggagacaggctgcggatgcaggcgacgtacaacgtgaagctgatcacaccggacggcgaggtggagctgcaggtgccggacgacgtgtacatcctggaccaggcggaggaggaagggatcgacctgccttactcctgccgcgcgggctcctgctcctcctgcgccggcaaggtggtctccggcgagatcgaccagtccgaccagagcttcctcgacgacgaccaggttgccgccggctgggtcctcacctgccacgcctaccccaagtccgacgtcgtcatcgagacccacaaggaggacgacctcatctaatcaatcaagcaagctccatatttataaatctctcgatccatctccatgcgttcttgagtttatcaattaagaatataatgtcgtcgtccctatgctatgcaagcaaagtattacgtacgtatatgttgagcgagataacaaaacacaggcgtgcccgagggttaattgttgttgtttaattaatgtacgttttgctgcacctgcttaatcatatccatatcacattttggtgtcatatatgcatgcattactgtgtcatatatactactgtcaaatacgtactccatgtatttgaaagaacagttaattaataagctatatatcctagttctaaaaaaaaaaaaaaaaaaaaaaaaccaaagacatgacctggagacctgatctgtttagtgatagtatggcagctagtggaattgaaactggtacaaaattgtacatttcaaacttggactatggggtttccaatgaggatataaagggcacagcagaagtggtgtttactaggagaagtgatgcaattgctgcattgaaacgttacaataatgttctgcttgatggtaaagctatgaagatagaagttattggaagtgacttaggtttgcctatgacacctcgcataaatgtggttggggcttctaatggcagacctacaagaacagttgttatgacgcctgaaattggccagcgtggcagtggttccagcagtagaccaacaggtcctacagttaatagatataaccgtggtgccttccaagctggccggggccgaggccgtggcaggggtcgtgccccattccagtcccagttccagggccgtggcactggcagtgtcaggggccgtggtcaattccagggccgtggtcgcggaaggaggcaagctgggaagactgcagatgagctggacaaagacctggaaacttatcatgctgaggcaatgaagaccgactgatcgctgcagacctaacggtggtggcagccattttgtcacaactgctctataagcatctgttgcaagattatcgttatgataggttagcccgattgagctgtagtactcctggaagcagagaactttctgcttaggtttgcaaaaacaaactctgcctctagaagtttgaagaagacgcaactgtggtgtgtagtgattatctgggatttgcaaccctaggttttttttttcttttttttggtgctgcttgctcttgagattgtcgtgttaagcttcccaaacaaaagtaaatcctgggattttatgactcatcatcatccgtagaagttacgtaatttagtctatattatcccaagtcttggatgtcctttaacggcgccg

SEQ ID NO: 69750 - DNA, 6259 bp, Oryza sativa
  Clone ID: PAT_MRT4530_7038C.1
atggagttcacagatgtaaggagtcctactcggatagaactgggtcgtcattgtatcgtatcgggtccgatgtctcgagtcctacttggagaccagttgacctatggtataaaagggaccccccgggaggacctaagagatcgaatctcagagccaacgcatcaccacagcctacgaaatcctcgtactagcgtaccccaataccctctatatccggtctacggatatccctcgtcgacagtggcacgctaggtagggggacttggtgctcaaggttctactactatgacatccagcttcgtcgacaacaacgtcaacaccaacctcaaccaagtagttcctacttcaacaacactggtgtggactcaagtcggcgaaatcgcctttcctgtttacaccactatgccgatctcagctggtccgccaatggccggaaacgagaaagcagtggctacaacccggggcaactccatgtcgaaggatcctcccgccgaagcggagatcggaacgtcgacgacatccgagcccgagaaggatcctagtgcggccaagccttgtctttccgacaggaatcacgagccgacgaggattacttccgaggtgacaaggtcctggtgtcctatccacaaaaccaggaaacacaccctgcaagcctgctgggtctttctcaacgtctatgctgaaattcgtgcctacaaagagcgtggaattcagcgtacctctccaactcgtgatgtctattgtcctattcccaagacaaagaatcacgacctcttgagctgcaaggtctttctccgccatgaaggcgccacctcctaaggtccagcagtcacacatccccatcatggataaagacaaggaacaaggagcgacgccgatttcagatcgatttgttggggtaatcgacatcgatccccacgaaccatcagtcttgcatctgctcgaagactatggatcatcgacaacaagtacgccgcgtgaggtattggctatcgacgatgtcggcacgtcagtgcgcaccaatgcggaagcggagaatcaagtgactactccggcccagcacatcagagccgtcaacgcaatactgagggaaaccccctacgatcccgttctgaacaatgatcttgcacgttggacagaacgactacgggaatcagtgaccaacctcagtaacgcgttcgaagaggccgctattgcagcgcatccggaacagccaccaactggcgatgctaatggtgaagaccctgaacggcgggaatcgcctcatcgagcgacccctccacctcgcggcaccggcgatttccgtgatcacctgaatggccactgagaggcacgacgcacacgagacaatgagaaccgttcgcggcgtcatatctcttcacggcgtcacgataatggtgataaccgccacaaccgccacgatcacgacgatcgcgagcggcaggtgctgggcggtactggtcgaggacgtcgccataatgacgacgatgatggagatcggcgccgagacaacaacgggagacaacgacaggattctcgagagcccggccgacgtcctcgtaattatacgccggaaccaagcgacccatcgtcatcgtcatcatcctcgtcatcttcatcatcagatagacatccacgaagaacgtatgatcgccgacaacccaccgcccccagcgctgggtgtagagctttcggtcgttcactttgggatgtccgatggcctgaaagattccgacctagagcaatagagaaatatgatgggagcaccgacccagaagagttccttcaggtttgctccacggtactctacgctgccggagcggacgacaatgcgttggcgaattacttgccaaccgcattgaaaggctctgcacgttcatgactgatgcatctcccccctactcgatctcttcatgggcagacttgtggcaacagttctagccaacttccaaggaacttataagcgtcacgcgatcgaagatgacctacatgcgttgacacagaacccgggcgaatccttgagggattatgttcggcgctttaacgagtgcagaaacacaatccccgagatcaccgacgcttctgtaattcgcgctttcaaatccggtgtcagagatcgctatactactcaggagttggcaacgaggcgcatcatgactacttggagattgttcgaaatttttgatcgatgcgctcatgcggatgacgcactgagacgcaagaacaacaaaccgaagaccggaggagagaagaagccagccaaggacgcacctgagtcaagcaagaagacaaatcgcaagagtgggaaaaggaaagctcaatccaaagttctcgcaacagaatacgtggaccctcccaagcgcccagacccacaaggcagcgacacgaagaaagcatggtgccctatacacaagacggacacacattctctagaagattgcctcgtcttcaaaaagtcgctcgcaaaacacatggcatcgaaaaaaggcaagcgagtacgcgtggttgagaaggacgctgaggcgcctactcaggaatcagactcagcatacccagattccgatctccatgtctcacacatcttcagaggttccatggcggcgatatccgatcgtggtcgaacccactattcgtaatatcaaggtcgcacgagtcctgatcgacagcggtagctcaatcaaccttctcttcgccagcgccttggacgcgatggggatcccacgaagcgagttgacacccactgaccaacccttccatggaatcactcctcagtcatcgtctaaaccattgggcaaaattacgttgcctgtgactttcggccaagcaaacaacttccgaacggaacagatcacctttgatgtcgctgaattcgatacagcatacaatgccattattgggagaactgcactcgcgaagttcatggccgcatctcactacgcgtatcaagtgctcaagatgccagggccgaagggaacaatcactattcaagggaacgctaagctggcagtacaatgcgataagcagagcctcgacatggtcaagcacacgcccagcccacccgccacagctgagccacccaagaaagtgagcaaaacaaacaagacgccgaagtcagacggcgcaatcaagatcgttgcactctccaatgccaaccccgacaagaccgaactcgcgctcatcaccttcctccacgacaatgctgacgtgttcgcttggcagccgtccgacatgccgggggtacctaggtaggtgattgagcacaaactcatggtgcgacccgatgccaagccagtaaaacaaaaactgcggagatttgcaccagatcaaaaacaagccatacgagaagagctcgacaagcttctcaaagccggtttcatcagagaggtactccatccagagtggctagccaacccagtcatggtgcggaaggccaacgggaaatggagaatgtgtgtcgatttcaccgacctcaacaaggcgtgtcccaaggatcactttcctcttcctcgaatagaccaactggtggactcaacagccggttgcgagttgttgagctttctcgacgcttactccggttaccaccaaatcagcatggtgaaagaggacgaggagaagacagcattcatcacgccgtttggggtattctgctacgttaagatgccgttcagactaataaccgcatgaaacactttccagcgcacggtccaaggtgcacttagcgaccagctcggaaacaatgtcgaggcctacgtcgatgacattgttgtcaagaccaagacaagcgactcattgattgacgatctgcgggaaatgttcgacaacctctgacgatatcgcctcatgctcaacccagagaagtgcacgttcggagtaccctcgggcaagctactcggcttcctcgtctctggcagaggaatagaagcaaatctcgagaagatcaaggcaatcgagaacatgaagtcgcctacaagactcaaggaagtacagaagctaaccggatgcatggcggcactaagcaggttcgtcgctaggatgggagagcgaggacagcctttcttcgctctattgaaaaagcaagacaaatttgtatggacataggaagccgaagaggcattcattgcactcaagcgctacctatcaaatccacccgtacttgttgccccccaacctaatgaagaattatttctctatattgccgccacgccatactccgttagcactgtcattgttgtcgaaagagagaaggtgcaacgaccagtctactatgttagcgaagctctccacgacgcaaagacaagatatccacagatccaaaaactgctctacgcggtaatcatgacatcaagaaagctacgccactacttctaagcccacagggtcacagttgtctcctccttccctctcggtgaagtcgtgagaaacaaagatgttgtcggccgcattgccaaatgggtagtcgagctaagccaatttgatatccacttcgtgccatgaacagccatcaagtcccaggtactcgccgatttcgtagccgattggacaatgcctgataataggtcagacaaccaaatcgacaatgaaacgtggacaatggcgttcaacggcgcactcaacagccagggagcaggggcaggattcatcttgacatcacctttgggagatcaattcaagcatgcacttcacctcaacttcagggcaaccaataacacagccgaatatgaaggactactcgccaggataagagctgtagctgcacttggaatcaagtgactgatcgtgaaaggggattccgaactagtcgcgaaccaggtgcataaagattacaagtgctctagccccgagttatccaagtatctcgcagaagtcaggaagctggaaaaaaggttcgatgggatcgaggtccgacatgtataccgcaaagacaacattgaaccggatgatctagcacgacgtgcttctagacgagaaccacttgaacctggcacctttatggacatcctgatgaggccatcagtgaaagatgcaatcgacgaagatagcccagactcccccaacgtcggctcgggggctacaaaggcagagcgcgccgttgccgatatcgagaccacagacgactggcgcaccccactcattaaattcatatgcagcgaagagctgcccgaggatgacgcagaagccgagaaaatatcccgtaaatcaaaagtctactgtatgatcggcaacgatctatacaagaaggcaccaaacagggtactcctaaaatgcatctcatccgacgacggcagacacctcctcctcgacatacatgaagggatctgtgggtcacatgccgccggtcggacattagttggaaaagcttttcgacaagggtttttctaggcaaccgtcctcaaagacgcctgtgacatgtaaacacacaaagctaccagcgcaagcactccaaactatccctctcacttggccgttcttgtgctgggtgctagatatactcgggccattcccacgaggacaggacggctacaggttcctattcgtggcgatcgacaaattcaccaagtggattgaagcgatacccactggggaaatcaaggccgacaacgccatcaaattcatcaaagggaaattctgcaggttcggattgccccaccgtatcataacagacaacggctcccagttcatcagtgccgatttccaggattactgcatcaggttgggagtcaagatctgcttcgcctcggtttctcaccctcagagtaatggacaagttgagagggcaaacggcatagtattacaaggaatcaagaccctactatgggccgtgcgtaccacacagacaacatctaacaaggagacacccttcttcctcgtgtacgactcagaggccatgctccccaccgagctatgacatcaaagtacacgagtacagaagtgttccgatgaggatcaggaggagcagcgatacgatgatgtgaatctactcaaggaacatcgcgatcgagttgccgttcgagcagccagctaccaacaggcccttcgccgttaccacgagaagcgcatccgagcacgcacgctttcgatcggtgactacgtcctccgacgggttcaaagccaagcagggcgaaacaagctctcacctaaatgggaaggaccgtacacgatcacacaagttctgcggccaggcgcattcaaaattgcagacggcgatagtcgcgagttggcaaactcttggaacattgatcaattacgtaaattctatgta

SEQ ID NO: 69751 - DNA, 510 bp, Oryza sativa
  Clone ID: PAT_MRT4530_70390C.1
atgggaaactccaacctagggtttggcctcacctcctttaatcacacgggcaccgccacctcctccttcccgccaaaccccgtgtctggccaaatggcaccatgcggcgaaggcgaccgacatgtgctgatgcaggaacctcggctgcaacaccatcttctctacgagaccatggagcccgtcactcacgtcggggaagaaggagaggaaggtggggatgaggcggcggcggcggcgaggcttcctcacctctgctctctccccgctcccgctatcctgctgctcccgccgagctctcgtcgccccgccgctctagtgccacgtaagcgccacatcgatgacacacaagatgaagaccaagtcaacccgccacgtaaatgtcacgagaaagtctcctgcccggccgcccggcagcagccagccaccaagtttcactgcaaggatgccgaaaggcaggatggccagctaatgagcggcataaaattttgtgatcaggccatcactggctag

SEQ ID NO: 69752 - DNA, 268 bp, Oryza sativa
  Clone ID: PAT_MRT4530_70391C.1
tcgtgggtagcaaggatgaacaacaccaagggggggttttttttcctgcgcgccgtgttagccaagggggtcgcatacgcacccgagggcgagtccagcaccacccacggggagaagacgaccaccacccaagcggaggatggcgtcaagaagccagactgcgtgccggcggacgacccgcgctcgttgcccggacacggcgagagcaggactccgacgccgatcgccggaccaccacggcggcggaggctcattcgggaccacgccg

SEQ ID NO: 69753 - DNA, 375 bp, Oryza sativa
  Clone ID: PAT_MRT4530_70392C.1
atgcctcgccgccgcccggccatcaaagaagcatctcgacctctggcatgctccaaatccatccacgtgggtgggttggagagggagagggtgagagagaagaatgaatcccctctcccccgcactagcccgtccagcgtggccatcttgcagcgtcaagccgccggcgcaagaggactaacgcgtgcaaaggagcttgtcgcaaccttcaacgcccacctcaggcaaccttcaacgccttcaatgcccgtgtccaactacaagcaacctggtcgcatcgttgtcgcctccgtccttccaccaaatattagacggtattcttatgagttacagatacaaatccgcaagcgcatggttgacacacagatggaatag

SEQ ID NO: 69754 - DNA, 136 bp, Oryza sativa
  Clone ID: PAT_MRT4530_70393C.1
atgcagaaggccgggtcccctgtggaacacatcaaggctaggcaaggacagacaggcaccggtaaaggtcaaatcgacgcgagcgcgcgttgccgtgcgggctgcgggctacggccggagcccggagcggatggcc

SEQ ID NO: 69755 - DNA, 183 bp, Oryza sativa
  Clone ID: PAT_MRT4530_70394C.1
atggatgaggacttaccgatcatgcaccttgacaaatatcttcagctggagaaacctattgatagagatcctgtgcttggtggagtactcatcaagcacacactccttcatggccgcagcggcaccatcaacgcgacgtgcacgccgttgcggagccctgaagccgtttgtattcccctttaa

SEQ ID NO: 69756 - DNA, 198 bp, Oryza sativa
  Clone ID: PAT_MRT4530_70395C.1
aaaaaaaaaaaaaaaaaaaaaaaaaaaaaaaaaaaaaaaaaaaaaaaaaaaaaggacgggggctgtcgatgttccgggtttacgctctcgtgcgtgcgcgtgcaaagttcttctttttggatacttaaattcaatttaatgtcactggccgtacaacgacaacgctgggactgccatgaccttgcccataccaaactt

SEQ ID NO: 69757 - DNA, 710 bp, Oryza sativa
  unsure (1)..(710): unsure at all n locations
  Clone ID: PAT_MRT4530_70396C.1
accaacgaaagctttgcaagtgatagttttgaccatttttaggcactttactcccttgagtacttcctaattattctcccattttctccaagctctttttccattgaatcgacaactccagctatccctggcattcgtctacctatatacgcaagatgtgttgctttgtcaatttatcctatgagttaaatatatcctactcctccctgttaattgttctgttcttcatcaaaacaattcctgtcaatttcacttgaaaaaaacattttttttctatatcttcatggacaggacttattccttgatccagactcatgtatgatggtttttgtattaatttttaatcattatacgctacattacaattaatttttgatacactgtataacactcacttttggattcagtcgtaaatgttaattgttcaaggcattatgaatgtgtgaagcagggttcaatttgaacagatgggtatcatagttcagggattgtttctattttttctgaatcatccaagttaaacaatttatgaaatactagcctggttttgcatgattcacatactgaaatagcatagggtaatgcaacaaataacaatcaaaactagtaaaagaaatggctgattntttagtaagttcctatccgagttgctgaccatcacatctgtaggagtaggagcagcagagcgcataaacttaaccttggaaacg

SEQ ID NO: 69758 - DNA, 341 bp, Oryza sativa
  Clone ID: PAT_MRT4530_70397C.1
cccacgcgtgcgcacgcatcactctaccaagagtggtgatcagttgaccagcctgactgactaccaaacccggatgacggaaggacaaagcgcgatctattagatgactggggagagcaagatggctctagggaacgcgccctttctcgagaagctatcaaaaaaagggtatgaggtcatgtccatgagtgctgccattaatgatgacgctagtgggcagctaaaagagaaggaaggcgaaaatctcgattctgccactgaggaaaggctaaagcttgatgagagtgcacactaaacactgctggagcaggaactgacagagacacaatacggtctgtgca

SEQ ID NO: 69759 - DNA, 111 bp, Oryza sativa
  Clone ID: PAT_MRT4530_70398C.1
aactattaactttatttccgcgcgggcccaccttggggcaggcctgctaccgccaaaagacgagacaaaacgtccagtcccttctccttattgagcatccccatgcccttc

SEQ ID NO: 69760 - DNA, 232 bp, Oryza sativa
  Clone ID: PAT_MRT4530_70399C.1
ccacccaacgaggcccattgtccttttttaaaaaaccaaccagataacatggtttcccccaattggaacgaaccaatgaaaatttgggccccgcggaagggggaaaacgccccggtgttacacccagcctgatagaaagcaagggccctcacccccgtggttcggcggaaacccacccttttctggcgggggacaaattgcggggggctagccccattccctttgaccggcg

SEQ ID NO: 69761 - DNA, 366 bp, Oryza sativa
  Clone ID: PAT_MRT4530_7039C.1
aacaagcaaacgtgtgggtttaatgaaccagaggttttttttttttgaacaattcaaagatagaacgcctttttgtttatttacaatgaaggggtctttcccattttttaagagggttttttttctttacaagaacggaagacaaccccctttaatgaaaaaattttttttttccaagaaaaacaaaaagaatttgtcagccagagggacaaaattttgcaaaacgatgcgtatgttttgcagcttttttgggtaaacattgtttcccgcccttaagtttccaatgaagaccaaaaacgcaaagacaaaagggccaaacagagctgggaaacccccatcggatgatgaccttttttttttaaaaag

SEQ ID NO: 69762 - DNA, 378 bp, Oryza sativa
  Clone ID: PAT_MRT4530_703C.1
atggcgggaagaggcagtgccatggcggcggttggtgtgctggtgctcctctgcgtgctcctccacggcgagatggccgagtcggcggtgttcaccgtcggcgaccgcggcgggtgggggatgggggcgggatcgtgggcgaacgggaagcggttcaaggccggcgacgtgctggtgttcaagtacgactcgtcggcgcacaacgtggtggcggtgaacgccgccgggtacaagggctgcaccgccgccccgcgcggcgccaaggtgtacaagtccggcaacgaccgcgtcaccctcgcccgcggcaccaactacttcatctgcaacttccccggccactgccaggccggcatgaagatcgccgtcaccgccgcctag

SEQ ID NO: 69763 - DNA, 165 bp, Oryza sativa
  Clone ID: PAT_MRT4530_70400C.1
atggtggggccggggaggcggtggggcccggacagctgtgagacggggtgcggtgaggtggcgtctctcgggacaaccaccttggcggagtgcctacgggcgagccatgtggcagtggttgccagaatcaaccccgtcataagaaatacgacgaggatgatgtag

SEQ ID NO: 69764 - DNA, 357 bp, Oryza sativa
  Clone ID: PAT_MRT4530_70401C.1
atggggagtggactttctatgaagaacgagagcgaaagattatacgagggcgagatggttagggaggttcctgtccaaagatccctggacctggaacatgctgtccttgcttcgccggcgatggctaggggagatcgtcctattctagatttcgtccctccccgtctcgacggtcctgcgttgtgctccgagataccgcccatttctgcacatccgtttcctcgtccttccacaagtgctgaagggagcgatgttggggtagaagtttccaaggcaacaaaccactgttctggccccgcgcaatcaatatccccagcaataatagacagacgaagtcgcgccgcgttcaagttgtaa

SEQ ID NO: 69765 - DNA, 311 bp, Oryza sativa
  unsure (1)..(311): unsure at all n locations
  Clone ID: PAT_MRT4530_70402C.1
cccttttttacgtccacacgtcccccgagcgtccgnggggtatctttaaatcttctcgggggttccaaaccaacaccagctgataagccagtccatgataaaagctggggagctggacaaaccccctcatgaaaacccccctgggttgtccaagcgaggcaggcatgagacattcaatcatgaacaaacacccagtggtaagaactcctgaacctgctctgacaaaaacattgataccacaacgggaagggagccgtgaataacatggagcatccggaacatacatggaccactcaacacctgttctgact

SEQ ID NO: 69766 - DNA, 3825 bp, Oryza sativa
  Clone ID: PAT_MRT4530_70403C.1
atggctccacggaagcggacgggggcggcggggggggcagcttcgaagaagccgccggcctcgcagccgtcgcagccggccaagttcggcattctccacttcttcgagcgccagtcccaggcctcctcccagaacgccaagcgccagaaggccgacggccccttgcagcctcccgcgccgccgccgcctccgccgccaccgccgctcatcgaggaggagccatcggaggtgtcgccggaggtcaccaagactctggcgccgaagcgggtcaggttttctcctgggatgctgattaagcagagccaggacgatgggggtggggaggttgtgacttggaagatctcgccggtgaatgatcgcctgcgcatggtcacttcaaggcagatgactggtatggcgcttcatccgtgctcaaacaatgagaagcattcctcggtcgagtctacaaagaaatggcattcatcactgctgggcatgtcaagatgtactgcttcagcacgcaatttggatatgtgtggaactggtccaggtggctgtgacggtgtggaggacacccaaagcccatttcggactcctccatcactgtcctataggtgcagtgagcagcagcttaatgggggtgtggtttctgatggaggacctgagcagttgggggcaggggagcacaaaaaggcactacttgatcttttagatcaagtggaagatgcaatcatggaagaagaattacctgctgatggtgagaataaaggagagcagctcataaatggtgatccgaaaaacattagttgttctcctattgctgacagcgatcaaaatgtaccctcccagaagtcccttgatgccccgcccttcgatagctttttggtgttggaggtgtcagaaaagcacaaaggcgataacttaccatgtgatcgctatcctgttaaggttttacgtttgctgaatgagcacggtgggaaagagcatgcagtccatttgtgtgatgagtggttccatagccttattagcccaggcgacacagtaagtgtcattggagaattcactgaccatggaatatgtattattgatcatgacaaaaatcttgttatagtgcatccagaattactcatatctggaacacgggttgcttctagttttcattgtccaagaaggtctgttctcgatgacagactaaaaagcaatgaatattcaacaagtgctttgattggtactctgctgcatcaagtattccaggcagggctacttgaagatgttccttcaacgcaattcttagagcagcaagccaaagaagttcttttgaaaaatattgagagtttatatgcatgtggagccagtgaaagcaacacgcttaaaacgctgattgaagcagtccccaaaatattgaattggtacaagtgctttatgaaggtatcaaaatgtaacaatgtaaattttggtcaaattgaaggacaaaagactgttggagttgtggaggtaatggatattgaggagatggcctgggctccaagatatggtttgaaagggattattgatgcttctattagatcaagggtttcatgcaatggtagttcatacgacagagtaatgcctctggagttcaaaactggtaaaggaactagtggtcagacagctgtggaacacactgcccaagtgatattgtacacgctattgatgacggagagatacttgaacaaggatattgacttgggtcttctgtattatcttcacacagaccaaacattgggcatcaaagtcaagaggtctgatttaattggattaataatgcgtcggaatgagcttgccactgagatcctgaaggcatcgatttcacagagttttcccccgatgatacaggcgcatggaggcaatgctgcaactagtgggcttggtgatttatttgataatctcgtgaatcacttgacagttgcacatcatacctttcttaaacactgggacagattgatcgatcttgaagctagagtttctcaggtcaagaagaaggaaattttccagccacatcattcaaatactgggagcaggcattcttccccatcttattttgtccttgatgttacaaatggacattcaatagattcatctggaaaaagcaaaagatacatatatacttttctgcgccagaagttgcagcctgagacagctgatcagccaggagaacatgttgaaagtgtagattttagcctcaaatgcggtgattctgtggtgcttagcacaaaatctgggcgaatagctgttgcaaatggatacataagggacctcagccgtgcccatataacggtttcattgccacgacgtctgagacttccaggaagtaattccttgttagagcaaggagatctccaatgtgaagtttggcgtatagataaggatgagtctgtttcttcatttgctaccatgagactcaaccttgtccaactatttgctgagaatccacaaaactctcacctaaggaagttgattgttgacctcgaggctcccagatttgatagtggaggactcctaagtcaagatccggcactatcatatatacaatcattgccaaatttgaacaatgaccaacagagatcgctgcataaaattctagcagcaaaagattatgcgcttatcctaggaatgcctggaacaggcaaaacatatacgatggtgcatgccgtgaagtcattattgatgagaggggaatctattttgctaacctcatataccaattcagctatagataatttgcttatgaagttgaaggctgagggtgtagattttcttcgaattggaaggcatgaagctgtacatcctgatgtcaaaggccactgcttgtcaacaacagatatacaatcagtagatgccgtcaaagctagaatggagcaagtgcaagttgttggagtcacttgtttgggaatttatcaccctttactagcacataagaagtttgacacatgtatcatggatgaggcaggccagatcacattaccggtatctctgggacctttgatgcttgcaacaaagtttgttctagtaggagatcattatcagcttcctccacttgttcagagttctgaagctcgagagaatggtatgggtgtcagtttattttggaggttgtcagaagcacaccctcaagcaatttcagcattgcgatgccagtaccgaatgtcatctggcattatggagctctcaaattcattgatttacggcaataggttatcctgtggttcgttggaaattgcaaatgccaaactcaagctttctggcagaggtcctgttcgcttgaagctgaaagagatcttgaaccctgatagggctgtcgtctttgcgaacacagatgaagtaccagcttttgaggccaaggaacatagaactgtgaacaatcctacagaagcattaattgtttcatggatcaccaatgaattgctaaagagaggtgtagctcaagatggggttggtataataactccatataatgcccaagcaaatctcattcagcaacatgtagacgcttcagttgaggttcatacaattgacaagtaccaggggagggataaagaatgcattatagtatcttttgtacggtccaacgggaatacaagggctagtggttcttctttgcttggtgattggcacaggatcaacgttgtcttgacacgtgcaaagaagaagctcatcatggtgggatccgctgcaactctttcaacgatcccattgttgagacttatgattgagaaggtagctgagcgtggcggtcagttagatctgacaaataaggatgtacagtcaattcgagagctaacaagctctcgattgaatgtacaatag

SEQ ID NO: 69767 - DNA, 3864 bp, Oryza sativa
  Clone ID: PAT_MRT4530_70404C.1
atggctccacggaagcggacgggggcggctggctggggtgcatgcttcgaagaagcctgcggcctcgcagctgtcgcagccggccaagttcggcattctccacttcttcgagcgccagtcccaggcctcctcccagaacgccaagcgccagaaggccgacggcccctcgcagcctcccgctgcctgcctgcctgcctccgccgccaccgccgctcatcgaggaggagccatcggaggtgtcgccggaggtcaccaagactctggcgccgaagcgggtcaggttttctcctgggatggtttggtggtttcttgtttggtgcggtccagctgattaagcagagccaggacgatgggggtggggaggttgtgacttggaagatctcgccggtgaatgatcgcctgcgcatggtcacttcaaggcagatgactggtatggcgcttcatccgtgctcaaacaatgagaagcattcctcggtcgagtctacaaagaaatggcattcatcactgctgggcatgtcaagatgtactgcttcagcacgcaatttggatatgtgtggaactggtccaggtggctgtgacggtgtggaggacacccaaagcccatttcggactcctccatcactgtcctataggtgcagtgagcagcagcttaatgggggtgtggtttctgatggaggacctgagcagttgggggcaggggagcacaaaaaggcactacttgatcttttagatcaagtggaagatgcaatcatggaagaagaattacctgctgatggtgagaataaaggagagcagctcataaatggtgatccgaaaaacattagttgttctcctattgctgacagcgatcaaaatgtaccctcccagaagtcccttgatgccccgcccttcgatagctttttggtgttggaggtgtcagaaaagcacaaaggcgataacttaccatgtgatcgctatcctgttaaggttttacgtttgctgaatgagcacggtgggaaagagcatgcagtccatttgtgtgatgagtggttccatagccttattagcccaggcgacacagtaagtgtcattggagaattcactgaccatggaatatgtattattgatcatgacaaaaatcttgttatagtgcatccagaattactcatatctggaacacgggttgcttctagttttcattgtccaagaaggtctgttctcgatgacagactaaaaagcaatgaatattcaacaagtgctttgattggtactctgctgcatcaagtattccaggcagggctacttgaagatgttccttcaacgcaattcttagagcagcaagccaaagaagttcttttgaaaaatattgagagtttatatgcatgtggagccagtgaaagcaacacgcttaaaacgctgattgaagcagtccccaaaatattgaattggtacaagtgctttatgaaggtatcaaaatgtaacaatgtaaattttggtcaaattgaaggacaaaagactgttggagttgtggaggtaatggatattgaggagatggcctgggctccaagatatggtttgaaagggattattgatgcttctattagatcaagggtttcatgcaatggtagttcatacgacagagtaatgcctctggagttcaaaactggtaaaggaactagtggtcaggctgctggggaacacactgcccaagtgatattgtacacgctattgatgacggagagatacttgaacaaggatattgacttgggtcttctgtattatcttcacacagaccaaacattgggcatcaaagtcaagaggtctgatttaattggattaataatgcgtcggaatgagcttgccactgagatcctgaaggcatcgatttcacagagttttcccccgatgatacaggcgcatggaggcaatgctgcaactagtgggcttggtgatttatttgataatctcgtgaatcacttgacagttgcacatcatacctttcttaaacactgggacagattgatcgatcttgaagctagagtttctcaggtcaagaagaaggaaattttccagccacatcattcaaatactgggagcaggcattcttccccatcttattttgtccttgatgttacaaatggacattcaatagattcatctggaaaaagcaaaagatacatatatacttttctgcgccagaagttgcagcctgagacagctgatcagccaggagaacatgttgaaagtgtagattttagcctcaaatgcggtgattctgtggtgcttagcacaaaatctgggcgaatagctgttgcaaatggatacataagggacctcagccgtgcccatataacggtttcattgccacgacgtctgagacttccaggaagtaattccttgttagagcaaggagatctccaatgtgaagtttggcgtatagataaggatgagtctgtttcttcatttgctaccatgagactcaaccttgtccaactatttgctgagaatccacaaaactctcacctaaggaagttgattgttgacctcgaggctcccagatttgatagtggaggactcctaagtcaagatccggcactatcatatatacaatcattgccaaatttgaacaatgaccaacagagatcgctgcataaaattctagcagcaaaagattatgcgcttatcctaggaatgcctggaacaggcaaaacatatacgatggtgcatgccgtgaagtcattattgatgagaggggaatctattttgctaacctcatataccaattcagctatagataatttgcttatgaagttgaaggctgagggtgtagattttcttcgaattggaaggcatgaagctgtacatcctgatgtcaaaggccactgcttgtcaacttcggatatacaatcagtagatgccgtcaaagctagaatggagcaagtgcaagttgttggagtcacttgtttgggaatttatcaccctttactagcacataagaagtttgacacatgtatcatggatgaggcaggccagatcacattaccggtatctctgggacctttgatgcttgcaacaaagtttgttctagtaggagatcattatcagcttcctccacttgttcagagttctgaagctcgagagaatggtatgggtgtcagtttattttggaggttgtcagaagcacaccctcaagcaatttcagcattgcgatgccagtaccgaatgtcatctggcattatggagctctcaaattcattgatttacggcaataggttatcctgtggttcgttggaaattgcaaatgccaaactcaagctttctggcagaggtcctgttcgcttgaagctgaaagagatcttgaaccctgatagggctgtcgtctttgcgaacacagatgaagtaccagcttttgaggccaaggaacatagaactgtgaacaatcctacagaagcattaattgtttcatggatcaccaatgaattgctaaagagaggtgtagctcaagatggggttggtataataactccatataatgcccaagcaaatctcattcagcaacatgtagacgcttcagttgaggttcatacaattgacaagtaccaggggagggataaagaatgcattatagtatcttttgtacggtccaacgggaatacaagggctagtggttcttctttgcttggtgattggcacaggatcaacgttgtcttgacacgtgcaaagaagaagctcatcatggtgggatccgctgcaactctttcaacgatcccattgttgagacttatgattgagaaggtagctgagcgtggcggtcagttagatctgacaaataaggatgtacagtcaattcgagagctaacaagctctcgattgaatgtacaatag

SEQ ID NO: 69768 - DNA, 144 bp, Oryza sativa
  unsure (1)..(144): unsure at all n locations
  Clone ID: PAT_MRT4530_70405C.1
ttttnncaactaaaaacnngagcaaattttctcaaattgnnnnacacaactctataaannnncccaaatagatcactggaatagagcgaaaaagagagangnnngggacgacgcatgcngtatcattcttnagctcaagccttg

SEQ ID NO: 69769 - DNA, 132 bp, Oryza sativa
  Clone ID: PAT_MRT4530_70406C.1
acgctattgaatgtgattcagagtactcgtggagatgctcagaggtatgtatcgacaaacacagatcttactgtgaggaaacataaagacggacgcagccattctctgttattaggcatcacttagagacag

SEQ ID NO: 69770 - DNA, 814 bp, Oryza sativa
  Clone ID: PAT_MRT4530_70407C.1
atggcccacatatcagatattaaactgataagaacagatactacacttgatcttagccaaaaggccgagaaaggcaacttcttggaggtcggagaggaggagaggtcgaggagcgaggcgaggatggggcgcaagaggaaggagctgctgtcgtcggcgccgtggaggacgggggaggcggcggaggacgatgacgaggcggcgaggctgtcccgcgagggcaaggtgagcgtcaccagcaaccccggcgagacgcccaccatgcacgtcccgcgcaacaagcgccaggacctcgacctcgccgtcgacgacttcgacgaggacgagatcgaccccgagctccgctactccttccagcgcaactccaggtttctgcggagagtatttagtgtggatacacttgtcaagcctcttcctcctgtgatggcatacagtgtttctcgcaatgtgaactttttcttcaagatcttcacacagttctgggatgaagagggaattgccaatgcacagaaatcccttggactggggaatgaggatggctcccggcggcgttgaataccattttgtagcaaaaccaagctatgcattgagagatcttacgctagattctggaggcctttgttgtatgcctcaaatgacacttggtgtggtctgtctaagtttggttctagtgttcgcgtcttgcattttgtgctagtaaagttggttgcgtcatatattcagatgttgtaagcttcgagacttgtactcagaaatctcgttctggcttctgtttaaaaagttgaaaaggggaaaaaaaaaaaaaaaaaaaaaa

SEQ ID NO: 69771 - DNA, 424 bp, Oryza sativa
  Clone ID: PAT_MRT4530_70408C.1
ggcacgggaaaatggggcttcttttcactaaaaaaaaatttttacaattccaaaaaagggattcctttgatcaaaaaatccctcctactaaaaacacatcccaaaacggatcccccacagggggggcccgcccaacaccccgttcggaagttaaagagaaaattttttatttgcccaattgatcccagtttaatacatttgaaaagagacaatctattttaacaagaggtttgaagcatggacatgtacgggctgggcagggaacaacccaacagtttcagcatgggaccctccagcaatgaaaatacatatcaccctggactggggttccgtttgctgaccatatgaattggaaggttaacgaaaaatctgcataacgtttaaaatccattctttcctttcaaattgattactgaaagttcct

SEQ ID NO: 69772 - DNA, 522 bp, Oryza sativa
  Clone ID: PAT_MRT4530_70409C.1
cagtcctataactgtaacttcgctgacgtgcattctagtaaaaaaaaggttgggcccacacgtaaatggccacctcctatacttccctctcttctctcctcatcttcatgttggggcggtgcacccacagctgccgtctccccagttgactcggccttaggcgccgaaagggtcgtcgacgtggaggagctcggtggaagcgtgggcacaggaggaggtgggtgtgaagcaaggagctcgacgagagcgtcggccacggctctgctgaggatagaggagcacgtgagtagagaagaaaggcttctagccattggcgtgggcgccgaggaagccctcccagcagtggtgtagggatgggcgtcagcgccggaacccggaagcgtgcgtgggtgaggtcccgtgccaggtcagcgcggtggtccccatggtgtgaaaccgcctcaacccgccgcccctttacatgtacatactgtcatgtaagcccttcggcactatgtaagcctttctgccaaaaaaaaaaaa

SEQ ID NO: 69773 - DNA, 405 bp, Oryza sativa
  Clone ID: PAT_MRT4530_7040C.1
atctggttgaccgcccataaccgcgggcatggctattcgaatacttttcctctgatcaaaggtgttcaactgtacccacaagacacagccccacgacacgttaccgtgcgccggcatgccaacacgacataccggaaagaggccgtgacaggacccttcgcataacccgctctaaccaaacacaccacacctcaggtttcacccccactcctcgcaaggcagcgggcagtcccctctcgtgcctaggtgaatctgaaagccgcataggccgtcacagggcccatccgaacttcatcacgctcacccttgcctggatgcgtcagctagaggaaagctacactacaagcccaaccgttgcccacactggcatgtagtaagtacggtaagttcttccagggcatcccg

SEQ ID NO: 69774 - DNA, 861 bp, Oryza sativa
  Clone ID: PAT_MRT4530_70410C.1
atggcggcggcggcggcgggaggcgatggtgaggcggcggtgatgcgggcggaggtcgccgcgctccggctccgcgtacaggagttggagagggagaaccagaggctgggtaagattgcttcgagatgcacctgcggcagctccaaggacgacagtgctgcttcctctccagtagttagtgaaagtttgtccagcagtaaacaagaaccacagaagaacgtaaagtcacattgtagaggttgccaagtgggggttgtaagtcactgcccaaagcgattaattgctctgaaaatcatgtactttggtcagagattttatggctttgcttcagaagcccacacagagcctacagttgagtctgagatatttaaagcacttgaaagggcgaagcttctggttggaagtaggaaagaatcatgttattctaggtgtggaagaactgataagggggtttctgctactggacaggtaatttccttatttctgcgatccaacataaaagatgccaaattggatgtactagacaacaaatctggagattttcttgcaagattctcttgtttgggcagggaatataagtacctgttttggaagggcgacttgaatatatcggaaatgcagaaggctgcattaaaattcattggcgaacatgactacaggaatttctgtaagatggatgcagcaaacgtgagtaactacaggcgacatattacagattttaatatttcagcctatgaccaaaggtctaactatgatgagctgtgggccatcacaatcaaggggagtgccttcctgtggcatcaagttcgctgcatggtagctgtgctatttcttattggtcaaggtcttgagacaccatgt

SEQ ID NO: 69775 - DNA, 327 bp, Oryza sativa
  Clone ID: PAT_MRT4530_70411C.1
atggagtggcaattctcggaggtccagctcgtcaatcagccattacaaagagccaccagggggtaccgtcagagtggtgatgaaccaacgctgtttgaagaagtcagcatggtgaatgttggagatagactagacggcggcgtgggtggtgggagcagcaccgaaggcaggggcttggagaagctggcgaggaaggcacgctacgcggtgttcgccacgatcgagggtgggagcaaatgtgtcatcgaccggccgtcaaagtcgaggactaccacggacacgtcgaacaggacattgaagttaaatgtgggaaataaaatttcctaa

SEQ ID NO: 69776 - DNA, 2973 bp, Oryza sativa
  Clone ID: PAT_MRT4530_70412C.1
ctccggctaactaaacatgagtccacatcaccactttcttttagctctttgttggggggggcggggtgttctacattaatccacacgttcgtgcagtagacgtccacctgctgctgctctctgtctgctcccatcgaacaattcaagaacctccctctgcactatccaatgcaatctccaataggaagaacgatgcacgaaatggccgtcctgccggagtcacgccggctctccctgctcctcatggccgcctgcttcctgcttcaggctctcagcgcccacgccatcacccggcattacaagttcaatgtggtcatgcggaacatgacacggctttgctcaaccaagcctatcctcactgtcaatggcaagttcccggggccaaccctgtatgcaagagaaggcgataatgtcctagtcaaggtcgtcaatcatgtagctcacaatgttaccatccactggcacggggtaaggcagatccggacagggtggtacgatgggccagcttacataacacagtgcccaatacagccaggaagcagctttctctataatttcactataacagggcaacgaggcacactcctctggcatgctcacatcaattggctaagggctaccgtccatggtgctatcgtcatccttccaaagcttggcgtgccctaccccttccctgcacctcacaaggaggctgttatcgtgttaggagaatggtggaaagaggacacagaaactgtaattaaccaggccatgcagctaggagtgggacccaatatttctgattcacacaccatcaatggtcatcctggtccgctgtctgcatgtgcttcttcaaacgagtctgtcaaggaccgctgtgatcatccccagctgcccaccctttaacgaagcaaaggcgcacagaatgaagacagcattgtcaagattggagatcacgaggtcacacgaaagcgtgcggcgcatactccgcaagcccatgtatctctatgcccatgacatcaacccgaaggtaccttgaacgtccttgttactgcgcaccaaggcgctgcccgttaccttctctcagtgcccccctggatggatgtgcccgtggtggttgacaacaaaacgggcaccgcgactttgcactacgccaacacagtctcgtcaagcatggcatccctcactctcgtcaagccaccaccacaaaatgccacccatatcgtatcaaaatttactgattcactccatagtctcaattccaaggagtacccagccaatgtgccacagacagtagaccactcccttctccttaccgttggcgtaggtgtcaatccatgtccaagctgcatcaatgggacaagggtggtgggcacaatcaacaacgtgacgttcatcatgccatcaaccccaattcttcaagcccactattacaacattccaggagtgttcacagaagacttcccagcaaccccactgcacaagttcaactatacaggaagtggtcccaaaaaccttcaaaccatgaatggaaccagggtttacaggctgccatacaatgcttcagtgcaggttgtactccaggatacgggaatcatatcaccagaaagccacccaatccatttacatggctttaatttttttgtggttgggaaaggggtcgggaactacaaccccaggacctccccttctacattcaacctcatcgaccccatcgagaggaacaccattggagttcctactggtggttggacggcaatcagatttaggtcagacaacccaggtgtttggtttatgcattgtcatttcgaggtgcacacatcatggggactcaagatggcctttgtggtggataatggaaagagacctagtgagactctgattccaccacccaaagatcttccgcagtgttaaagcttcagcaatggcggatggggcgctgcccttgcagacatctacgctcgcaaggctgatatccttctcagagggtatattggttggaactcaaggcgcgcccttcaagtcattgacaaaatttttcccaaggattcgcccgtgcaaccttctttggtaatagtttactttggtggcaatgattcggttgctgcccattcatccggccttggacctcatgtgccactagaggagtacatagacaacatgacaaagatcgcagaccacctgaagagcttgtctgagaagacccgtgtcatcttcctcagctgcccaccacttaacgaggagacgctccgaaaatcaaccagcactgtcctgagtgagatagtgcggacaaacgaaacttgccgcctatactccgaagcctgtgtatctctatgcaaagagatggacctgaaggtggttgatctttggaatgctatgcagaaacgggacgactgggcgacggcctgcttcacggatgggcttcatctgtctgaagaagggagcaagattgttgtggaagagatcctgaggatcctcaaggaggcagagtcgggatccatgcctgcactggaaggcgatgccgacagagtttggggaggactcaccctatgatctcgtctcctccagcggccaatccaccgtcaacccctccgactggaccttccacaggactatccaatgggactgaccttccattcgtctcaatctcagtatctcatgatggagcatatacatgcatgctccaacgtgcaacattacatgcatgattcataattaagatccccttcggtcttactatatatgtaggggtctaatgctagctgatgacgaggggtcatggattaggcttcagctcgatcgagctgaaaaaaaatcagatttaggatgatattaactgctttgctccctgcctgctatatatcataagtgagacaatgcacatgattatctcgctatatactatgtgactcatttcgctaaaaaaaaaaaaaaaaagagcgcgctagctctagagagattcaagctcgcgtgcgcgtgcagtcaaggctcttg

SEQ ID NO: 69777 - DNA, 138 bp, Oryza sativa
  Clone ID: PAT_MRT4530_70413C.1
atggcggtgggatggaggcgggtgcagcagatcgggagcttgaggaaaatccggacggaagaaacgatgagcactggcaacccgctgttctcagatgtcgctctactatgtacccggacagggaggacttacaagtga

SEQ ID NO: 69778 - DNA, 744 bp, Oryza sativa
  Clone ID: PAT_MRT4530_70414C.1
cgcaggagttccatttctgcgaaaaagtgaaggagaagctggagcatgatgcttaccaggagtttttgaaatgtcttcacatatacagaccaggaaattattactaggagtgaattgaagaacttggtgaatgatattcttcagcagcatccagatcttatggatgggtttaatgaattcttggagcactgtgagaatatagatggttttctggctggtgtcttcagtaaaaggcaaactggacgaattgttaaaactgaggaaaggaaagagggaggaaagggaacagaaaaagaaccggacagaatcgagaaagtaccagcatataaggaagctcctagccaaaaacctgtgttctctagcaaagaaaagtatatatacaaacctgtatcagagctcgatctttcaaattgtcagcggtgcactccaagttaccggcttctacctaaacattacccaatgcctcccgcatgcaacaagactgagcttggagcttcagtgcttaacgatcactgggtatcagtgacatcaggaagtgaagactattcatttaagcacatgagatagaatcagcacgaagagagtttatttatatgtgaagatgacagatttgagttggacatgctgttggtatcagttaatgcagcaactaagcgtgtcgaagagttgatagaatagatgcatgacaactcccttaaaccagatagccgcatacgcatcgatgagcatttaactcctttgaat

SEQ ID NO: 69779 - DNA, 249 bp, Oryza sativa
  Clone ID: PAT_MRT4530_70415C.1
atgacgagattaattaagtcacaggcctataaaggagtagagtgctggcggttgatgggatatctaaaaactattaataaaacaccaaatagaatcctaacgacaattaaaaggaaggacgacggacatgtcgtgaatcaatcggttaagacggttgtgacaataaagaagggtggcaacggacgagtcatagaggagtacagtgacaaagtcgctgacatagatatatgtttgtcgtttcggtcatca

SEQ ID NO: 69780 - DNA, 5848 bp, Oryza sativa
  Clone ID: PAT_MRT4530_70416C.1
agggtaacatgcaaaactatattaacaggagtgacaagttagtgtagccagtacaattaacctgaataaatgcattctcatgatacatatgtacacaattttaggccattaagagaactcacggttgccacacactttagcatttaccagagtatcccatctattattccaaaggtacagttgtctgaaattttggaatattaaggttcacatgccgccagctttgaagtgctatgtcttctgttttaggataacatgcaaaactatattaacaggagtgacaagttagtgtagctattagaaattattagtgtatgtattacaagtctgtctaatttaccaaagggatagatcgatcgattacaatagctgtgtttgacaacgttagattcaatcaaaaacatgggtgggtcaaaaaacagaggggcctataccaacagcaacaaatgatttgatgatgagttaatagaataatatccatcctcctacgaccgagagagagagagagcagtaagtaaacaattaatattggtaaacctggaccttactgaacaaacaacattaattctgctaatacatatgtacaacaaacacttctttcagcacatcggagctgactgcggtgctcactcatgctttgctttgatttgctttcctctcctcctgtatttaccctgttatatagtattctgtaacatcgtcctcttcccagcagcaagcacttgttattccaagggggtcaatcgatcaatctcccacagcttcttctctcaatatcgaagcaaaacagtcgcgatctcggcagcagcatctcctgatttagttacaacaaggacagtattttgccgatgacccctaaggcttggatagaaatctatggaagcgctgcactttcgcagcatatgtttttgaagcctgcagcttctcaggcacatttccaacaggtgaaaatctcctcctctttctctatcgaaattcgaactacctgccaaagaaaaaataagtaaccttagaggtcttgcatgatatcttgcattcaaggccattagcgactttgacaccatccatggccttcaacgaatctgaaggctcgtcgttatttgaatgcttccgcttattcctttccaggaagacaccctcagacaattttctgtctgacatactcgacaaatactcgttaaaaagatacgaggaaaaattgggatcaattgatactgcagtcacttcaggcttttcatggccatattccatcagctgaatagacaattttgtaggatttgagcaacattcaaaccggtatatgctctcttcatggaggagcacgcgtgcattttcatgatagactagatcaaagaacctcccaggggatcttgatttttcatataaataaagctggagaagcttgttgtccatttcatctgttgctatagcttgaagctgcttcacaactttatatatcagtttatccaaagtaaacagaacataggactgagtaccaatgatagaacggcagtcatcctcaaacttggtattatccgaagaaccatcgagcaagttgtaaagtgcacttataaactttgcatataggtcaggtgggtttgtatccttggaagttctccatttcttttcagcactggatgagtttgtcttagccgaaagtaatctttcgtacaagatctgatgcagcctgaacagtacataaaatgaatcattcccataaaatatacgcgaggacttttcatctcggtcatgtaaagctgtgggtacatgcttggcaagtggttttacggagtgtagaaagcgttccgatagcgggagtgatattcccccttccacatcatgtgtctcagttgttccttctgcctcaccctcactttcagccttggcatcctgatcatcatgatccatatcttcctcttcctcatcatgatcttcacgagagcactcctcaccatcaccagattcacttcctgatgcatcttcaccaccctcggaggcattctcactgtcctcggtagacctttgtgcgctttcctcaccctcatcatcagcatcagcatcattctcaccagctgcttcagcacaagatggttgtgcttctccagacctaccctggaatggtctgcttgtggaaccttccttcgctttagatactccatctacagctccatcttcaaaaggcgcaaaattgtcctcttcaaaatccccattaggagataattcaccctcttctctttcaacttttggggtattgtgggatgcagaagcttcattgaataggcgccctttgttaccctcacttgcacctccaccatttaaagttgatcctgacctccctgtttctccaccctctactgatggtaatgtttcatttccagcccgggcttcagcagcagtgtcatttccagcatgagaacttctagaagcattcacacctgatgttggttccaaatttgctttagcattgccatgctgttcagtcctagcaacaggaatgttctctgcagacctctcggtaggcatgttttgggtactaacagcgggaatttcattagttccaggggaagcaccttgcactcttccatttacggcagtattcgatggttcctcagccctacgagcagttcgatcaacatcatggaaaccattttgagtatctgttgctactccattcaccattctagccagagatgacggtgtttgctcctgtggaatattttcatcatggccatgcttggcaacagcccctgctgcagtagtgttgatttccccaacagttgcaagaccagactttgtggttcgactcttgggtttgactgcatctgcatcctcagcaccatgtgtccgaggctgaacacccaaaattggctccagaaaagttgtccaaattctcacaactttgtccagttggtctgaggaactgcagacttcaccacaggagtacttaatgatcttatacatatcttcatggatgtttgaatctacatagtcaaatgacatattgggaactattggacgcctatttccagcagcaatagcaaggagcacatcatcttcctttcttttcttctcattaatttctttgatctcagttaatagagattttgtgctcaggttctttgtatcttgctgtttgaaatagaaactgcggtggtcaagagacttgtgataatttttggcatatatctctgcccaaaccttgttgaaatctgatcggcaccttgaccattcttcctgcttctgtttaagcctagttaagatgactggtagagcaacactagcgttctttcgaaggacatccatcacatccagaccatggtcaccatataaccgttcaatgcacctcagattcaaaggagttaaatgctcatcgatgcgtattgggctatctggttttagggagttgtcttgcatcttttctatcaactcttcgacacgcttagttgctgcattaactgattccaacagcatgtccaactcaaatctgtcatcttcacatctaaataaactctcttcgtactgattctttctcatgtgcttaaatgaatagtcttcacttcctgatgtcactgatacccagtgatcgttaagcactgaagctccaagctcagtcttgttgcctgcgggaggcattgggtaatgtttaggtagaagccggtaacttggagtgcaccgctgacaatttgaaagatcgagctctgatacaggtttgtatatatacttttctttgctagagaacacaggtttttggctaggagcttccttatatgctggtactttctcgattctgtccggttctttttctgttccctttcctccctctttcctttcctcagttttaacaattcgtccagtttgcccttcattaatataattagtgttaacatgagattttttactgaagacaccagccagaaaaccatctatattctcacagtgctccaagaattcattaaacccatccataagatctggatgctgctgaagtatatcattcaccaagttcttcaattcactcctagtaataatttcctggctgtatatgtgaagacatttcaaaaactcctggtaagcatcatgctccagcttctccttcactttttcgcagaaatggaactcctgcgtgtatacactcttaagtgcatctttattatcatataatgaagcagatgcaccaagtattccgtgattttccaggggccctccatggtgtgcatcagcactggtagggtcctccatcttccttggaaaaggtttgcgcttaagtcctatatcaagatctttgctgtcaagttcaccatccttatcgcctctatcataatcatgcctatccttagggcgtcttcgctggataacatggtccagatcaggacgatcaacactctcacggtcagcatgtggatgagccttatccctcttttcattcctactagcaggaggcaccagagaggtcctgtcatcccgcctaataccaggccttgaaggggccacagcttgtggaggcacggaggtatcaggcaagaagtgttggaactcttcgagtaaatctttgtggtctgcaaacaacacagcaacctcatggtaaacatcttggatggatttattgtccttgcggtacatgttgaggatgtctaagaatgccttatagacatgctcatcatgctggaaccgattcttaatcttgtttacgaaattgatggcttccacgaaatcaacaggcttcttctcctcctgcagcttgattgcataacccttgggcaagaaggtattgaagccaaggatgagctcagggtacccgttgaagagtgtcttgacacgaataatgactccgttggtatcaatcctctcactcttgaaatcgcgcatgacctcgaggaactcctcgtatttctccctcttgtcctggaacttatccttgacggccttgaggtagacgagcgcatcgttcgtggtgagcttctggccggccgttgcgccgccggcgggcggctgagcaggcggagcagcggcggcctgaggcggcggcgaccggcgccggatctgcccgccgctggctcctgcgagaccccccgagcgcggcgcgaagagggcgcagcgcgaggcgaaggcgacgcgcggggaggagaggcggctaatcgcctcggcgagacgcgagacgcgagagggaaggatgggtgaggaacgaggcaagggcgaggcgaagaagaagaagagaagcgaggcctcctcttcggtgccaccacgctgccccgcgcccgtcgcgaaccacatcccgcccgcacatccccagataagggacacgtggacgtaccggatcgaccgccctagtgtttgttggacaaaccacagcactggatttccgagagcaggaattaggcttactgccaccagcggaacagcacaagcaaaaagccagggccaaatgttgtttgctggatgttttataggcactggaggtctaaacttttcaagctcttcgtgcaaatccgggtaattttgaaacagcagctgtaactctcggtaggcctcaagccgggatagctccattcttccaagaatgtcaaacaatgacaaatacaacatgtagttacaagccttcactttcttgacaaatctgagcgagtcttcaaatgtcagtggccctgatttagatgccagggcactaaagacaaccatcatccttgagtctgccctgaccatctcatttgctctagccatagtaacactctagtccctgggcgatcggcggaagcaatttagggttgagcagggggttgggcttgcagctcctccccttcccctggctgggctggctagtggctagtcccgcaagcttggaatataccaa

SEQ ID NO: 69781 - DNA, 246 bp, Oryza sativa
  Clone ID: PAT_MRT4530_70417C.1
gcgccgagccgctccgagccccgcgccgcgccgcccgctcgtcgccatcgccgcgcgccgtcgcccgtcgcgtcgccgtcccccgagggagccgtggatccaagcgaaggccaagacccgcaagactttgagcaaggcaagtcatcactattccttgaacatgttgatcctaattgtgaaattgttttgtttataaataaaattgcatgcaatgatgaatatcctacttgtgattatgccatgcct

SEQ ID NO: 69782 - DNA, 502 bp, Oryza sativa
  Clone ID: PAT_MRT4530_70418C.1
agtcatcatcggcctagtgtcactatcggcttcagagtcatggaatcgaccgatgggaattatcaagttgtcaatagtaggattcttattatatttggttaaggaaattaatatattaaagaaagcttatccagaagtggccgagttcaaggaggatgtggccgagttcaaagaaagaaggtcaactgagacagttagtaagtacttcggagaggtattgtatgctgttggtgagctgagaaatgatttggtcaaaccaccttcaagtgatattcctcgaacaattcttggcaatagaagattcaacccatattataaggattgtattggtgcaataaatggaacccatcttctatgtcagcagcgtttaggggtagaaagtgtgttactacccataatgtaatggctgcggtggattttgatcttaaatttacatatgtacttgttggctgggaagggtctgcacatgatgccctcatacttgcatatgccttagagagat

SEQ ID NO: 69783 - DNA, 334 bp, Oryza sativa
  Clone ID: PAT_MRT4530_70419C.1
ggacaaagctgacagaccgtgacgaccgcacgtacgtaccctacctgtacctggacggtgacttggacgggacgcacgctgtgtttcacggtttactgttgcttggacaatcacgacctaccacgattattcactctacctccggcgtctggctaacctaccggacgtacacttggtgtacgacgacttaccttcgaccgacggctactactgtaccaacacctgggcctgatgatgactgacgaccgacacacttgtacacttggtaacacttatattttatcacccatatcactacaacacacacacacacacacacacacaaaacacaaac

SEQ ID NO: 69784 - DNA, 442 bp, Oryza sativa
  Clone ID: PAT_MRT4530_7041C.1
aaggtggcggcgggtagaggagacaccgggggtccttttaaaggggctaggaggcggcggcgaaggcccacggcgaccggcgacgagaaggaaagttcgggaaaaacgaatccgaaacaaactcgaatccacgaatttccaaacgattttagccgatgtttccaaaggagaaaaggtagaggagatcgagaagatcatttcccctctattgattcggccggaaacggaaaggaacggctggatttggaaggaaacggcggcggcggcgcgctagggtttcgggcggcggtggcgcgaggtagacgatgggtccgacaggtgggacccacctgtcagcgacagcgagggcgcgcgcacggcggctgcggactgggtcggctgggccgaggagagaggaaggagttttgggccgactttcggcccaaagccaaaagaagacttt

SEQ ID NO: 69785 - DNA, 216 bp, Oryza sativa
  Clone ID: PAT_MRT4530_70420C.1
tgtacggccctataatcttatgcatgcactacactacaaggcgctacactatcaggcgggcattgagtggagaggcagcatcctaccggacggcaatggcggcgacctcgtgcgtgttgcatcagtgcacgggccgagacggagcgcgcgtctcctctgcgtccccggggacacggacccaccttctgttttgccgcgctcagaagcaggactact

SEQ ID NO: 69786 - DNA, 1936 bp, Oryza sativa
  Clone ID: PAT_MRT4530_70421C.1
tagtggatccccgggctgcaggaaaattaatcccactcctccccattcccccgcaggcagaggtagtagtagtactagcccaagaagaggaagagcaatgacgaagctggagtgtggaatcctcccgccggcgacgagaggccgctctagatcgacatggacgcgcaaatggcggccgcggcggcgcaccacccgctgccgcatcagcagaaggcggccaacctggcccgcaccttcaccaagctgctccgccgcaagcgcgctgacgctgtcgccgccgccaccgcggtgggagagcccggtgtgcccgatgcggccgcggcgtctgtggttggagatgagtacgagtgctccgtcgaggcggcggcggcgggtgtgccgtcgttgagcaagctgaagctgtccggtaaccttggcgcggcgtattcgctcgacgcgttcttccgcaatgcggccgagaagaaggcggcgggggtggccggggtggcggtggcgcagacgtcgccgcaggtggcgccggatgtggcgaaggattcgttgctggctaacctgttcgctggcgtctcggcggtgaaggcggcgtacgcgcagctgcagctcgcgcagttcccctacgacgcggaggcgattcaggccgcggacgccgcgctggtggcggagctcaccaggctgtccgacaccaagcggcggtatctccgggaccccgccgcggcggccaagaacgcggcggcggcggggcacaccgcgctgtacgcgcacgccgaggagcagcggcatctcctcaagacgtaccagatcacggcgaggaagctggagggcgagctccgcgccaaggaggcggaggccgaccgcgccaggagctccctcaccgccgagctccgcgccgagcgcgccatggaggcgcgcctccaccccgggcgcaccctcgcgtcgctcgacgagctccacctctccggcctcaaccccacccacttcctcaccgccctccgccacaccgttaagtcgatccgctccttctccaagtcaatgctcaactcgatgcagtccgccggttgggatctcgccgccgcggcggccgccgtgcacccgggcgtccagctgcgccgcgccggggacaccaagttcgtcttcgagtcctacgtcgccatgaagatgttcgccaatttccaccggagggacttcaacctcagcttcttggacgagcgggagttctacgaccgccgccgcttcttcgaggagttcacggagctcaaggcggcgccggcgagcgccttcctcgacgcgaggaacgcgcggtggggcgggttcggcaagttcctgcgcgccaagtacctgtcactggtgcacgcgaggatggagacggccttcttcgggaggctggagcagcgcggcatcgtgagcgccgggccgggcttcccggagagctcgtggttcgccgacttcgccgagatggcgcgccgcgtctggctgctgcattgcctcttctacgcgttcgacggcggcgccgaggaggacggcgcctccatcttccaagtccgcaccggtgcgcgcttctccgaagtgtacatggagagtgtcagcgacgggcgctccgacgaggccgccgccgccgccgccgaggaacgcgtcgtcgggttcaccgtggtgccggggtttagagttggccggacaatgatccaatgccgggtctacctgtcgcggccgggacggcggccatgatgggttgtgacaaagccgtcttgtttcaggtgtccggcggatgataaagggggaggaatgtccattttggggcggccgtcgaggtctcccgccggcagccggctgcggcggcggcggcggtgttggtgatgatgatcagtgggtggttatgtatctattaagggatgtagtggtggtgatcataatataaatggcattttaagtttggctcccaagg

SEQ ID NO: 69787 - DNA, 470 bp, Oryza sativa
  Clone ID: PAT_MRT4530_70422C.1
tcggggagaacgtcggcaagctcgttgaggcatgcgtcgccgaggtggcgctgtcagcgattagcaaggaggagaccgtcgcggctgtgctcgccgcgctggccaagcgcggcggtgcggaggcgatcgtcaatattgtcggagtcgtggctcgtcttgtggcggcatttatgttcggtacggactgtgccagggtgaactccacggttgcgctcgtgctgctttgtcggggcctgggcgccgccggcggtgacccatgtcatggtcgtgccctgtgtgcaatgggcgatctgggagctgatgagcattggctctgagcgcgctcggcggaaggccgcctcgctcggcctgatatgccggctgtgggcagacgtcttcgtcaccacggtgagcgaggcggcggttgccccgttgcccaccgggtggcccctgccatgatggttttttgaaacccattacaactggcttgg

SEQ ID NO: 69788 - DNA, 396 bp, Oryza sativa
  Clone ID: PAT_MRT4530_70423C.1
atggcggcggtggcggcgccggagccggaggcgacgtgcggcggtcaagcgatgagggtcggcgcgcggcggccagccgaggaggacaggccggacgcgagttctgggcagagcgtcgtcgtcgtcgtcgtcgtcttcggagacaccgcagtggtcgtcgtcgtgctccacccgtcgctcgccgccgctctacccacctcctgccgcctctctatgccgcccgccacccccaacaccacgctgttgcacggtgcgcgctttgccggcggcgccggcttcctccacctgtctccgccgcgcgcggagctcctcggccctccgccttgtattctcgccttgccgtcggcgcgagacccgccatcgcctgcctccatggactgctggatatatcggtaa

SEQ ID NO: 69789 - DNA, 505 bp, Oryza sativa
  Clone ID: PAT_MRT4530_70424C.1
ttaaagacttatgtgtaatggtcatcaaataagtgagaatctatatctcagatgggatagcacgcgagtttattactttgaaaatgagtacctgatggatttattcttaacatgtttatttacttttgattttaattattttataaattttttttatttttactttattattctatttttactattttttatcttatttatttcatttcttttttttttttcatttttttttatttttttttttttttttttatatttcatattatattttatattttttaattatttttttatatttacttaatttttacttatttttatattactttatctactttttattcatttttttacttatatattttttctcttttttatacttatttttataattcaattcatatatattttatatattttaatattttacattattttatcttttttttatttttactatttatttcatttttcttatttctatatttttctatttttatctttc

SEQ ID NO: 69790 - DNA, 999 bp, Oryza sativa
  Clone ID: PAT_MRT4530_70425C.1
ccacgcgtccgccgcctgctcgctccgcgcctctctctccccgctcgcgtcctcgctctgcgcctcctctcctcgcgacggtccaccgccggaccagcgacctcgcctcctcgctccgcctcaatgccggaccagcgccgaggcactaccgcactgctgcccacggccaggcacggtccagccgcctctgaccggcaccacagcgcctccgctgctcgcagggacgccgccgctacccgcccggctacctccgttgccgccgccaacacgctagtctcctcctccctgatcgagatcgagtcgacacatacaccaccaaccaccggccggccgccgcgcaccggcgagcaggatggggaggccgccgtgctgcgacaaggttgggtgaagaaggggccatggacgccggaggaggacctgatgctggcctcctacatccaggagcacggctccggcaactggcgcgccgtgccgaccaacaccggggtgatgcgttgcagcaagagctgccggctccggtggacgaactacctccggccggggatcaagcgggggaacttcactgagcaggaggagaagctcatcgtccacctccaggctctcctcggcaaccggagggatcatatggaggtgatttcaccaatgaaagatggaacatttattgattgggatattgttgacaatatatggaatcatgctttcagcttttatcctgaggagcatcctatgttgatagttgaaccatctacaaacacagggcagcaaagagagaagtatctattgactttaaagatcatgaaggcattatgcatatatcaaggctttgacatggtcttcgtgcaagaataaaatgccattttgtgttcgccaacaagagttatttatttttaatcaacaattgtgtgtcttacttcaaggtcactgatctaatggtttagtcttgcacctgtcacttgcttataatgttgtaaccccgctcctgtcacttgatagtatttc

SEQ ID NO: 69791 - DNA, 936 bp, Oryza sativa
  Clone ID: PAT_MRT4530_70426C.1
ctaaatagccggggcccacatgtcggtgacttggcggctagggaagcagaggcaataggagggcaacggcgactgatggcgttcgcggctgcgtattggcttgatcatatttgggcgtctttttcctgggacgtaggcgacgtcgttggcgcaatggctcggccggagatggttcgagtcgacgggaatgacgaagtggggcgatggcggcgctatggacaccgggaacgccgacgagcatatcaccaactgttcgatcagcgccgaggcactaccgcactgctgcccatggccaggcacgggtccagtcgcctctgaccggcaccacagcgcctccgctgctcgcagggacgccgccgctacccgcccggctacctccgttgccaccgccaacacgcgagtctcctcctccctgatcgagatcgagtcgacacacatacaccaccaaccaccggccggccgccgcgcaccggcgagcaggatggggaggccgccgtgctgcgacaaggttgggtaaagaaggggccatggacgccggaggaggacctgatgctggcctcctacatccaggagcacggcgccggcaactggcgtgccgtgccgaccaacaccggggtgatgcgttgcagcaagagctgcccgctccggtggacgaactacctccagccggggatcaagcgggggaacttcactgagcaggaggagaagctcatcgtccacctccaggctctcctcggcaaccggagggatcatatggaggtgatttcaccaatgaaagatggaacatttattgattgggatattgttgacaatatatggaatcatgctttcagcttttatgctgaggagcatcctatgttgatagttgaaccatctacaaacacagggcagcaaagagagaagtatctattgactttaaagatcatgaaggcataa

SEQ ID NO: 69792 - DNA, 395 bp, Oryza sativa
  Clone ID: PAT_MRT4530_70427C.1
tttttacatggctttcacaggtatgaagactctggcgatgatgatggattgctgttgaaagatacctttacaggagtaccctcccgtcacattttaggtgataccatcaccaatgcatgaccgaacatcatacatgacaacagtccccatcttgaaatgcttgaggagctgctctgcaaagagggaggcatgtatgagaccctgccagcaaagtgtgccagattcgggttgcctatgttgaccggtgacttagaagatgactatgaaaagcatggtccagctttgctgttgaggcaaacaaggatgtacctggtatggagaaagtcggttacatggttcctcgcctggaacctagcactgggagctctatttagtcagcaggtgttgagaacact

SEQ ID NO: 69793 - DNA, 966 bp, Oryza sativa
  Clone ID: PAT_MRT4530_70428C.1
atggggaggccgccgtgctgcgacaaggtcggggtgaagaaggggccatggacgccggaggaggacctgatgctggtctcctacatccaggagcacggcgccggcaactggcgcgccgtgccgacgaacaccgggctgatgcgttgcagcaagagctgccggctccggtggacgaactacctcaggccggggatcaagcgggggaacttcaccgagcaggaggagaagctcatcgtccacctccaggctctcctcggcaaccggtgggcagcgatagcgtcgtacttgccggagaggacggacaacgacatcaagaactactggaacacgcacctcaagaagaagctcaagaagatgcaggccgccggaggtggggaagacagcggcgccgcctcggagggtggcggcggccgcggcgacggcgacggcggcgggaaaagcgtgaaggccgccgcacctaaggggcagtgggagcggcggctgcagacggacatccacacggcgcggcaggcgctgcgcgacgcgctctcgctcgaccaccccgacccgtcgccggcgacggcggcggcggcggcgacgccagcggggtcgtcggcggcgtacgcgtcgagcgcggacaacatcgcgcggctgctgcagggctggatgcgcccgggcggcggcggcggcggcaacggcaagggccccgaggcgtcggggtcgacctccacgacggcgacgacgcagcagcagccgcagtgctccggcgagggcgcggcatccgcgtccgcgtcggcgagccagagcggcgccgccgccgcggcgactgcccagacgccggagtgctcgacggagacgagcaagatggccaccggcggcggcgccggcggccccgcgccggcgttctcgatgctggagagctggctgctcgacgacggcggcatggggctcatggacgtggtgccattgggggaccccagtttttag

SEQ ID NO: 69794 - DNA, 308 bp, Oryza sativa
  Clone ID: PAT_MRT4530_70429C.1
tccaagtgaccaagcccaatcgattgccatctgaagagaaagtgggagagaggatgtacctcgtctcgtcgtcgggagggccccaccaccaccatcagcctctgcggagcttgctgaccatttcgaagtggggagaggagagtgggggcgccgctatcgctcgaggagaaggggaagggagaggccggcgagctcacggccaaatccgccactaccgctcgcggataagggaaaggggagaagctgatgagctcctgacaagatccgtcgctggcgtcacagggaaggggagggggacatgccgatga

SEQ ID NO: 69795 - DNA, 552 bp, Oryza sativa
  Clone ID: PAT_MRT4530_7042C.1
aaaacggaaacaaacccggttggcccccacaaacaaaaggggaggctttgggggctccaacccaaaattgggcatacatagggggggacctttggcctgggaaaaccttatttaaaaaaaaaaaaaaggccccccgcccatagctttggcccataaaaaaacggaagaacccgccgggggcttggcccttccggaaaacaaaaccctacctaaaacgggccaaacgggggtttaaaaagggtccgggaaaacatccccaaggtttaaaaaagaggggaaatttcattataagctaaaccccaagggaacaaccccggggggggcagctccccccccccctggggagcagggggggttacaaaacccggcaaagggggggccggcccaaccttgccctgggggccccaggcaaccatgatcttaaccttgaggccaaaaaccccctgtttaaggagcccgtgtctcacagccgagcaaagggccccatggccgggcggaccaaaggaaatcatgtaccctcccttgaacttaagggcctgggctttttggccc

SEQ ID NO: 69796 - DNA, 493 bp, Oryza sativa
  Clone ID: PAT_MRT4530_70430C.1
ccgggtttggtacaaaagaagctactttgctgtttatggaagtatttggataggaccttgacgattttggatgggatacgcgagagcaaattatatctgttcagattgggcagaagttctcaaagccacagagcgaggatctgtactactcccgtgcaaggagcatgctgcaaaaactaggcctcgagaaatatgagaagaattttaagaagggtctactcactgatcaaactttgcctctccttaccgacagtgctctgagagatgtgaagattccccctggccccagacttctgatactcgatcaaattaaaagggatcctgagtttggaaaagcacggtgaagcctctcagcccttggctcatggctccttggattgcgtaggactgtattatctgaagctatgccatctttgttttttttatgatatgcttcctaggcaacgtattcatcataaaggttttttttttttgagagaaggggggggggggg

SEQ ID NO: 69797 - DNA, 524 bp, Oryza sativa
  Clone ID: PAT_MRT4530_70431C.1
tcgttgctactagccggtgagctagctaactaactacgtggctatggcccccaccgagatggccttctagggcacctctgtggctagagttcaagggctcaagttcaccgccgatctccgagagagccgccgctccaccaactggggcttcggcggcgttagtaatgggggaaggatcaagtgcatgcaggtgtggtcaattgagggcatgaagaagtttgagaccgtatcatacctgccagcactcaccgtggaggatcttttgaagcagatcgcgtgcctgttttgatccaggtggtagccttgtgtcgcgttcagcacggttgggtacgcctaccgagagagccacaggtctaccggatacatacgatggcaggtattggaccatgtggaagctgcccatgttcggctgcaccgatgccacccaggtgctcaaggagctcgaggaggccaagaaggcctaccctgatgccctttgtccgatcatcggcttgacaacgccaggcaggtgcagttgattagct

SEQ ID NO: 69798 - DNA, 313 bp, Oryza sativa
  Clone ID: PAT_MRT4530_70432C.1
agctgaaagaaagcagcaaaggcatgtctttccgtgttttttttaacttcgggagagcttaattacataggattattctgaacaaacactctaattaccttcttttaccatttcagacatttctttagctcgatcgtttattctcttttttcattaacaataataatttaattttttaaaaaactttatcttctcatataaaactctctcttttatacattaaatccttttatttaacggtttatttaaactttatacatttctcttcttttttttataatatatttataaattttcaatattactctataat

SEQ ID NO: 69799 - DNA, 927 bp, Oryza sativa
  Clone ID: PAT_MRT4530_70433C.1
cggacgcgtgggcccccataggatctactctcctcccctattttaattttttggttacctgggctgattctaccgcgattgaaaaatgtgtggttcagctcctcctccagaactccaagtcttctcttctactgctgctcttctggatctaagactgatcctcttgcttgattttcgctccatcttgcttcttgacctgagtttcatctcttcctagagctgaaacccttcttcatccaagaactaaacaaccctgcttctccttcagatttggttttcctctctctgattacttggccatggttactactactgttggttcatgtattggtttgagctgcacttcagttgagctatttctctctgggtggagctaacacttaagctaatttttcctggagcttggttctatggttgtaactactactgccgcagctgctgcttgttttggtttgcacgaccaacccgagacttgggttggaaatgattcacacaaattattttatcaatgataaatattgtactggtgattcacctgcttgcatggctattcccatcctgtacttgtgacacctcaacatggcttgttcggtgggataacctaaagctatttgttaatttccttaattaatggaaaattggtagagtctgaggtgtttgatacttttgcacttgaatccctcaagtctggtaaaattggaggttaccattagtttagggactgatttgtaatttgttctataacgcagggtccctttttgaaatattactaattacacgatatgttctcggctaatgtatttgtacaatatatgaaatgcatactgtataataagattttaaatatataactatatccatgtatgtatggatggttgccaaactgtactggtccattgtgaataaagtgctataacatccatggtg

SEQ ID NO: 69800 - DNA, 291 bp, Oryza sativa
  Clone ID: PAT_MRT4530_70434C.1
tgcttattaactaagacacccttccttgattgtgacactagcacgactcactttcctctatatacatatacatatatcctccttctgtccagctaacggttcatatgcttagctagctgtttgtcttggcgataccatttgcattgcttgcccagcatcgtcggcgtcgccgtcgggagcaaggaggaggagagaccatcgatcttgattgatttgaagctagacggcggaggaggcgaagatagggcaggcgaccaaagacatttcctaagagaaggctgtggagccgct

SEQ ID NO: 69801 - DNA, 819 bp, Oryza sativa
  Clone ID: PAT_MRT4530_70435C.1
atggagagggctaccacctccggaggcggcggcggcggcagccagccgccgcggggggtagggctgccgttggtggaggtgcaggcggcggcggcgtcgctgcggcggtcggaggtgttctacgtcgtgaaggagctcctcggcttcgtcctctacatgcaccaccagatccccgcggtattgcagaatcttgaaaatgaatttgcaagtttaaaggaggaaatgacagagatggcattgccaccaggagaaatgaaaccatctgatcagagaaagtacaatacacggaaaagggaagtaagacggaggatcaagaagcaggagaagttaatgaatggcctctccagcgtattttctgctcttcagaaagcactcgatgaagttcctagcattgaaggagttctcctgatcctcggtggtagccttgtcaggcctctgtttgtctatgacattacaatttctcatggtagatttgatgctggaagtgccaatgagcgtggtgcaagcaaattagcgcagtccgtttctcgaaaggccattcgtgctcttatatcaagtggtgcagggagtttatcttatacaggccctaccaagctgtttgttctagtcagatgtccctgtacattgaacttaccactggacttcctgccgaaacgtgattttcgttacagcaaaaaggttgtacccctccagatgtgtataaaatgcaatatagcaggcatccaaatagataatcaacaaataacatcaattgttgatgcttcaagatgcacttcagaatctactatttctgaggttatctggataaaagaaatttaa

SEQ ID NO: 69802 - DNA, 1399 bp, Oryza sativa
  Clone ID: PAT_MRT4530_70436C.1
attcggcacgaggagctatacaatctacgacccatgaagtctaaaagttggcctgaagtggttggagctatcctagtgatttgatcaaggatctggttcctgctaggctgcaatggccatggagcttgacaggagcctgattgcctgcgaggagccgccttcagagccgatggactttctctcgagcgcgtggtgcagctcggctatccaagttcttcagacgggatcgatggattgctcgatggcgctggtggagaacccggtcatggcgcctgacaatgataggagagacttgttgccaaagaatgaccgtagcttggttgtcgacagtagcggattcagcacgacgcaatggaaatacgatgatctgaagtcatggatatggcttcagaaggcaattcacccagagctggattatgatctcaagaagaaatggctcccgcgcaagatggcgccatggagcggcatctcgctcaagaagtgggtcaaggagcggaagcagaagcgcaaggaggaggcgcgcctgcacaaggccgaggtccacgccgcggtgtccgtcgccggcgtcgcggccgcgctcgccgccatcgccgcggagagctccacgccggcggcgacgatgaaggagaccgcggtggcgtccgcggccgcgctcgtcgcggcgcagtgcgcgaaggtggccgaggctgcgggcgccacgcgcgaccaggtcgcggcggccgtcaacgccgccgtggccgccacggacgccagcaacgtcatcacgctcaccgcggccgccgccacatcactgcgtggcgcggcggcgctgcgaggacggcgtagcagcggcggcggcggcggcggcggcagccagaacgagcggatggaccacgcgagctccgccttgtcccaggacgacctcgacttcgacttcaactacgcgaggtccaaggcggcgctcgccaagggggacgagatgttcgtcgccatgcccgacgggaagtggaagctgcacacggtgtccgcggcgacgagcaagggcggcaaggtggtcatgcggatcaagaagatgaacctggtcatggcgttctccaacgccaaagagagtaagaaaccgaacgcgcaagtcgaccgtgcgactgccattcccgttcatcttctgaccttgcgtgaaaacgatcgagcaggtgtgatccacgacgtgcagccgtgcgcgccggagaagccgagccgcgacgaggacgcgacgtacccgatcgaggtcacgacgagcaagggcaaggtggagctccgcgccgacgactacggcgtgtacaagaggtgggtcacggcgctgacccacatgctcgcggcgcccaccgccatctgcaaggcgcacgagctgccgccgccgccgccgcctcaccgtcggaactga

SEQ ID NO: 69803 - DNA, 617 bp, Oryza sativa
  unsure (1)..(617): unsure at all n locations
  Clone ID: PAT_MRT4530_70437C.1
gcaccctttctcccttctctctcctctcctcccccccacggcggcggcgtcggcggcggcgggcggatgcgccgtgttcgacggcgaggacggtgaaggacgtgaaccctcttgagttccgcaaggcctactccgcccacctgaagcgctccggcgggatggcgctccctgtgtgcgttgccgtggcgagggctgccaggctcatggtgctccctccttatgatccggactggtgctacccgtgggctgcctcgcttgcgcggaacatctacctgaggcacgttcttgcggtcggtggcttccacattatctatggtggccgccagaggattggctcacgtcccccgcacttctgcttgagcggcggcgctntctcacgcagcatcctctagctgctgcggatgatgggcgtcatcgatgccggccccgctggcggatgactcatcacctgccatggaaggcgttatctggaccangcggccgggagagccggtgtttccatcgcctgctcagatccatggatcttgttcccttactgcctctcatatggttggtggttgagtcggctccggttcgtttgcgcttttggtttggcacctgccctatctttgggtgag

SEQ ID NO: 69804 - DNA, 1341 bp, Oryza sativa
  Clone ID: PAT_MRT4530_70438C.1
tcactctatgaatatttgcacttttgaggtgatcccatccatgagttgcttgactatggaggatttctccctgtcgcccttgggataccttgatcctgtcggggtgggtcgatagtaattgcaactctcttcgtcagtcaaaatgatcgtctgtaaagccatagctagctccatgaccattcttacaaactccatgtatttctcctctactttgaagccagcaatcttcaggctcttcagatgcttgtgcttgaattctgaacaggtcgtctcgcaatacggcgtctcttgctgcctaccgtgtcgactgcgcatgtccttctgtatccctttcctttccctaccatattctccgggtgaaaaccttgcctcggttccgaacgagcggtggcggtgatccacgtcgcatcctccttgggggcaccgctttagagaaaccgaaaggttgaagttctggaggaatggtgctgcctgaaggaagaagatcatccataacaactcatattggccatcaccaagattaagcacggtcagcttgctgaaggaaccctgcaatggccttggatcctcaagttctatccaaatcggagcaccatcggggaaccagctgtcgacggagagccgcgtgagcttggggatgctggttgcgtcggagatcgccaagaacctggataccgcgcggcagaagcgacccgcaacccggtccagcgcgcgtttgtccaccatccatagctcgactccactcgggatgaacttcttgacgcttatccttggctccagcagcagccatgggagccaccgccaccgcctcgacaggctgcacgtcctgatcgcctccacgcgtgctgccaactcctgcaagatgagcagaaggatgtcgtccgggagagggctaatcctgtcttccccttcagcttgcctggatgtagctgcagatgcaaggtggttgcctgcgcacgaagggaagatctccatggatgctttgttctgtcccttgggaggaccatacttctcagccccggagatgcactgggcgtggccctggacggtctcctggctgaaggactcgccgcagtcgatgcaggagagctgattgcggcccatgttgataagttgcaatagagatttcggcccagtgtttctcaggttgcatccagcccatgcgcgctgcagcccgattcggcaacggcaccacgagtcctcggcgcgtgcacgcggctggagcacctggcgatgtacgactgcgacgccgccgtccccggcgaggcgctggtgatcgacgtcgcgccggggtcgtcgtcggcgctcagggagctgtgttgaagataatcctagcgccat

SEQ ID NO: 69805 - DNA, 336 bp, Oryza sativa
  Clone ID: PAT_MRT4530_70439C.1
atggtggtcgtccccgtgcagcaactccagtgtgctcatggcctacttgctgctcagaagcactacacatctgaaaagggagaaaatagcaaggctgagtacaaccaccgtactcagcaagccacaccaatgatgcagacgtgcaaggggaacacacggacggtcacattaggtcccaaggcactattgctccccagttttggtgatgtggtggctgagtcagcgtggggcccatgtggggtcccgcatggcagccggcaacaggtggggagaagagtggcgactgacgactgcgtcatggacctacacggcgaagagcgcgaagaagcgaagtag

SEQ ID NO: 69806 - DNA, 2447 bp, Oryza sativa
  Clone ID: PAT_MRT4530_7043C.1
ggggctccggcggccgacggcctcgtccacgtcacgtgtgccgcgccacactccgcgacgcaacccccttccttttttataccggcctcctccctcccattacccccctcacgcgctcgcttcctcttccccccagccatcggcgacgcgaggacgcgacgcgccccaccaaccaccaccgcctccgccgacctcgccgccatgctgtccgcgcgcgccgccgccaccgccgccgccgccgccgcctccccgctgtggaagcgcggcgagggtggcagcagcgggagcgggagcggatgcacgagctgcagggaggtgcggaggagggccgcggcggtgagggtccgtgcggcggcgccgaggagggtggaggcggtcgcgatggagtccgcggcggagaccgagaagaaggaggaggttgcggcggccggcggcggggttgaggacatggctaccgaggaggtgcccgtcacgccatgggccttctccgtcgcgagtggttacacccttttgagggatccacatcacaacaagggccttgcctttagtgagaaggagcgggatgctcattacttacgtggccttcttcctccggcagttgtgtctcaggatcttcaagtgaagaagatcatgcataatcttcgccagtacagtgtacctttgcagcgttacatggccatgatggatctccaggagaggaacgagaggctcttctacaagcttttgattgataatgtggaggagcttctccctgtggtgtatacaccaacagtaggtgaggcctgccagaagtatgggagcatatttagacaaccacagggtctctatgtcagcttgaaggacaagggaaaggttcttgatgtgctaaggaactggccagagagaaacattcaagttattgttgttactgatggtgagcgcattttggggcttggagatttgggttgtcagggaatgggtattcctgttggtaaactttctctgtacactgcccttggaggagttcgcccgtcagcttgtttacctatcacgattgatgttggtacaaacaatgagcaattgttgaatgatgaattctacattgggctccggcaaaggcgtgctactggcaaggagtaccatgagctcatggaagaatttatgagtgccgttaagcaaatctatggtgagaaagttctgatacagtttgaggacttcgccaatcacaacgcatttgatttgcttgcaaaatacagcaagagtcatcttgttttcaatgatgatatccagggaacagcatctgtggtccttgcaggtcttttatcatcactaaaggtggttggtggaaccctggctgaacacacttatttgttccttggtgctggtgaggctggaactggtattgcagaactcattgctcttgagatttcaaaacagacaaaggctccaattgaggagtgccgcaagaaggtttggctgctggattcaaaggggttgatcgttaactcacgaaaagaatccctccaggcatttaaaaagccttgggcacatgagcatgaacctgtaacgacactgttagatgctgtccagtccatcaaacctactgtgctgattggaacatccggagttggcaaaacttttactaaagaagttattgaggccatggcttcctttaacgagcgacccgtcattttctctctgtcaaaccccacatcacactctgagtgtactgctgaagaagcatataattggagccagggtcgtgcagtatttgccagcggcagtccgtttgaccctgtggagtacaatggaaagatacatgtgccaggccagtcgaacaatgcctacattttccctggattcggcctcggtgttgtaatctctggagctgtccgtgttcacgaggatatgcttctagctgcctcggaaacactagctgatcaggccactcaggagaactttgagaagggatcgatcttcccgcccttcacaaacatcagaaagatttctgctcgcattgccgcaagcgtggctgcaaaagcctatgaacttggactggcgacccggctgcctcaacccagggatctggagaaatacgcagagagctgcatgtacacccccgtataccgcagctaccggtaacgccgcggaggtcaaattttgcagtaataaaacctaccaatgcagtaggggatactgctatgttgtgttgccattgtcgccgttggccgttgctgctgcaaggcattgtatctgtctatataaatcacctgttgtaacgttatggaagcaatctccatgtgtaccaccagtgtttcattctttgatcgattataaagagtgcaataagaacatagttttagctcccattgtaatgggcagcatatctctacaaaaaaaaaaaaaaaaaaaaaaaaaaaaacaaaacaaaaaacaaaacaaaaaattcgagggggggcccggtaccc

SEQ ID NO: 69807 - DNA, 1218 bp, Oryza sativa
  Clone ID: PAT_MRT4530_70440C.1
atgagccgagagatagtacctgagaaggaggctgatgacgcgcgaatctccggacggaccaaggtggcagggagggaggggagccgcacctctccttcagccgcgccgccgcctcccctcccctccccggatccaggtggtgtcatcgtcggtgttgttgttgcagtcggcgtcggcgtcgtcgtggccggccacggagggataggagagggaggggagccacacctcccctccggccgcattaccgccgacgccgtcttcggccacaccgccgcctccgctcccctcccctccctagatcaaggcagcgtcatcgtcggcgtcggcgtcgtcgcggctggccgcggagggagagaagaggaaggggagccgctccaccaccgccgcaccccctccggccgcaccgcagcctcagctcctcgtcgccgccgcctcccctctcctcctagatccaggcgcatcttttctgatcctcaacgggtcaaccacaatcaacctgccaacatcagagaaccactttccaaaccactgaaagagtcgattttcaatcttctcggcgtcgtcttcccccacccgcttcgctcacctgaactcttcttccccaactccggcgcctccactccttccccgttccccggctccccgcctccgaaagcagtggaggcagccgccggggagcagaggacgacaagactcacaagatcgaggtcgggggcggcgtacggtcctctcgcctccaaggcgttggaggctctccccgttccattgtttccggagggagttgcttcctttcttggagcggaggcagcgaccagcagcagcgccgtcggcgtcggggtcggccacgtgggaggcgaccacaacaagatgttgtgcggagggaagatggcgcgacagggcgcgggcatacggggcaacatgcaagatgaggcgagcgccttcgacgacgtgtctcaggctcaacaaggcgtggccggccgggacatgcccgcgggagcaggcgtcgaacacctgctgtgcatggccgcgggctttcgtgacgttcctcaagaaccatggagtcttcaggcgcaggcgcaggcgccgcaagaaagtgccggcaactcgcaagaaggcgtcgccgccgtgggcgtggaagcggacgcgggcgtccagcacatggcgggccaggacgcgagcgtcaacgacatgccgggcgcgcaccgggggcttccatga

SEQ ID NO: 69808 - DNA, 2841 bp, Oryza sativa
  Clone ID: PAT_MRT4530_70441C.1
atggctggagcttcagagctggaaggatccaaggatgacagaaggaagacgacgtctctcaagcatggagggaaagtatggactgttaagttcttagatgtagaatggctgaaatggcgttttgaatgtgtgttgagcagattatgttcagtggcatgtctcgcgacaccaagaatcgcagtggctcggtcgctggctggcgccaaggatgatgccaatatcctccggcccgctgatagtcacaactctgaacggcggcggcggaggcggcaacaaggcagcgaggacttcaagaatggattatgtgaccaacatgttctttgccgcctgaacgccatcttcaacagcagtcgcggccgcactcgtggactcgacgatcagatcgccatggcaggcgggaccgcccactgcgacgcgttcttgctcaccgccagcctcctcggcggattcttgcggcttgtcatggaagcccccgcctccaacgccttggaggcgagaggaccgtacgccgcccccgacctcgatcttgtgagtcttgtcgtcctctgctccccggcggctgcctccactgctttcttgaagacccgaggaatccgcacccggggcgttctgttcttaggtgcgggatcgaggggattctttcggagaggagccattgaggcggggaggaagggggcggaccggaggcggggagccggggaacggggaaggagtggaggcgccggagttggggaagaagagttcaggttgattgtggttgacccgttgaggatcagaaaagatgctgtacacacagaaaaaaagcatttccgcataagcgaggttttttttctatggcagggaggggaggggagcggaggcggcggtgtggccgaagacggcgtcggcggtaatgcggccggaggggagagttcagaggagtccggttgccagctcggagagcagctagaggatcgcaggatttgctgtgcacaattttctcaaaaattgccactgaaggatgttgtgaggaccagtgttttgtcaagaaattggaggcacatgtggacttgttgcacaaaactaagattcgatggtgttatggtatccagggataatattaatgcaatcttgcagcagcactctggcaagattgttgaagagtttgaggtgaagtttgaattcgacagcaagctagttgatcacctcaatggtttggttgattttgttgtatcatcacagacaaaaaaaatggcttttgatttagtgccaaccaatcctgttggtcttcttgatcgatacagatttccctttgagcgtttcgacaatggaagcatctcccgtctacagcatattcagcttagctttgcatctttggaactacctccccatttcagtggttttctaaacctaaggaatcttgaccttcacttaatacgatctactcagaaggatcttcaagatttgttatcacaatgctttaatattgaatggttgagtttagttagatgccatattggtggtgaaataaagtccctcagtttggatgcctatgtacctctgactactctcccaagtgtgcctccttgtgttcagccgctctgtttggatgtctatgttcctctcgaggtgtcctcgctgctgaagaacacgtgcaagttttctcatctgaaatatttacaactaaaattacgtctatattatcatgattcgggcaacatcctctctttggcctcttttctcagggccagtccttgcatagagaagttagaaatacatttcaattcgtatgctttgtcacacttgtattatcagcctatcaggaggcttccacaagttcctgaagttgaagccattgtgctgcccccatgtgttgcactggccatcaggcggccaaggtctggtgtctgggactacatttgggtgaatgtgagtgagttggctgtggaggagctgagtgttcctgagtacttggaattcatggaacagcttgttgatggacaaaagctgacattctctgaagttggcgccggacaaaggtggcgccggagccagagcggcagcgtttcccgcgttggcgcgggtctagatggtagtgcaaagggagctggcggcggtgggtcgtcttcctcgttgccggtcggcaccctcgcccttcctggagctcctccccttctttgtggggagtttctaggctggattgaggcggcaacttgtcagcgggggaagcctaggttgctgaagcaatgccacccagtcccgggttctccttcagctagatttggcgaggagactggcgggtggtggatcggaggggtcctgggccagctctcagggatggaggtaaccaggttgttgcctgatgttattgggactacatgcagccagtggctggagaaggttattggaactgagcacactgacattcttcgtgttccattcagaattcatctttctttttttctttctttttttgctgcaggatgttgcaaacgaaattatgagggaaatgcaggccaaatataccatttttcgtgccaattaactgctgatcatgccatgacacacagacttcacatcatgaccagcacattccaagaaattgctagaagcaaggacactgttcggcagtatgaatcacacattgcattcacccttcctgctcttgcaataagacagtcagactcggaccatcgcatattacgctggaagttcacaagagaatgcaaacaatccgatgaaaatggctttcataaagcatatcatatttcaattggcatcaacttgcaaacccattgtaggcttccatcggatggcctaatcagccaaagaaaaagccaaattttgaattttcaaacttaa

SEQ ID NO: 69809 - DNA, 746 bp, Oryza sativa
  Clone ID: PAT_MRT4530_70442C.1
catgtccaagattggggagtgcattgacttggctgctgcctccttcctccccctcccccgcaaacaccaacctaccatgtcccttctcccctctcctctctgagctcagctgcatccatccatccaaactactcacagatgccactcttcctcaaccaccctcccatttaatgccctccacctcctcctcaagcccaggattcgggaacctgctagccatttttgctccaggacagtacagccagatgctgctgctgcagctgctgggttgctgcggtggtcaggtcaccccggttcttgattcttgacgaaggatggcaatggcgacccctacgaccaacggcagcttccttcttggatcaggtggctatcccggtgcccagattctaagcttctcctcctcaggtcacagcggcaatgggttggattgtggaagctcagatgtggcaagaatgcagggggttttagcaagggttagggggccattcacaccaacacaatggatggagctggagcaccaggctctgatctacaagcacattgtggcgaatgcgccggtaccggccggcttgctcctccccatcaggagaagcctccatccaccagtgttcccacacttctcctctggtggcattcttggctccagctccttgggatgggggtcatttcagctgggctattctgggagtgctgactccgagcccgggagatgccgtcgaaccgatggcaaagaaatggcgtgctcg

SEQ ID NO: 69810 - DNA, 1000 bp, Oryza sativa
  Clone ID: PAT_MRT4530_70443C.1
atggctgagtttttttgggtgctattaggaaaattatgttcagtggcatgtctcgcgacaccaagaatcgcagtggctcggtcgctggctggcgccaaggatgatgccaatatcctccggcccgctgatagtcacaactctgaacggcggcggcggaggcggcaacaaggcagcgaggacttcaagaatggattatgtgaccaacatgttctttgccgcctgaacgccatcttcaacagcagtcgcggccgcactcgtggactcgacgatcagatcgccatggcaggcgggaccgcccactgcgacgcgttcttgctcaccgccagcctcctcggcggattcttgcggcttgtcatggaagcccccggtgcgcgcccggcatgtcgttgacgctcgcgtcctggcccgccatgtgctggacgcccgcgtccgcttccacgcccacggcggcgacgccttcttgcgagttgccggcactttcttgcggcgcctgcgcctgcgcctgaagactccatggttcttgaggaacgtcacggaagcccgcggccatgcacagcaggtgttcgacgcctgctcccgcgggcatgtcccggccggccacgccttgttgagcctgagacacgtcgtcgaaggcgctcgcctcatcttgcatgttgccccgtatgcccgcgccctgtcgcgccatcttccctccgcacaacatcttgttgtggtcgcctcccacgtggccgaccccgacgccgacggcgctgctgctggtcgctgcctccgctccaagaaaggaagcaactccctccggaaacaatggaacggggagagcctccaacgccttggaggcgagaggaccgtacgccgcccccgacctcgatcttgtgagtcttgtcgtcctctgctccccggcggctgcctccactgctttcttgaagacccgaggaatccgcacccggggcgttctgttcttaggtgcgggatcgaggggattctttcggagaggagccat

SEQ ID NO: 69811 - DNA, 204 bp, Oryza sativa
  unsure (1)..(204): unsure at all n locations
  Clone ID: PAT_MRT4530_70444C.1
ggacgtcangngncacgcggcggcggcgcngnacaacgnnggntgngggtgcctggcgtcggcggtggagggcccgataacgtgaatggcaatgggccaacacccctaacctctgctctgctgcagtttcgatctagttctttttctttttccgngcatctngttcctnggccgtctngttgccgncggcgattgcccgttccg

SEQ ID NO: 69812 - DNA, 1815 bp, Oryza sativa
  unsure (1)..(1815): unsure at all n locations
  Clone ID: PAT_MRT4530_70445C.1
tagtggatccccgggctgaggaatcggcacgaggcggacccgggttttgctgccttgacaaaaattatgacaattcagtcagcaacatagaacaaattccacaagaaactgagatagtacaataccacattaccgctcgcttaaaaacggagggaactcaaagcatgaagtgataaagattaaagaaaaataatacatgagctaggaaatcatacagggtgtgctctggggacaaaaacatcagtagatagcctcatggctgttccctgatgatcagaccggcggtttcacagtgtttggacagtctgggcattcaccaggcctgaagtgagcaagccattgcagaggctgcctgcaggactactaacagtgctgctgggcactgaactgaagctagtcatctgcaggactccggtgggcgattgcagctgtggacttgtagtatgtccatcagctaagaggttcaaagatggcgggtggcggcttttgcctttgtcgtctgatgcgctgctggtgttggtgaagaactcacccagaggtccacctatggacgcttcccaggagcccggtatccaacttgctcgcgtgttgtttccgccattcgatgaaccgcctactacatggtccatttgagccttgttgtagttagtgggtaagtcggagttatccacgggaatggatatcgacagctgaatgtcatcatgctgtatccctttgccaaagagtgactgcttacagcgttgttgctggggaattggatttaaattcgccgattgcggtgtgttcatgagagagccagcagggattactgcatagtctgcttgtgaggacatctcttcagaccaattatcaccttttgtgttgttctgtaggatgttgtgttgctgattagtgtagtcctgggagcgttcaataagatttgctttatccaacatcatcctgttagtagccaaggttttcgtgagctcatttgacacaccatggctgcctgacaatttgccattagatgcaccaatgggtggttgtgctatggcgggaaccgttgcttttgcggcatggctagattggccttccacatgctttcttgaacggtggcgaccccggtttatgtgccgctcgcagtacttttggtcgacaactgcgtctctcgagcaccgccatttcttgccatcggttcgacggcatctcccgggctcggagtcagcactcccagaatagcccagctgaaatgacccccatcccaaggagctggagccaagaatgccaccagaggagaagtgtgggaacactggtggatggaggcttctcctgatggggaggagcaagccggccggtaccggcgcattcgccacaatgtgcttgtagatcagagcctggtgctccagctccatccattgtgttggtgtgaatggccccctaacccttgctaaaaccccctgcattcttgccacatctgagcttccacaatccaaccctctctcacttgaagatggaagtgtaaaaagagtgagagccatctccaaaggatttaaaagactctgcatctttggtgacaaggggcacatctcattgccgctgtgacctgaggaggagaagcttagaatctgggcaccgggatagccacctgatccaagaaggaagctgccgttggtcgtaggggtcgccatagcaaaaatggctagcaggttcccgaatcctgggcttgaggaggaggtggagggcattaaatgggaggtggttgaggaagagtggcatctgtgagtagtttggatggatggatgcagctgagntcagagaggagaggggagaaggaca

SEQ ID NO: 69813 - DNA, 648 bp, Oryza sativa
  Clone ID: PAT_MRT4530_70446C.1
agtccacataacctgaacccagcgtcaatccgcaagcaaggaaagcccaagaagggcaagagaggtttagagccccgtccaaactccaaaccagccatggcgacggcggctggcggcgcgcggcgggccctcgcggggctgcgctcggcttcctcttccagggccttctcccagccggcgccggctgcggcggcggctcgttcccctgagctcgcggccttctctctgcctcgctccactcgccggcgccccgcgatctcgagggtcccggtggaggcgctcggcggcgcgcatgggttgatgccgctgcacagcgccactgcgtcggctttgctcacctccatgctcgggcttaagcccggatcttggggttggctctcagaagggtttgcaacacctctataacaggagtggtgttttggtcaccacacaagaaacttttctgttagcctttcccccagcaggttccaataacattagttacaagacttgtggactataatacccgggatttttgctgatggaatctgtactaaattttttctctgcttaaaacttatgatggcctcatgtgccagatgattgtccaagcgatcatattcatcacaactttgcaacatattatgcatttacctgtttctgttgaaa

SEQ ID NO: 69814 - DNA, 231 bp, Oryza sativa
  Clone ID: PAT_MRT4530_70447C.1
atgggtgtcatcgccgtcgacgggaagcagcaccagcgagcaggagagggaggcgacgcaatggtggcagtgacctcatctcgacatgcggtgctggagattgaggtagagacagaggtagagaagcttgtcgaggatagtggcggtggccggtggggattcgagaactgcggcggcggtggcactggtgtcggtggcgctcctaccgacgcacacacgctcgagatgtga

SEQ ID NO: 69815 - DNA, 870 bp, Oryza sativa
  Clone ID: PAT_MRT4530_70448C.1
atggaaatcaaggacgaggagacaacggcagaggtggccatggtggtgcagtcgcggttcagaagggtatgcgtgttctgtgggagcagccatggcaagaagaagatctaccaggatgctgccattgaacttgggaaggagctggtggcaagaaacattgacctagtatatggaggagggagtgtagggttgatgggtttggtttctcaagcagtacacaatggaggaaggcatgtcattggggtcattcccaagactctcatgcctagagagatatcaggtgagacagtgggggaggtgaaagcagtgtccgatatgcaccagaggaaggctgagatggccaggcagtctgatgcctttatagcattgcctggggggtatggaacacttgaagagctactagaagtaattgcatgggctcaacttggaattcatgacaaaccggttgggctgctcaatgtggatggctactacaatccgttgctgtctttcatcgacaaagctgtggaggaagggttcatcagacctagtgcccgccatatcatcgtcttggccccaacgcctaaagaactcattgaaaagctagaggagtactctccccagcacgagaaagtcgtgtcaaagatgaaatgggagatggaacagatgagctaccctcagaactacgatatccccaggccaaaggagggaaagatgatcatagaagcacaacggggaagcaggctatggataagtgatccaaagagaatggaatctgaaccagttccagacttccagtctgaagaaacagtgaacagtgagatttcagcaagggagaatgccagtttgggcctccacaaccacaaggatcaagggacctcctcgctgtag

SEQ ID NO: 69816 - DNA, 329 bp, Oryza sativa
  unsure (1)..(329): unsure at all n locations
  Clone ID: PAT_MRT4530_70449C.1
cggacntgntntntnttttagatcggagggagtattataaagaaaaaaatcagaccaaggatacatcacaagacccttcgaaaatgaaagagaacgaaatgttacaggtgattgcccagcaatggccaatggaaggctgatccagcaagacactgaaaacagacttgtcaagttgtcatatgtaaagctacctactacttcacnggcatcagtccatttcaggatgggcaccagtgatgcagtgattttttaatagataccatcaagattncgaaaatttatagtaccaccagagtcagcttcaagttttaaagngctttcctgaatcc

SEQ ID NO: 69817 - DNA, 1293 bp, Oryza sativa
  Clone ID: PAT_MRT4530_7044C.1
atggtgcccccaatcgccgggaacggccgcgccaagtccggccgccttcctttgccgccggccaccattcccgtcgccgttccgccctctcccgtgctcggctcgcttccctccgctataaaatgcaaccccctcgctccgttctatcgctttagccccctcccgcggtctcccgtggtctctagccacctccccaccgtcgccctctctctcccacgttgccggccggcctccagccgcctctcccgcctcgccggagcgtcgtccggccgcgccgtcgcctcctccagcgtcgccgccacctcctccaccccggcctgccctccgtctcgcgaggtgacccccggagctgccttcccgccgtcgccctcctcttttctccgagccggccacctccagccgcacctcccgcctcacccgtgcaccctccggctgcgccgccacctctcccggcgtcgcagctgccccctctccctcggtcagccctccgtttcgcggggaaagcaccggagacgcgtcctcgccggcgtccagtggcgtcgccaccacttctccgcctccggccgcctctgccacgtccccggagcgccggccgacgtcgccaccaccttcctcggctccacgacgccgctctcatccccggcatcacctcctcctcgcccgaacttcgccggaacaccgtcgcccgcgccggcttctccttcctcctcggcggcatctcccccggctgcccttttcgccatgcccatgcgtcagccggcgctgccgtcccctccctcggcacgcggcaaggtcgtcctcggcatcgtttcccctccatccaaacccctccgcggtccatcatcgtcgtctccgatcgttctcgtcgtcgacgtcccgtcggtcgcccggctcgtcgtctcgcggcgccgcctccgtcgtcggcatcgtagcggcgtggtcctcgtcgtcctcgtccccgtgcagccgctgccggctgtcctcgtcgcctcctcgccggtcccggtcgtcgtcgtcgtcgtcgtcctctcgtcgttcccggtcgtcgtggcgttcgtccctccgtcgagccgttctcgtccgtcgtccgcatcagtcaagcaagtcgctgcagcccccgtcatcgtcttcgtcctcgcctccgcgtcatcaagcctagtgccggccgcgtctcgccttcgtccaaggatcgccgccgaagccgtcccctcgccgttcgtctccgttgtgcccgtctgtctccgccgcgcccgttcgtcgttggcgttcccacgcctcgtcgcgtggtggtaa

SEQ ID NO: 69818 - DNA, 1278 bp, Oryza sativa
  Clone ID: PAT_MRT4530_70450C.1
atggggatccccgggagcgtggcggcgagaggaatcgacgcgagaggagccaacgacggtggattgcggcggcggcaatcaccggagagcaaaaggggaaaacacgacgagacgacgagggttcgattcaaaggggtgggagcatctccggggttcaaggaatccgtttccggcgtcggattggacggagcggcaccgagattcgctggcgacgagagacggtcttcgggagcgggcggcaatggcggcgaggccgtgccgggcggcgacggcgctagggaatggtttggggaggtcctagggagctcaaggacggtggtggcgcgagggattggcgagggggcccatggcggtgcacagtcgggcgcggcggcggcgaagcagagcaacggcggggcgacacgtttagggggacgagcgagcaaccgaacggctcggggcttatccaagatgatgcaaatggcaagaatttgggcgaggagctcaccggcgagagaggagcaacgttggcgacgcggagggagtcgtggcgaggtggtcgcgacagcggggcgggggcgagcagctggcggccggcaacaaaggcgtgggtgtttcgagcgaggcggagacgaaacgagaggggagggcgcgggctttataggcgaggaggagaggtcggtttggaggagggaaaccgacattggcggtcaagggagctcggctggtgttcacgggcggcagcggcggtttcgtgggcagtgcgaaagcggcgacggcgtggatgcgttgggcagcgaaggcggtggatcgagcggcggaaatcgaaccgcgggagtgcgggctggcgcggtcaaggagagcgagttggcgtggtcggtcaagcggcgcagaggcagtgacaccggcagtggtcgggaaagggaaaaagaaggggaaaaaggggcttggtcccttgccataatgaggagagggagagtgaggaggaggaggagagggagggcagctgcttctcccactcttggacggggtttagggatgtatcaaggaaaactcaaggaggagtcatggaaaagattcaaaaggaatacttgggtatttgttctcgggaacatagggtggagtcaaggaaaggattcgaggcgggatttgaataattctggattcgtagaagtatttggcgaggattcaaaggaaggatttgaatttcagaattttgatttcagagactcgaatcggaagaggaatttggatgagggggaggattttgatttcgatgagagggaacaacgggattaa

SEQ ID NO: 69819 - DNA, 929 bp, Oryza sativa
  Clone ID: PAT_MRT4530_70451C.1
tttgtacttccttgagtcttttttctctgtaaaagtctactttacctccctgtatttttggatggaccgattttcctcccccggcccatctcccctccccagcccatctcctcccgcagttcgatttccgccgctcgatccaccgccttcgccgcccaacgcatccacgccgtctccgctttcgcactgcccacgaaaccgccgctgccgcccgtgaacaccagccgagctcccttgaccgccaatgtcggtttccctcctccaaaccgacctctcctcctcgcctataaagcccacgccctcccctctcgtttcttctccgcctcgctcgaaacacccgcgcctttgttgccggccgccagctgctcgcccccgccccgccgtcgcgaccacctcgccacgactccctccctcctcctcctcctcccctttcgcccctgcccgcatggccgaccacgtggcagccacctcagccccgggcccgcttgactgggtcaagtcgcgcccagtcagcctcctcccccaccgacacgacggagccgccggagtcgcccatctccggccaagaagacggcggcggggccactccctcccacctctcctctcctccctcgctctcctcgcgctcgctcaccaaccgccgcctcagccgccgcacctcgacctcccgtccccccatcataaatcccccacacctctcctccctcctcctcctcctcctcctcctcccccaacgaacgcagacacacacaggcctcgacctcccccctcccccacacacatctccccgactcgatctccccctcctcctccgccgccgccgccaacgcctcctcctccgcctcctcccccaacgcatcgccccaccccatccatccagattcctccctcctcctcctcctcctcttcctcctcccccgatcccgccc

SEQ ID NO: 69820 - DNA, 327 bp, Oryza sativa
  Clone ID: PAT_MRT4530_70452C.1
atggagcctccatcgccgcgcgcagggccttcggcgagggctccccggccgtggccgccgcatggaagccacttcaccaaccctgtccctccctcccgccaccgccgcatgcaagccatcctcgccgttggtcccgggggcgccgccgctgccagggcgctcgtcgtcgccgatgccaccaagaaggccgtcgccgaggccctcgccatgcgggagctcagcgtctccaccgccgtcgccgtcgccaggaagcgctccccgccgctcgctatcgctgggaacgaccgccgcctccccttcccggactcctccgtcgacttcatctaa

SEQ ID NO: 69821 - DNA, 583 bp, Oryza sativa
  Clone ID: PAT_MRT4530_70453C.1
ccggccgggatcatcctcagcttattgtctacccatctgagaatcttgtttaacactaaaattgatcgaatcagaaatgccagcatacaccattcagatctttgccctggttgacttaattgttctttctgcaaacgccacttactgccatcaccactatgcaggatttcccaccaacattaaacatgagcaccatggatccatgcatctactacttgatcttcaccatcgcgcatgatcatgtccaccaacatgtctatgacttacacaatgcccctcctgcattaccaatgtctattgtagctactaaggatgatgccgcatcgtcacttgattaccagttgcaagatgatgtaaactatgcaacaagatatttgtgctggactcaagaagcagccgatgatgaagatcgctattgagatagacatacatgagcaacatggcccctgtcaacttacaactctcattcactcggggtgtgtgatgatctcacggtctacacctgtgctctatgaaaaacgtgttgcatactatctggttgaaacactagaaataagaactcattgaatagcatatcaatcat

SEQ ID NO: 69822 - DNA, 931 bp, Oryza sativa
  Clone ID: PAT_MRT4530_70454C.1
atggcggcgggcccatgtgcagccgcacggcttgccgcggaccgcgcgcacgggagggaagacggagggaggaggctgactgggcgcgacttgacccagtcaagcgggcccggggctgaggtggctgccacgtggtcggccacgcgggcaggggcgaaaggggaggaggaggaggaggaggcgcccgggatcggacggccgacgacgcgcgaggcgttccggcgagcggcggcgaaccggagcgagcggctaccgccggcagctagaggaggtcaaggggaatccgcggcggcggaagcggcgacacggcgcggagacaaaggagaaggccgacggccttggggcagccagggggaggtcatggggatccccgggagcgtggcggcgagaggaatcgacgcgagaggagccgacgacggtggattgcggcggcggcaatcaccggagagcaaaaggggaaaccacgacgagacgacgagggttcgattcaaaggggtgggagcatctccggggttcaaggaatccgtttccggcgtcggattggacggagcggcacccagattggctcgcgacgagaggcggtcttcgggagcggggagagcgagttggcgcggtcggtcaagcggcgcagaggcagtgacacctgcagtggtcgggaaagggaaaaagaaggggaaaaaggggcttggtcccttgccataatgaggagagggagagtgaggaggagaggctttcgcggcggcggggtggcacggcaccgagagggcgtggccagggaaggagggagggagaggtggcgcccggagctccttgtcgcgcgttcacgctcgcaccgactcctccggtgctcgacgacggacggcgacgacgagagcgagacgagtggcaacaaggcggcgacggtggttcggcggcaatggcgtggtgggtg

SEQ ID NO: 69823 - DNA, 1068 bp, Oryza sativa
  Clone ID: PAT_MRT4530_70455C.1
atgacggtggctggcggcggcgaccaagctcgccggcacgccgacgtggccgcgcgcgagaagagcgaagggtgcgcgggctcgggcttagccgaaccggtatggtgttgtgacgcgcacgcggtgacgcgggacccgatggtcaccggcggcgcacgcacggcggcgttaggcggcggcggaagcggcgacacggcgcggaaacaaaggagaaggccgacggccttggggcagccagggggaggtcatggggatccccgggagcgtggcggcgagaggaatcgacgcgagaggagccgacgacggtggattgcggcgccggcaatcaccggagagcaaaaggggaatacacgacgagacgacgagggttcgattcaaaggggtgggagcatctccggggttcaagaggaggattatggtggggagctcaccaacgaagaggaggcagcgttggcggcgcggtcagtgtcgcggcgaggtggtcgcgacgccgaggcggcacggcaccgagagggcacggccggggaagaagggagggagaggtggtgtccggagctcctcgtcacgcgtccacgcatgcaccggctcctccggtgctcggcaacggacgacaacggcgagagcgggacgagcagcaacaaggcggcgacggtggttcggaggcaatggcgtggtggcggaggcgaggtcggtttggggaggggagaactgaccttggcggtcaagtgctcggctggcggtagcggcggtttcgtgggtggtgcgaaagcggcgacggcgtggatgcgttgggcggcgaaggcggtggatcgagcgacggaaattgaaccgctggagcgcgggctggcacggtcggtcaaggggaggagctggcgatcgcgcccgtggtcctggcggtggcaggcggtgacgccgatggagggtgagggagagctcggcctccgggttttggcaggacgcgcgtggagcggcttaggcacgcacgcggggccgtgcggtgcaggcgcggcagggcagcagggccgggcggtgcaggcgcggcagggccgatgcggtggcgaccgggcg

SEQ ID NO: 69824 - DNA, 2312 bp, Oryza sativa
  Clone ID: PAT_MRT4530_70456C.1
gatagtagcacctcggccatataaggaccggtcttcgggcctctcaatcttggttgcgccatctggcttcggcatcttgttggttttgctcactttcttgggtggctcagctgtggcgggcgggttgggagtgtgcttgaccatgttgaggctccgcttgtcacactgtatcgccagcttcgcgtttccctgaatagatgaaatgttggaacggctggcaaatcattctttcttctgtttccttgatgggtattctaggtatgatcaaatttccatccatccggaggaccaaagtaagactacgttcacatgttcgtatgatacctatgcttatcgtaggatgtccttcggactgtgcaacgctcctgcatctttccaaaggtgtatgatgtctattttctccgacatgattaaggacattatggaagtctttatgcatgacttctctatttatggaaagacctccggtcattgtctacaaaatttagacaaaatcttgcaacaatgccaagagaaggacctggtacttaatttcgcggtgggagctaaggtgatagtttatactgatcatgctgctctaaagtacctactcactaagaaagatactaagccacgtatcttatgatggattttgctgctccaagaatttgacttagaaattaaggataaaaagggagtagaaaattccgtagcggaacatttgtttaggctgcaaatcactggcacgcaggaacagccgatgaatgatttcttgagagatgacatgctgatgacggttcgcgactccaacccgtggtatgccaacatagtaaactacatggtgtcaaagtacataccaccagggtaaaatcaacggaagctgaaatacgagagccatacttgtatagggtctgctccgatggcttactaagaagatgtgtgccgactgaagaaggagttaagatcatagaagatgccatgcctcaccttatggtggccattatggtgcattccgcacccaggccaagatttggcaatgtggtttcttctagccgacaatgtatgaagattcaaaaagaattgtcagaagatgcccaagctgccagaggcaagcaggaatcactgctcgtaatgcagtaaatgcgaaggaccgttcgatgtcatcgacacctcttcgcacggggcaatcacactccgcgacgattcaggtaacatatttttggtaaacggtcaactcttaaggattttccttgagccgaataaaactttagatgaagaagtggttattattgaattaatcgattatggactataatgatctcatctaatgcatgcttaaaaccttgtcaagttgccttttttatgcttagcttaggttggtgtgggactaggaaaaagttggaggccagatggacccaccagggtcttggttcggccgatccagggtggcacccattcggccccaattttgaattgtagtctcccccgctcgtgtgtagttcgttatggtgcgctttcggaggtagatcgatcagattaaactcagaatacctgctcttcctcttctcctccacctttgcaaactccttttccatcctcactcaatcccttgatttccacccccaacttaccaatggctagcaagtccttgatcccatacattggctcttcctccaattccacttacaatcttgacggagagccaacacgatggaaggggtaaacgcactatgggcacaaccccttgcgacagtgcacagctccccagcaaatatggaaccggccggcgagctccctggttcggccgaaccaggggttcggccgaacccttcctggccccgttcggcagcgagatccctctcctcttgccatgttaccaagacaaaaatctggggggcttcacctgcgtgacggccgacaacgggcgagctcggtcttttgaaggcgcgacgcctttttcaaaatgctgagaaggtcgctccaccttctgccgagtggtatgtgggcaccctgttcaccaaggcaggggatgaggtgctccacaagtacaccacacctaccgccactccgtccactccaaaggacgaccgattttgcattcagggagtgcaaactcccggcggtgggtatggtaaaggcttgctccggcctttgacggcatccgggaaggagggggcagcaggatcccgtagctctccacctatgaaggtgaagcgtcatttgacgccccccacttactataaataatgtggctcattggtgttaaccccaatgtttgccaagatttgtttttgtttcatgtttaataaagttcaggttttgaataagcgtgg

SEQ ID NO: 69825 - DNA, 345 bp, Oryza sativa
  Clone ID: PAT_MRT4530_70457C.1
atgggccaggccaccccaacacgccagcctcccgggccgttgagtcgcgccgagatgaggccgcggcttcaagaggggcccgagaagggagaaggagcttgggggaacggcggcggcggcagccgaaagcaggcgcggtggcatgagctagggctggaaatcgatgggacgccactaatctggtcccagcgcaacaccccattcacgagattagagcttgaggttgacggcgaggtggttgatcccggctcaggaaattgggcggtccggacggatgtgcagagacccgttggtgcaagacatgctctgcaatgcagaaaacttcgcacctctggctcaagttag

SEQ ID NO: 69826 - DNA, 1209 bp, Oryza sativa
  Clone ID: PAT_MRT4530_70458C.1
atggcggcgggcccacgtgcagccgcacggcttgtcgtggaccgcgcgcacgggagggaagacggagggaggaggctgactgggcgcgacttgacccagtcaagcgggcccggggctgaggtggctgccatgtggtcggccacgcgggcaggagcgaaaggggaggaggaggaggaggaggaggcgcccgggatcggacggccgacgacgcgcgaggcgttccggcgagcggcggcgaaccggagcgagcggccaccgccggcagctagaggagccgaaacggtacgcgaccgcgatgcgcacgcggggacgcgggacccgatggtcaccggcgacgcacgcgcggcggcgttaggcagcggcggaagcggcgacacggcgcggagacaaaggagaaggccgacggccttggggcagccagggggaggtcatggggatccccgggagcgtggcggcgagaggaatcgacgcgagaggagccgacgacggtggattgcggcggcggcaatcactggagagcaaaaggggaaaacatgacgagacgacgagggttcgattcaaaggggtgggagcatctccggggttcaaggaatccgtttccggcgtcggattggacggagcggcaccgagattggctggcgacgagagacggtctttgggagcgggcggcaatggcggcgaggccgtgccgggcggcgacggcgctagggaatgacgatgcaaatggcaagaatttgggcgaggagctcaccggcgagagaggagcaacgttggcgatgcggagggagtcgtggcgaggtggtcgcgacggcggggcgggggcgagcaactggcggccggcaacaaaggcgcgggtgtttcgagcgaggcggagacgaaacgagaggggagggcgcgggctttataggcgaggaggagaggtcggtttggaggagggaaaccgacattggcggtcaagggagctcggctggtaccggcagtggtcgggaaagggaaaaagaaggggaaaaaggggcttggtcccttgccataatgaggagagggagagtgaggaggaggaggagagggagagcagctgcttctcccactcttggacgggtgcggcgtggagtggcgggggccatggatgacgtcgacgatgacggcggcggtcggtttggcatggagcgggggcaaggcggcagcgcatggcgtcggcggcgaccggcc

SEQ ID NO: 69827 - DNA, 1013 bp, Oryza sativa
  Clone ID: PAT_MRT4530_70459C.1
tcacacccaccgcgccattgccgccgaaccaccgtcgccgccttgttgttgctcgtcccgctctcgccgttgccgtccgttgccaaagcaccggaggagccggtgcgtgcgtggacgcgtgacgaggagctccgggcaccacctctccctcccttcttccccggccgctccctctcggtgctgtgccgcctcggcgtcgcgaacacctcgccgcgacactgaccgcgccgccaacactgcctcctcttcgattggtgagctccccaccataatcctcctcctgccatgcgatgcgccgtgcccgctgccgctcgccatagctcgccggccgccatgctctgtcccggaggccgtctctcgtcgccagccaacctcggtgccgctccgcccaatccgacgccggaaacggattccttgaaccccggagatgctcccatccctttgaatcgaaccctcgtcatctcgtcgtgttttccccctttttgatctccggtgattgccgccgccgcaatccaccgtcgtcggctcctctcgcgtcgattcctctcgccgccacgctcccggggatccccatgacctccccctggctgccctaaggccgtcggccttctcctttgtctccgcgccgtgtcgccgcttccgccgccgcctaacgccgccgtgcgtgcgccgccggtgaccatcgggtcccgcgtcaccgcgtgtgcgtcgcaacaccataccggttcggctaagcccgagcccgcgcacccttcgctcttctcgcgcgcggccacgtcggcgtgccggcgagattggccaccgccgccggccgtcgtcgcgcgtcctcttcctgatccgagccgtggaatgagttccccttctccttctcctgccgccagtgctagccgccccttccggctcgccgccgttcgccggatcccgccgcgcgccgtgggccgtccgatgagctgcccggcctcctctcccttccccatccgacgtgacgtccacgttcgcgccacctcagccat

SEQ ID NO: 69828 - DNA, 582 bp, Oryza sativa
  Clone ID: PAT_MRT4530_7045C.1
atggggtcgggcatggttttgctctacccgtgcctgacccgaccctttgccatccctagtggcccgcccgcctccctcgctgacgggtggggcccacccgtcatccccttcctcccgccgctcccgacgccccgcccacgccaagcgccgccgccgccgccgattccgccgcatcccgctgtccccgcgtgcattaaatcgctctctctctccgccgtcgccgccgagctccggtccgccgccgtcgtcgccccggaccacctcccacctcggcgccgcctccttcggcttcgccgcatcctcgccgacctcgtccacccctccgtttcgctcgccgaccgccggagcgccgccgaccccgtcgacccgagccgcgccaccgccttcctccgttccggccgcctcctccgtcgccgccgttgcctcggggtgagccgtggaccaccgcttcatttccccctttccctcccctttctcggccaccgctccgccgtgcctatggccgccaccggcgaccataggggcgcgggcgcgccgcctcccgccggccttgctgacgtggccgcctccgggcgcgcctag

SEQ ID NO: 69829 - DNA, 900 bp, Oryza sativa
  Clone ID: PAT_MRT4530_70460C.1
cgcttatctggcctatcatctgatcatctactgtcggctcgatcagtagctgggaccataattaatttaagttaagttcaatcaagaagtcgagaggcgatgtcctggtggaagaaatccagcggcaaaagcagcagcagcagcagccagtactacgctggctctgacagctcgtcgttcgccggaggaggaggagacgaccggtacggacgagccggcagcggcaacggccgctcgccgtggacgacgtccgaggagtacccgaggtacaccagcgacgacgacaaccgcagcggcagcggcagcgacgacgacgacgaccacggcgaccggaacaggcgcaggggaaagaagagcaacaagaagaagagcagcagcagcagcagcagctacaagtacgacgacgacggcggcgagagagaccggagctacagcaactacggcggctacggcaacaacgagggctacagcagcagcgcccccagcggctacaacccctacaacaacggcggcggctacggcggcccttcctacggcaacggcggcggctacggcggctctacctacggcaacggcggcggctacggcggctcttcctatggtaacggcggcgccatcgtagccggaggcggcggcggcagcgcccctgcctcctatggctatggctctaattccggctggggtgcgccggcgccgccgcggcaggagggtggctcagggtcggcgccgacgtacctcaacgtcatctacatgacgcagccagggtcgtcgtcgtcgcagaacgagaactccggcgagaggagagacaacggcggcggcggaggaggacgaaacgggctcttcggtccgacgttccaagccgtcggcggctatatggaccgtaggttcggattcgactga

SEQ ID NO: 69830 - DNA, 378 bp, Oryza sativa
  Clone ID: PAT_MRT4530_70461C.1
tcagcctctcctctctctccttcctctctcccttcggtccgatgtggcagcggacgaggtagagcggcggtgccggcggaggtcgaagcagagcggcggcggacaggctcctcgcggaggcgagcagcggcggcggcggaagaggaggtgtagcgacggtggacgggcttctcgcggaaacggagaaggcggaacggcggcgtcggtggagaaggagtagtagcagcggcactggtggaggagaaggcatagcggcagcggatgggctcctcgcgacggcctaggaggcatagcggcggcgccgacggaggagcgccaccggaggaggaggcgtggcggcggcgccgatggaggaggaggcgtggcagcggttaaatt

SEQ ID NO: 69831 - DNA, 2176 bp, Oryza sativa
  Clone ID: PAT_MRT4530_70462C.1
tcagtcctcacacccgccgcgccattgccgccgaaccaccgtcgccgccttgttgctgctcgtcccgctctcgccgttgccgtccgttgccgaagcaccggaggagccggtgcgtgggtgacgaggagctccgggcaccacctctccctcccttcttccccggccgcgccctctcggtgccgtgccgcctcggcgtcgcgaacacctcgccgcgacaccgaccgcgccgccaatgctgcctcctcttcgattggtgagctccccaccataatcctcctcctgccgcgcgatgcgccgcgcccgccgccgctcgccatagctcgccacgcgctcttgctctgtcccggaggccgcctctcgtcgccagccaatctcggtgccgctccgtgccctctcgacgccggaaacggattccttgaaccccggagatgctcccacccctttgaatcgaaccctcgtcgtctcgtcgtgttttcccctttttgctctccggtggttgccaccgtcgcaatccgccgccgtcggctcctctctcgccaattcctcgcgccgccatgcttccggggatccctttgacctccccctggctgccccaaggccgccggccttctcccttgcctccgcgccgtgtcaccccttccgccgccgcttaacgctgtcgtgcgtgcgttgccagtgaccatcgggtcccgcgtaaccgcgtgcgcatcgcaattcctttccgtgtcagctgagcccgagcccgcgcgcccttagctctcctcgcgcgcggccacgtcggcgtgctggcgagattggtcgccgccgccaaccgccgttgttccttccccagctaatccgctccattgaattgtttccccttgacctcctctagctgccggtgtccacctctctctctttcccgccgccgttcgccggattgcgtcgctcgtcgccggccatcggatcagcctgcccggcctcctctcccttccccatccgacgtggcatccacgtggatgccacctcagccgccccggccccggggagaccggtcaaaggtctcctagtccaccaatccatcgcgccgccttgcgtgcacccggcccgcgtgagccgtgtcgccgccttgtaggtcccgccttgcgcccggcacggtggaccacgtccaccggcttgcgtcgcagctgtcatgccgcgtctgtccgacgggcggggctcgtcctgtcgtgtcgtccgcgccaacgacgccgttcatctcctcgtcgccgggcaagctggcaatggcgacggcggcgccgtccaagtccctccccttgccccagagcacggtgtacagccccacgacaatgatcacggcgccgataacactcccgacgtgtatcttctcgccgaggatgccccagccgacgacggcgacgacgatgagcatcagcgggctgaacatggacacgaacaccggcccgcgctcctggatgcaccacgacatcaccgtgcacaccatccccgacgccacgatccccgcgtagagcgcgccgacgagcctgatgtcaaggccgagctcccacgccgagaacctccgctccgccgcccccgcgatggcggcgcactgcacgctggcgatcaacgccatcagcgccgtgctcgtgtacgggcaagcgaagctcttggacagattcttctggatgatgaaccagatggcccacgcgacgttggagccgatgacgaggacggcgccgaggacgacggcgtggccgccggcgtgcgcggcggcctcggcggccatggtgccctggacgtagggccagtggacgggggacgccagggtcctgacgagggggccccggtagaacgtcatgagcatggatccggccacgcacagggcggttccggccaccttggcccggccggcgcggccggcgacgggctccatcttcagcagcgccgccaggaggaaggtcaccgccgggagggtgttgttcagcgccgacgccaccgtcgggctgctgtacttgaggcccacgaagtagagcacctgattgagtgttgctctttcaacaaggaatgctatgggagcgaggaaggcggctgcgatgaaattccggtaggcgaggagaacataggggctcatgcccgaggccatggtcagcttggacatcacattcaaaccagcaagccccagttgcaccagcaccat

SEQ ID NO: 69832 - DNA, 460 bp, Oryza sativa
  unsure (1)..(460): unsure at all n locations
  Clone ID: PAT_MRT4530_70463C.1
cattgatgaggatcatgttaagaagttgaagggattggggatttcactgggaaagatccaggcagcttggccagaggatgcgannganaggagccaaagaagagatttgtggaggatatcatgccaaagtttaccacggatgctgaggtgctcgcgatcggtgacatgttctatgctgatgttgaggaagagtgggtgatgcagcctggtngcccattggctcacaagtgcaatactttgatccagccaagtaggcttattatgctcactgcgcaacgttttgttcagaccttcttggggggcaactacattgctttcattttcggcgacatggcttcctgaagtnctgtaatgtgaagaaagagagctgcttcttccctatccctcaggcagcagaatcattcttcgaatcgttnagaagctacgcccagtcatatatctgtctacttatcctgccgga

SEQ ID NO: 69833 - DNA, 1943 bp, Oryza sativa
  Clone ID: PAT_MRT4530_70464C.1
ccggccgggacacacaggcctcgacctcccccctcccccacacacatctccccgactcgatctccccctcctcctccgccgccgccgccaacgcctcctcctccgcctcctcccccaacgcatcgccccaccccatccatccagattcctccctcctcctcctcctcctcttcctcctcccccgatcccgccccgatgcgatgcccccgcggcgcgatcgcgtgacgccgccatgatgaatcccgacggcggcgacggcgaccgcctcgaggcggcgggggcgggctcgtcgtcggcgcagcaggggcatccgacgatggagtggcggttcgcgcaggtcttcggcgagcgcgcggccggggaggacgtgcaggaagttgacatcatctctgcaattgagtttgataaatctggtgatcatcttgccaccggagacagaggaggacgtgttgttttatttgaaaggacagatgctcgggataatgccagtcggagagaaatggagagacaagatgctccgattactagacacccagagtttcgctacaaaagtgaatttcagagtcatgaacctgagtttgattacctcaaaagtttggaaatagaggagaagatcaacaagatcaggtggtgccagacagccaataattcactctcccttctgtctacaaatgataaaacaataaaatactggaaggtgcaagagaagaaagtaaaacaagtttcagttatgaatttggattcacggagtgtagggactggtacctcttctagtgcaagtactagtagttctaggggtcttcttccaaatggtggatgttcagacaagtccagtttcttgaacagtgacattttgtttccacctggaggctacccgtcattacgtttgcctgtggttgcaagtcaagatgtgaaccttgttgctagatgtcgacgtgtatatgcacatgctcatgattaccatattaactctatatcaaccaatagtgatggcgagacatacatatcagcagatgatctgcgtataaatctatggaatttggagataaataaccagagcttcaatattgttgacgtgaagcctccaaacatggaagacctaacggaggtcattacatgtgcggagttccacccaactcattgtaatacactggcctatagcagttcaaagggttctatccgactcattgatctgcgacaatcagctttgtgtgtcaaccattccaagatatttgaggaacatgaagcacctggatcaagatccttctttacagagataatcgcatcaatatcggatataaaattttcaagggatggaagatacatccttagtcgcgattatatgactctcaagctatgggatctaaacatggattcaggtcctgtttcaaccttccaggttcatgaacatttaaggcccaagttatgtgatctgtatgagaacgactcaatatttgacaaatttgagtgttgtcttagtggggatggactccatgttgcaactggttcatatggtaatttatttcgggtttttggctgtactcctgggagcacagaagcgaccactttggaggcaagcagaaaccccatgaggcgtcagattgtaaacccaacaaggcccacacgcacactaacctctctggcccgtggtgtgcggagaggtggggaaaatcaaggcgttgatgccaatggaaattcatttgacttttcgacaaagttgctccatcttgcatggcacccaactgagaattctatcgcatgtgctgctgcaaatagtttgtatatgtattatgcgtagagaaggtgcttgagaaaatttattgtttttggttcgctcttggaggccgcgtgccttcacatgcaaccagagatatggtgcaggatgttgtcgtcaattcctcccttggggccaaaagaaggccgtgatgcccacaagatggctt

SEQ ID NO: 69834 - DNA, 294 bp, Oryza sativa
  unsure (1)..(294): unsure at all n locations
  Clone ID: PAT_MRT4530_70465C.1
agcgatcgatcgatcgatcgatccagcnactnagatcaacagtactagctaggaaagcatggcccgtgcacagttggtgttggtcgccctggtggcanctctgctcctcgccgccccgcacgccgccgtggccatcacctgcggncaggtcaactccgccgtcgggccctgcctgacctacacccgcggcggcgccgggccgtccgcggcctgctgcaacggcgtgaggacctcaaggcggcagcaagcacgaccgcagaccngcgcaccncctgcaactgnctcaagaaacgc

SEQ ID NO: 69835 - DNA, 1287 bp, Oryza sativa
  Clone ID: PAT_MRT4530_70466C.1
atggtttggggaggtcctagggagctcaaggacggtggtggcgcgagggattggcgagaaggcccacggcggcgcacaggcgggcgcggcggcggcgaagcagagcaatggtggggcggcacgtttagggggacgagtgagcaaccaaacggctcggggcttatccaggatgatgcaaatggcaagaatttgggcgaggagctcaccggggtgcggaaacgatatcggcggcgatttgaggatggaaagggatggaaggccgatggcggcacgcgaccgagcggcggtgcacggcggatgacgccgaggcggcgcggcgtcggggcgagtgcgtcggggaagatgagagggagtgcgaagatggggcggaccggagctcctctttggctccccgcgctcgccggctcccacggcagcgcgacaacgacaatggcagtcaaggcggcaatggtgtggtggggagaggaggcgagacaacgggggagatgggagggctcgggtttttatagtggagcgagggcgcaaaggcggcgtcagcggcgccctgtgcccgctcccgcaccaggacaagggagagagcgaggcggccttgcccgcaagggaaaagcgaaaggaggaggaggaaagggagccttgctccttccgtttttgggcggcgaggctggagaggcgcgtgggattggcgtcgccgcgttggcggcttgtggcatgcggaggcggggccatggtgacgcagcggatgacagcgaaaagggaggagggctggtttggcggcgagcgcggaccaaggcggtcgacgcggcagaggtgacggtggcgcggccacagcggtcggccttgagcggcgccgcgcccgggagcatcggcgtggcgcggtcaaggtgggggcacaggcgcggcaggacgttgtcggcgtcctctgcctccgcgcgcaagaagacaagggcgagaggagagaggtcgggtttagaagggaaaagtgagggaggacggtggaaagggaagcctctcccttccgttttgggcggcgggcaggcgaggcgcgcgcgggaagggctgccggcgaattcaaacggcggcggcgggaatcggcgccgagggtttagggatgtatcaagggaattcaaggagaagtcatgggatagattcaaaaggaatacttgggtatttgttctcgggaacatagggtggagtcaaggagggaaacaaaacgggggtttggacattttgggatttggaaatgtatttggcgaggattcaaaggaagggattgactttcggatttag

SEQ ID NO: 69836 - DNA, 734 bp, Oryza sativa
  Clone ID: PAT_MRT4530_70467C.1
cggtgcatatgttcccagccggactaagagttctggtcatcgatgacgactgttcatacttgtcagtcatggaagatttacttctgaagtgcagctacaaggttacaacgtataagaacgtcagagaagctgtgcctttcatattggacaatccacaaatagttgacctagtaatcagtgatgcgttctttcctaccgaagatggtttgctcattctgcaagaagtaacctccaagtttggcatacctacagtgattatggcttcaagtggagacacaaatacagtgatgaaatatgttgcaaatggcgcttttgatttcctgctaaaacctgtgaggatcgaagagctgagcaacatttggcagcacatattccgaaagcaaatgcaagatcacaagaacaataacatggttggaaatctcgaaaaacccggtcatcctccatcaatattagccatggctcgtgctactccggctaccacgagatcaacggccaccgaagcttcgctagcgcctctagaaaatgaggtgagagatgacatggtcaactacaatggcgagatcacggacatacgagacctcggaaagtccaggctgacctggaccacgcagttgcaccgtcagttcattgcagcagtgaaccacctcggagaagacaaggcagttccaaagaagatactagggataatgaaggtcaaacatttgacaagagagcaagttgccagtcatctgcag

SEQ ID NO: 69837 - DNA, 1508 bp, Oryza sativa
  Clone ID: PAT_MRT4530_70468C.1
atcatacgttaataccacctcgttttgcgtaaaaaacttaatcttcattttcatcttcatctttaaaagaaaaagaacaccaccaaagtttgcctttgaggaggaggaaggcatgacggcggatggggaaggggcgatgcgggaggggagctcctcggcaagggcatcggcgagtagggcgcgtatccgctccgcacgagcacgagtggggcgatagccatggagcccgagcccgagctgcaccgcgtcgacggtcgtctcattccccccgctgtcatggttacagataaggcatatataagccgatggagtaatcccagccgatgccgatatcagccgatgtcgatagggttttgagctatcggctatatgttcaatgtagatgatgatatgaaggcaatcggcttcacgtacacagattgttcccgtgtacgccgtaggaatttggagatcaagatgatccacggtataacaaggacccccaccatagcttatgaagctggagtacacgaagtcaagtcgccgggagatctcgtcgaataccacgactacgatcttatcggtatcattgatttcgtctacttctattgtaatatgtggttttccatcatcaatcctgataaggagcctgaaccagtataatctctgtcttctatttgcttgatatcgtattacatagatcctcgttccaacgtaccccaataccctaatcatccgctttacgagtatcactccaaagcctagccgccaccaactactactccagccgagcaagtcaacgtccttcaagcgctcctttgctcgcccgccctcatgtcgtccagtgttcgctggtccttctcgcgtcgttggcgtcgtccggtcgtcctccatgcgtcgccgccactgccgtccactctccatcctcaagccgcactttattctttcactcatcactttttgtccaatcacataatatccttttattatatagtaaaatcccttatattcacggatagagggagcatagattaacgtagaagcagtttcacccgaatagtaataatattggtgtgaactgtacggactcacctgtcctccgaccagaattccgatcgccaccccgcggttctgctctcgccggccgaacaacgcgtgctcacgctcgccgccgccggtcgccgcctccaaatcgtcgccagagaatccgcgtcctccccagatgacgctgcgcacgggagaagcaacgccgcctccccaggcgcatgccgaggaggagccggggcgggggaagcgccggcgcgtcgtcgcccgtgagacgaggctgcagcaggaggaggaggaggaggagggcgcctcatccgagccggagaccagaccgggctcgtcctccgccacccccgtcaatgtagaggagtccgccgccaccgtcgcttgggcggaagccatggctcatctggccatatacatatgatgtgttgctgttgtagaagcagagtgattgggccgagatatgggttatgagagag

SEQ ID NO: 69838 - DNA, 377 bp, Oryza sativa
  Clone ID: PAT_MRT4530_70469C.1
ctagttctagatgcgagcggccgccctggttttttttttttttttttttgttttttttttttttttttttttttttttttttttttttttttttttcttttttgggaaaaagccggccccatttaaaaccaagattttgacagggaacaacaaacaccaggctaaaaaagcttagctaacttagaagctacagaacactgccaggaacaaaacaacttggggttaaagacccccaaaggaacccaatattttcatcaaaacaagggacccaatctgctgaggccgggggtgaaaagaaacttttccgaccgggacccgaaaatgttgcccagggaaaggcaaataggggccggggggaaactctgggatccccccac

SEQ ID NO: 69839 - DNA, 520 bp, Oryza sativa
  unsure (1)..(520): unsure at all n locations
  Clone ID: PAT_MRT4530_7046C.1
nccacncgtccncccacgcgtccgcgnggtcnaacncagtctgcngccttnnagttaggtgtacttcttgncgttcgctanatgangnntatntctcttttttgtncnganattattctnncctgncnnttccanacaacgaangnnntttggggctananggggtnangcgtcnttncantaattagttnngtnnctgngntcngttcccttgttttnaggggccctnttnaananattggacaaattnggtggnnnatggantttaaggatcntngcaattatgatntncnncttgtcatttnatgngttaananaattgttngcncttncnnnnatcacncggcttnggnnnancnaanaaanttttgcncccaaccnanggaanaaatcnagntnaacngnggaggnncncnngngnaaaggggnccttcttaaaaanggtttnntttngaaaaagaaaancccngntgnggggcatgnnnatncnccggaanangntgannnnnntncnaggctt

SEQ ID NO: 69840 - DNA, 1758 bp, Oryza sativa
  Clone ID: PAT_MRT4530_70470C.1
actacttagggaaagtggtccctgagtaccggccggattccgggtcgccaccgtcgtcagaggagttggggaagagaaagaaaatgggcccgcgcgcgctcctggctgacttcgctgccgcgcgctcccgaggcgaagcggagcctaagcggagccagatttccctctcctctcctctcctcctacgtttttgcgtaccagtagcccgttctgtacacatcttgccaagctgagcctcaaaacgcggtcgtgatcgcagcagagcctccgcgggcagccggttttcgcactgtgcgggaacatccactgccgtctctcgcggtcatgtggtcgtgccgctctcaccttctggtccttagggaagaacactgtggacagcgcgacgcctcctagccgccaccgctgctccgctgctcctcgtcccagagggagttctatcgcgggtggagcgtcgcccgtcgtccaacgtcgctgtttcgcctcgccgcgcgccgcctccctttctctggtctacgtgtaagccaggcgtgcccccgtcggccgccgcctcgccttctcctcgcccaggaaagcattccgagtgatgggcgcgcttcgtcccgtcctttggccgcgccgctccgccccgcatagatgagcccgctcagtcggctgctctggaggtggtggcgggcgcgtgagggagggcaccagggttgacaagttctcgaagaatgacatcatcgtgtcccctgtccattcgcctttctgccgcggaaactttgtccaagcttggcgagcaggtaaaagctgtactggattctggacgtttttgatgctgttggatgtgcatctgatgattgtggaactctgagcaacgagttccagattttagtcaaggcaggtgctgatattgttagcgttcactgtgagcaatcgtcaaccatccatctacaccgaacagtcaatcagatcaaaagtcttggagcaaaggctggagttgttttgaatcctgcaacccctctcactgcgatagattatgtacttgatgttgttgatctagtattgattatgtcggtgaatcctgggtttggtgggcagagctttattgaaagccaagtgaagaagattgcagagttgagaagattatgtgcagagaagggagtaaacccttggattgaggttgatggtggagttggtcccaaaaacgcctacaaggtcattgaagctggggccaacgccattgttgctggttcagccgttttcggggctccagactatgcagaagctatcaagggaatcaagaccagccaaaaacctgtggctgtaccagcatgaggatcctaaagtagtatgctgtgtacgttgtttttgtttaccagtaccgcggtttgtacagatatgtgccaagctgtacgttatattggagaaattgaaggaagaagaaaacgtggagggcgaccgtttttctcactgtccgcgaagatatactacatattctcagtgtcatgtgatactaccgtgctcacgaaattgttcataataaatatcgttctttagcaaatcaaaaaataatttacacttctagcaaaagaaatttataaaaaaatatatgcattttttccgcccttctcggtccccccgcaacctccccgccctcccccctgcaggttccggcttggggaccgttgaaaatacagtactacccaaatggtcacgggggcaaaaaaaaaatcaacccttgcgaattttttttcccaaaaaaaaaaaaaaaaaaaa

SEQ ID NO: 69841 - DNA, 471 bp, Oryza sativa
  Clone ID: PAT_MRT4530_70471C.1
atgagcctttcgtcgtacctgacgtgcaacctggtgaccaggcaacggcaacgaggtggcgtggaagaagacgagtacgatgggcggcgtcagccgcagacggccacctgctgcaccgccctgaaacgaggtgtcaccgctgacggactcctcgcgcagccgcgctacgccccggtcaggacgccccaatccgcattgctgctgctcgatccaccaccaccggcgcccatgacgcccacgtcgtcgtccagcaacagcaaccacgacgacgacgacgaaaagaagaagaagcagccgatgctgcagcagcagaagcaggtgcgcaagtgcaaatcgacggtggaggaggcgtcggcgtcgcagctgatggaatgtaaaggcggcggccctcctcctcgtctccgtcgcagcggcggcgtccgccgtgactggagcttcgaggacctccgcgccaacaacaccgccgcctaa

SEQ ID NO: 69842 - DNA, 694 bp, Oryza sativa
  Clone ID: PAT_MRT4530_70472C.1
gcccagcgagccgcgaaaaattccgccgccgccgtttcgtcgacctcatcggcggccatgctgctccgcctccgtccgccgccgcagccggccgccagcctcgcatccttcctccccttctcccccttcaggcgcttcctccactcgccgtcctggcgccctcctcctcctcctcctccgcgccgccaccgcctcctctccactgccgtcgcctcctcctcctcctcctccaaagtctcgacaagtcttgaggagcgatacgatgtgattgtggttggaggaggccatgccggatgtgaggccgcgcttgcgtcggctcgtcttggtgcgcgcaccctcctccttacgcttaacattgatcggattgcgtggcagccttgcaaccctgccgtgggagggcctgcaaagtctcaacttgttcatgaggtagatgcccttggtggtgaaatggggaaaattgcagacaggtgctacctacaaaagcgtgtgctaaacagctcaaaaggccctgctgtacgtgcactgcgtgctcagactgacaagagggagtatgcagtagagatgaagaaagttgttgaaagcacacaaaatcttttcattagagaggcaatggctacagaggttatgataggccagaacgacaatgttgagggtgtccgcactttcttcggcatggacttttatgcaccatctg

SEQ ID NO: 69843 - DNA, 213 bp, Oryza sativa
  Clone ID: PAT_MRT4530_70473C.1
atggcgacgggcgtgggcggcggcgcgcagggacgggtagcgccgacgagggcgccccgtgatgtgccggcagcgggcggcgccgaggagggtgtggatggcgccgggggcggacgcagcttggggcggcgggatggcgatgaacggtggcggaggctgctcggggtcgcagtctttgttggtgtggtcattatacaaacatcttcgttataa

SEQ ID NO: 69844 - DNA, 332 bp, Oryza sativa
  Clone ID: PAT_MRT4530_70474C.1
cttctgaggcgtgctgaagggccatcagaggccggccggtgaggtggatgcttggatcccatgggtgagctagggttgggagcagggggacgccatagatagtctggggaagacctagagtgatcgatatcgtcgagtcgaaggaagaagacgaccaaacaactactagtctcttctctcttgtaacaagtgttaactccgattagattagaggagtccaccaacaagtctaacaactttggttagttggtgacatttgttgttggcgagagatatacaactctttatcccgaaattcattcaaatcttcacaaaaaaaaaaaaaaaaaaaa

SEQ ID NO: 69845 - DNA, 586 bp, Oryza sativa
  Clone ID: PAT_MRT4530_70475C.1
tcggaaaggatatggattattctctatcatgcaggtacattgtctccgatcagttgtacttagaaactaagccaactcatgatataaaagacatacccccgaaggtgttaaggatcatcgaatcacagcaccaacacacctaccatagcttacgaagccgaagccgccaggagatctcgtcgaacgatcttgacaaggatctcgccggcatcgtcggattcatatgtactctttatattatgtggttttccatatcaatctcatataaactggattatgactattacctcacgtgaggcctgaactggtataatccttgtcttttgtctattttgatgtcgtatcgtgtagatcctcgtaccaacgtaccccaataccctatttatccagtctatgggtatcccctgtcaacagtatcataaatgtaaagcttgatgcgatctacaagtttgttgtcaatgattttttttttcatttgatatcatttagggtgtaaatatgtgttgcatgttttgtgagaggtgaagttacaataataatatccaactctgcttgacaggtgagatggcaatgatattacgtgctg

SEQ ID NO: 69846 - DNA, 3036 bp, Oryza sativa
  Clone ID: PAT_MRT4530_70476C.1
atggaaaccatgctctctcttctcacacatgccctcctcttgcaaacagtcacctctcagaccatcaatggtgatgatctctcagcactcttgtcattcaaatccctcataagggatgacccaagagaggtgatgtcatcttgggacaccgctggcaatggtacaaacatgccagcacctgtcatctgccaatggactggtgtttcctgcaacaatcgccggcatccaggtcgcgtaaccactctccgtctgagtggcgctggcctagtcggcaccatctcccctcagctcggcaacctgacccacctccgtgtccttgatctgtcagccaacagcctcgatggtgatatcccagctagccttggtggttgtcgaaagcttcgtacattgaacttgagcacgaaccacctgtcaggttcaatccctgatgatcttggtcagtcatcaaagcttgccattttcgatgtcggccacaacaatcttactggtaatgttcccaagtcattctccaacctcacaacacttgtgaagtttatcatagagacgaacttcattgatggcaaagatttgagctggatgggtaacctcacatcattgacacacttcgttcttgaagggaaccgtttcactggtaacatccctgaatcttttggtaaaatggctaatcttatttactttaatgtcaaagataatcagttggaaggccatgttcctctaccgatcttcaatatttcttccattagattcttggatcttggtttcaacagactgtcaggatcacttccactcgatattggttttaagcttcccaggataaaaatttttagcactattgctaaccattttgagggcataataccaccgaccttctcaaacgcatctgctctcgaatccttgcaacttcgtggaaacaaatatcacggcatgattcctagggaaattggcatccatggtaacctgaagttctttgcgttaggagacaatgtgctccaagccacacggcctagtgatttggaattttttacatcattgaccaattgtagcagcttgcaaatgctagatgttggccagaacaaccttgttggtgcaatgccaattaacattgcaaacctgagcggagagctctcatggattgacctaagtggcaaccaattaattgggaccatacctgcagatttgtggaagcttaaacttacatctctcaacctgtcatataatctcttcacaggaactttacctcatgatattggctggcttacaagaatcaattctatctatgtatcacataatagaatcactgggcagattccacaatcattaggcaatgcctcacagttgagctctctcactttgtcaaataattttctggatggaagcattccatcaagccttggcaatctcacaaaacttcaatacttggatctttccggtaacgccttgatgggccaaatcccacaagaaatacttacaataccttcccttaccaaacttctcagcctctccaacaatgctctaagtggctctattccaagacagattgggctcttgaacagccttgtcaaaatggatctctcaatgaataagctatctggtgaaatcccaaaagctattggcagctgtgtccaattgagtttcctaaatttcaaaggaaatcttctccagggacaaataccagaaaatctgaacaatttgaggagccttgaaatccttgatctctctaacaacaacttggcaggtcccatacctgaatttctagcgaatttcacgcttctaactaatctaaacctctccttcaacgcactgtcaggtcctgttccaaatacagggattttttgtaatggcactatagtgtcactctcaggtaatacaatgctatgtggcggccctccagatttgcaattcccttcatgcccatctaaagattcagaccaggcttcagtgcatcgactacatgtcttaatcttttgcattgttggaactttgattttctctttgttttgtatgactgcatactgcttcattaagacaaggatgaaaccgaatatcattgataatgaaaacctatttctttatgagacgaatgagaggatatcttatgccgaactacaagcagcaaccgagtcattctcaccggcaaatttgattggttctggaagctttggcaatgtttacattggaaatttgattattgatcagaatctagtacctattgcagtcaaggttcttaaccttagccaacgaggagccagtagaagtttcttgactgagtgtgatgctcttaggagaattcgacatcggaaacttgtcaaggtgatcaccatatgcagtggatcagaccaaaatggtgatgagttcaaggcgcttgtcctagaattcatttgtaatggaagtttagatgagtggctgcatgcaagcacggcagcaattagcacaagctacagaaggctaaatctgatgaaaaggctgcatattgctcttgatgtggcagaggcattggaatatcttcaccatcatattgtgccgcctatagttcactgtgatattaaaccaagcaacattcttttagacgatgacatggtggcgcatgttacggactttggtctagcaaagataatcaatattgctgaaccgtgcaaagaaagcagctcatttgtaattaaaggaacaattggatatgttgcaccagaatatggctcaggatctccggtctctatggatggggacatatatagctatggggtgttgttgttggaaatgtttactggaagaagaccaactgacaattttatcaatggtatggcaagtcttatcgattatgtcaagacagcctatcctaacaatctattggaaatattggacactaatgcaacctacaatggaaacacccaagatatgacacaactagttgtttatcctatatttcgacttggtctagcatgctgcaaggaatcaccaagggaaagaatgaagatggataatgtagtcaaggaattgaatgctataaagaaggcattctcagctcatacatatgcctga

SEQ ID NO: 69847 - DNA, 1413 bp, Oryza sativa
  Clone ID: PAT_MRT4530_70477C.1
atggatcaagataaagaacagcagctcagcctgaaccaggaggatgatacaatacgatggaagcttactccagatggatttttctccgtgtcatctgcttatgacctcttcttcatggcaagggagacaacttggcaaagaggggctggccgcatcaagatcaatgcgtcctctgtcaacgacagcaggaagattacggcggagcagcttctagagagcatcaaggaggaaatattcgtgtggaagtccggagtcatcctgcgtttccaaggaagcccacaattaccactacttgctatcaccgccacctctcagaccatcaatggagatgacctctcagcactcctgtcattcaaatccctcataaggaacgatccaagacaggtgctgtcctcttgggactccattggcaatgataccaacatgccagcacatgtcttctgtcgatggaccggtgtttcctgcaacaattgccggcatccaggtcgtgtaaccactctccgtctgagtggtgctggcctagtcggcaccatctcccctcagctcggcaacctgaccctccttcgtgtccttgatctgtcagccaacagcctcgatggtgatatcccagccagcctaggtagttgtcgaaagcttcatacattgaacttgagcaggaaccacctgttaggttcaatgcccgctgatcttggtcaatcatcaaagcttgccattttcgatgctggctacaacaatcttactggtaatgttcccaagtctttatccaacctcacaacactcatgaagtttatcataaagaggaacatcatccatggcaaaaatttgagttggatgggtaacctgacatcattgacacacttcgttcttgacgggaaccgtttcaccggtaacatctctgaatcttttggtaaaatggctaatcttatttacttcaatgtcagagataatcagttggaaggccatgttcctctaccgatcttcaatatttcttgcattagattcttggatcttggtttcaacagactgtcaggatcaattccactcgatattggttttaagcttcccaggataaattattttagcacaattgctaaccattttgagggcataataccaccgaccttctcaaacacatctgctattgaatccttgcttcttcgtggaaacaaatatcatgacacgattcctagggaaattggcatccatggtaacctgaagttctttgcattaggagacaatatgctccaagccacacggcctagtgattgggaattttttacatcattggccaattgtagcagcttgcaaatgctagatgttggccagaacaaccttgctgatgccgaggaggagccccgtgcaccggcggaagccgaggacaaactgtgcgccggtggctgcgagcatccttga

SEQ ID NO: 69848 - DNA, 231 bp, Oryza sativa
  Clone ID: PAT_MRT4530_70478C.1
atggcatggcatatggacacggaggacgggaggagaagagatatttgctctctttcgccgacaggtgggaccccggttattcctgtaatggtgacggcttctcagactgaaaacgtcggtaaagcagggcctcaaggccgtacgtacgtgaccgacaactcttgcaggacttctcctggccattacgacaacgtggatttagtctctgtagatcgaaaaaaaggctcatga

SEQ ID NO: 69849 - DNA, 280 bp, Oryza sativa
  Clone ID: PAT_MRT4530_70479C.1
agagagagacggggccggtggcggtggcatgttcctgcggaccctcctgatcggtgaaagaaggatggcgttctccggaggaaactgccgctggaaacacctgtgcccgtgcggcagccggtactgaggacgcaagatgttccctgtgatggatgaggaggggttcactacccacactgtcatcatggctgagataccttccaagggtcatgcccacggagcttgaggcccggaccccccccttaccgggatcagacaacgggtgcaagcaggacttcaa

SEQ ID NO: 69850 - DNA, 444 bp, Oryza sativa
  Clone ID: PAT_MRT4530_7047C.1
atggggagactgaggccgccgtgctgcgacgagagcagcgtgaagaaggggccgtggacgcgggaggaggacgagaagctcgtcgcctacgtcgaccagcacggcggccatggcagctggaggtctctccccaagcgagccgggctcaacaggtgctgcaagagctgccgtctgcgatggattaactatctcaggcctgacatcaagagaggcaacttcactcctgaggaagaacaggccatcattaccctccactccgtcctcggcaataagtggtcgaccatcgcgacacgccttcctgggcgcacggacaacgagatcaagaactactggaacacgcgcctcaagaagaggctcatcggcgccggcatcgacccggccacgcaccgcgcgcggccgcggccgccggcgcctggggacctcgccaccgcgctcccgcagctg

SEQ ID NO: 69851 - DNA, 385 bp, Oryza sativa
  Clone ID: PAT_MRT4530_70480C.1
ccgagaaaagggggatattgcaagaaagccagatggcaaaaccagcataataattctcaagttggccccaaaaaaaccaagttggccaagatgctttactcaagtcaagggaaaaggggactaaattaacccatctatgtaaaaatggccggggaccattaacaacatgaatatggcaaattcatataaaacttgaaggcccatgtttttgagaaacacccattgccatggggcccaggccaccgaaggggtcaccaaacggattggaaaacccaccctggggggcagggaactgatgctgccgctgctgctgttgtgggaaaatctgattttggggaaaacgggcctaaaaaaacatgtaatggcgatgttgaggaccctggaa

SEQ ID NO: 69852 - DNA, 181 bp, Oryza sativa
  Clone ID: PAT_MRT4530_70481C.1
cccacgcgttcggccacgcgttcggccacgcgttcgggacaagttgcaattcaaggatctttcactgggccacagtatgatcccttttggttcttgcactatgaaactaaatgcttcaggggaaatgatggccgtcaccttccccaagtttggaaacatgcccccatttggaccttcttga

SEQ ID NO: 69853 - DNA, 114 bp, Oryza sativa
  Clone ID: PAT_MRT4530_70482C.1
atgggccccatgaaagagcaagattttgcatgggtggacgtcctgcgacaagctaatactcgtcttgtgggaaccaaccacgacgatgcagaaatggtggaaggcaatcgctaa

SEQ ID NO: 69854 - DNA, 701 bp, Oryza sativa
  Clone ID: PAT_MRT4530_70483C.1
gggccaaaaaagattgcctagggtgtttagccccgtaaaaagggagagttgttcgttcaatacaataaagagggggggttttgttgtttagcctttacaaacccaaagccgccccaacaatgggttgaaattccgcccgggcatggttttttaacgacaaccaaggggagagccttcttgaaaattaccgggggcccagggggggttacaagaaaaccatttttccctccaaatttgccagctattgatctggttggaatttacacaaacaagggggaggaaaccctcaagcaaaggggggaggctttgggattttggctttcgctttttttacctcgggccggacagttccattgcccggaaattgttggtcgagtccacaatccaaacgttgggggggggggccacctcccccttctggcggaccaaccttcccttttggcactttttccaacgtttcggggggccattgtcctttaagattcttcacccccttcaaaattttgggccggtccattggggagccctgggtgcaaaaaaaaaccccccgggaggagggacttcccctttatgtttcacaaaaaccccttttgtgagggtccggggtcccacccaagatttttcccccacttttttttttttttttggggagacccttttttccccccaattggggggccacacttccccatttttttttt

SEQ ID NO: 69855 - DNA, 2268 bp, Oryza sativa
  Clone ID: PAT_MRT4530_70484C.1
atggccggtcagaccgtgtactacgccggtcagaccgtgccctatcctgaccagatagcgcctcctgtggccggtctgaccgcaccactgaccaccggtcagactgggccatgggccgtcatactactccacacatccctaatccctaatgcttacaatgatcctaatggaggatattctcatgacactgggtatggccagtataataatattgtgccgcaacaaccaccccttaggccaccaaacccaccactagattcaccgaggcctgaaactgtggaggattggcttagaaatattatcagggaaaatttcgcagttgagccaaggaatcgtgctagagagtaccaaaagccatatcctgattattatgatattctcccatatcctcgtgattatagaatttctgaatttaccaagtttagtggtgaggatagtaggaccacatgcgagcatgtaggtcaatttttagcgcaatgtggtagggctagtaatatggatacatattcggtcccatacccgcaaggatttgaggtgcccaacttcacgaaattaacaggtcagaatgctatgactacaatggagcatattggccaatttactgatcaatgtggtaaggttggtagtaatgatttgcttaagttaaagttgtttcctctttctttgtcaaactttgcatctacatggtatagtttacttgctcctagttcaatctctacatggtcacaaatggagtatgagtttcatgattattttaaagatgtaagcttgatggagcaaaggttgattgatgattcatcggtcacttgtggaactatttcggttacacctatgcctaagaccggaattattagtgatcctctctctattagtcctattgatgttgacaaaaagaaatggaaaagtgttattattagggatcctcggcccaagacaattaggatcaataattcaaaggccgaagatcataaagttgcaaaggatgagtcatctagttcccaaaaaactaaaaagttgaagctcacttttgagatgcttatggctaagtacaagaaaggattagctggtcaacgatttcataaccaaactagtgattcaaaaagatcaagatcatctcgtaggaagagatttggacaaacaccaaagcaatcgcagccatcaactataccaactccatacaaacctccggttgtgatgccatggtatccatatcaaatgtcactatatggttatccttttatgtattacatgccgtggatgcctcaaccacctatgccatttcatcaagagtggaaggaatcacctaggtcaataccaagtcattcatctaattctagtcaagattgtttcccgcgaaagaatcggtccgatggatcaaatgtgaaaaatgtgaagaaggtgtgggtaaggaaagaagccaaagctccggaggtcgtcactatcaaggaggaatctcaatacgttcaagtacctactggagatgcggcgaaaactatacaagcgaataagactgaagccgacgccgtgactgccaacagtggtggtctgaccgaccttactggccgaaagccgattttgcttggggggcaggacatcaatatgcttatgaagaaatcaagagagatgaacggcgatggatacgacatcacatctttgagccgccgtttgttggatgctaatgaaagaagagcggggttctattggccgaaagtgattgatgattgtttcaagtactatagaggatgcgaagtttgtcaacggattggcaatgttcaattggtgcctaacgctgtattgaatcctatcatcaaaccatggccgttccgaggttgggctttggatttcattggtcaaatttatccttcatcattaaaagggcatcggtttgtgctagttgcatcgaattacttcattaagtgggccgaaaccgtgtcgttcaagaatattacttacacggaggagattgaagaacaccaaaaaaaagtggcatgggtgcttttagaagctttatgggctcataggatatctaaacatggtactatcaaagtcactccttttgagttggtttatggacaaaaggccgttttgtcagttgagataaatcttggctctcttcagtatatcaagcaaaacgacttgttgattgaagattacaagaccttgatgggaggcaattttgaaaacatcatcgacaagcgtttgaagacttttgaagagatggagacactaacaacatttttcggagagcaatcaatgggaaatacttga

SEQ ID NO: 69856 - DNA, 509 bp, Oryza sativa
  unsure (1)..(509): unsure at all n locations
  Clone ID: PAT_MRT4530_70485C.1
ctcgcgtccgtcagcncctctgtcccncctcgcgcgacgnccccatcagctcgccggtccaacgtcgccgtgagggatccccctcctccctgccgagctacagcaccctattccccactgctgcacagtgagtgacaatgatgaagactatatgccaccaatcgattcatctgaagaagaagaagaaccgtatgttagcacagcaccagatgatggtgacatgtgcacctttcgggatttaattgcaaactctctgatggcaaatagacgacgcggtacataaaactatgcatatggttcaggttgtattttgctatgtggttgatgtatatatggtagtggttaattaattagtactttgttatttgcatatatagcgatggcaaattaggcttttgtatgtgcttgatgaacacatttaggtggaaaagtacaatgtatgtgtttgcattaagtgattaatttgaccctccttattaaaaaaaaaaaaaaaaaaaaaaaaaaaaaaa

SEQ ID NO: 69857 - DNA, 2763 bp, Oryza sativa
  Clone ID: PAT_MRT4530_70486C.1
atgtcgaagcggcccaagctcgggggattcagcatccctcgccccacttcctacagcttcgagcgctcccagcctccccagcgcctctacgtccccgccgacgaccccgacctcgacgacatcgccttctccgacgacgcggcggccccgtcggacgcgccccccgcggggggaggcggggcggcgggggatgaggaggagatcgacccgctcgacgccttcatggccgagatccaggaggagattcgcgcgccgccgccggcgcccaagcccgaggcgctccggcgcgcggactccgacgacgaggacgaccccgtggagagcttcctccgggccaagaaggaatccgggctcgcgctcgccgccgacgccatgcacgccgggtacgactccgacgaggaggtctacgctgcggccaaggccgtggacgccggcatgatggagtacgactccgacgacaaccccatagtggtggacaagaagaagatcgagcctattccgccgctcgaccattccaccatcgagtatgaacccttcaacaaggatttctacgaggagaagccctcggtttcagggatgagtgagcaagaggtggctgattatatgaaaagtttggcaattcgagtttcaggttttgatgtgccaagaccaatcaaaagctttgcagattgtgggtttcctgtacaactaatgaatgccattgccaagcagggttatgaaaaaccaactacaatccagtgccaggctttaccaattgtactttcaggcagagatatcattggtattgctaaaactggttctggcaaaactgcagcttttgtactccccatgattgttcacattatggatcagcctgagcttgagaaagaagaagggccaataggtgtggtatgtgctccaacaagagaattggcacatcagatataccttgaagctaagaagtttgcccaaccttacaatcttcgagttgctgctgtatatgggggggtttccaaatttgatcaattcaaagaactgaaggcaggctgtgaaatagtcattgctaccccagggagattaatagacttgcttaagatgaaggcattgaagatgtttagggcaacttatttggttcttgatgaagctgatcgcatgttcgatcttggatttgagcctcagataagatccatcgttggtcaaattagaccagaccgacaaaccttgcttttctcagcaacaatgccatacaaagtggaacgtttggctagagaaattttgactgaccctattagagttacagtaggtcaggttggcagtgctaatgaagacattaagcaagttgtaaatgtactcccttctgatgctgagaagatgccttggcttctggaaaaacttcctgggatgattgatgatggagacgttcttgtatttgcagctaagaaggccagagttgatgagattgagagccagttaaatcagagaggtttcagaattgcagcacttcatggaagaactggccgtgctggtgataaagatggaactgcatatactctgattacacagaaggaggtgcgctttgcaggacaggatgtgccaaatgaactaatggatctggcaatgaaggatggaagattcagagcaaaccgggattcaagaaaaggtgggaagaaaagtggcaaaggaaaaggtggaggaggcgggggtggcggcggtagcggtgcccgtggtcgtgggcgtggtgtacgtggggttgactttggccttggcatagggtacaatgctgaatcaggatcggtgcctgctccaagatctgctgcattaaattcattgaagacagggatgatgcaaaattttaagagcagctttgtctctgcctcttcatcaaatacaccaagcaacagcgcaccttcaagaggtgctccttcctcctttgtgagaccggcactccgtggttttgtttctggtggcaccataggaggagacgcaaaccaagcacgggcagtactgcctgcgccctcctttgtccctgcttccagacctgcagaaaacactgttgaaaatgcgaacccaaaccctgaaagagacagggagggagcggcgacggcgatgccgaagctgccgatggaccagcgaccgcggctgactctcgaggactacatcctcttcttcaccacccgctccggccacggcctcaccatggaccacctcaaccagatcgtcttcatgcacgggttcatcaagttccaccgccagaacaaggtacccccccaatccacctctatttgcccccatttcggttcggttcttccgcaaaaacccgtgacgcgtgtctcgcagccggtgatcgtggacgcgctcaacaagttcgacctcatgcgcccgcgccgctccaccgtcggcatcaacgcggccgcgccaccgcgcggcgccgccaagccgtcggacgcgctgctcaccatggacgaggccagggacgacatcgaggacctcggctggcgcgagtgccccgtcggctccctcctctccatccgcgccggcggcggcgacgcggcgccctccgccgcccacatgccgatcgcggccatccgccctggctccaccgccgtggagcgcgtctccccgccgagcatactcagcgcctgctcgcccgcgccccccggggcggtggtgatccggaagcggtgcaagaagggccaggggaaggcggccatgagggggaggaagcggcgcgtcgtgcagttgctcacgctcccgtccgtcgagaacttggcggccaccgcctga

SEQ ID NO: 69858 - DNA, 2201 bp, Oryza sativa
  Clone ID: PAT_MRT4530_70487C.1
ccgcgaaccggccggccgcctcaatccccaaatcgaagcactcctctcctctcctctcctcagatcggatcgcgagagccccaatcccaccaccgatcgatccattcctgctgctcgcggccaccggagaaggagagagagagagagctcgacctcgtcggcgggtgaaggatcgcagcagcagcagcggcggtagagcaggaggagaggcgaagatgtcgtcggtgttcagcggcgatgagaccgcccccttcttcggcttcctcggcgccgcctccgccctcgtcttctcatgcatgggggcggcgtacgggacggcgaagagcggcgtcggggtggcgtcgatgggggtgatgcgcccggagctcgtgatgaagtccatcgtgcccgtggtcatggctggtgtgctgggtatctacggcctcatcatcgcagtcatcatcagcacggggatcaaccccaaggccaagccctactacctcttcgacggctacgcgcacctctcatctggcctcgcctgtggtctcgccggtctcgctgccggaatggccattggcatcgttggtgacgccggagtcagggcgaacgcccagcaaccaaagctgttcgtgggtatgatcctcatcctcatttttgccgaagcgcttgctctctatgggctcatcgtcggcatcatcctgtcatcccgcgctggccaatctcgtgcggattaggcatgtttcaacacgcaaacccttagtgggttcttgtttcatattcctgaaactacaagctgagctctaggggtttattctgtcttagtttctgttcttctgttgggtcatgaacaaaaaaacatctgtatccaagggatgtttgcccttgtggtgccattctttttcgctatggtggtgctggcggcggtctgaatcttatttatgcacagtttttttgggtctggctagacagtgatgtaatctggtgaataagcaaataattcgtaatgcaatgggagcatgagactcttttgttcaaaaaaaaaaaaaaaaaaaaaaaaagtcagcgcaattcgtcacttggcgacccgcagtttctgatgcttataataggatcattctatgtatttatccaccatggaccaaaagatatgaaatgttccatagtattcatacagctatttaaatatacatcatgaatattaggtttggtattttagaaacctttcctaattcatacaaatctgactaaaagaggctcacttattccctagattcttcttttgaggttaggggtccagtagcacaatatgtgatccttttattttctctgtgtgactgactaatacagtgttcagtgaaattgtgcaatcgtgaattatgactaatacagtgttcagtggaattgtgaattatgactaatacagtgttcagtggaattgtgaattatgatgtgctgatttataccactatttcaacttttgtttcatacctgtttgtaataaattctatagttcatatggcatcttttctgtacatttttgttgctttgtaatttgttaactctattcttctaaacatattcaaagttttgaacactggacaaggcttgaatttattatttgtatgtttacgattgattacctgaagagaggttccgcacatcagcacgtgagaacattctcacctaaaattgtttagatattcttgtcaaagaaaccccttctttagagtagcgtgtaactataagtggagttatttgaggctttaaatttttctaaaagtcaacacaaaagttttcttcaacttgtttgtggcttgatattttgtactgaggatattaagaactgcgttagcctcaaagtcttatctagaataaacatgttttacttttgtagtagtttgtggcttgatatgtgaagttgttggcatgtatgcaatagcaatgatgattttactacttataatatttgacttctaatcatattctttgtcttcagggcgaacgcccagcaaccaaagctgttcgtgggtatgatcctcatcctcatttttgccgaagcgcttgctctctatgggctcatcgtcggcatcatcctgtcatcccgcgctggccaatctcgtgcggattaggcatgtttcaacacgcagacccttagtgggttcttggttcatattgctgaaactacaagctgagctctaggggtttattctggcttagtttct

SEQ ID NO: 69859 - DNA, 2934 bp, Oryza sativa
  Clone ID: PAT_MRT4530_70488C.1
atgtcgaagcggcccaagctcgggggattcagcatccctcgccccacttcctacagcttcgagcgctcccagcctccccagcgcctctacgtccccgccgacgaccccgacctcgacgacatcgccttctccgacgacgcggcggccccgtcggacgcgccccccgcggggggaggcggggcggcgggggatgaggaggagatcgacccgctcgacgccttcatggccgagatccaggaggagattcgcgcgccgccgccggcgcccaagcccgaggcgctccggcgcgcggactccgacgacgaggacgaccccgtggagagcttcctccgggccaagaaggattccgggctcgcgctcgccgccgacgccatgcacgccgggtacgactccgacgaggaggtctacgctgcggccaaggccgtggacgccggcatgatggagtacgactccgacgacaaccccatagtggtggacaagaagaagatcgagcctattccgccgctcgaccattccaccatcgagtatgaacccttcaacaaggatttctacgaggagaagccctcggtttcagggatgagtgagcaagaggtggctgattatatgaaaagtttggcaattcgagtttcaggttttgatgtgccaagaccaatcaaaagctttgcagattgtgggtttcctgtacaactaatgaatgccattgccaagcagggttatgaaaaaccaactacaatccagtgccaggctttaccaattgtactttcaggcagagatatcattggtattgctaaaactggttctggcaaaactgcagcttttgtactccccatgattgttcacattatggatcagcctgagcttgagaaagaagaagggccaataggtgtggtatgtgctccaacaagagaattggcacatcagatataccttgaagctaagaagtttgccaaaccttacaatcttcgagttgctgctgtatatggtggggtttccaaatttgatcaattcaaagaactgaaggcaggctgtgaaatagtcattgctaccccagggagattaatagacttgcttaagatgaaggcattgaagatgtttagggcaacttatttggttcttgatgaagctgatcgcatgttcgatcttggatttgagcctcagataagatccatcgttggtcaaattagaccagaccgacaaaccttgcttttctcagcaacaatgccatacaaagtggaacgtttggctagagaaattttgactgaccctattagagttacagtaggtcaggttggcagtgctaatgaagacattaagcaagttgtaaatgtactcccttctgatgctgagaagatgccttggcttctggaaaaacttcctgggatgattgatgatggagacgttcttgtatttgcagctaagaaggccagagttgatgagattgagagccagttaaatcagagaggtttcagaattgcagcacttcatggtgacaaggatcaagcttctcgcatggagacattgcagaagttcaaatccggggtttatcacgtcctagtagcaactgatgttgctgcacgtggtctggacattaagtcgattaaaacagttgttaatttcgatattgcaaaagaaatggatatgcatattcaccggataggaagaactggccgtgctggtgataaagatggaactgcatatactctgattacacagaaggaggtgcgctttgcaggacaggatgtgccaaatgaactaatggatctggcaatgaaggatggaagattcagagcaaaccgggattcaagaaaaggtgggaagaaaagtggcaaaggaaaaggtggaggaggcgggggtggcggcggtagcggtgcccgtggtcgtgggcgtggtgtacgtggggttgactttggccttggcatagggtacaatgctgaatcaggatcggtgcctgctccaagatctgctgcattaaattcattgaagacagggatgatgcaaaattttaagagcagctttgtctctgcctcttcatcaaatacaccaagcaacagcgcaccttcaagaggtgctccttcctcctttgtgagaccggcactccgtggttttgtttctggtggcaccataggaggagacgcaaaccaagcacgggcagtactgcctgcgccctcctttgtccctgcttccagacctgcagaaaacactgttgaaaatgcgaacccaaaccctgaaagagacagggagggagcggcgacggcgatgccgaagctgccgatggaccagcgaccgcggctgactctcgaggactacatcctcttcttcaccacccgctccggccacggcctcaccatggaccacctcaaccagatcgtcttcatgcacgggttcatcaagttccaccgccagaacaaggtacccccccaatccacctctatttgcccccatttcggttcggttcttccgcaaaaacccgtgacgcgtgtctcgcagccggtgatcgtggacgcgctcaacaagttcgacctcatgcgcccgcgccgctccaccgtcggcatcaacgcggccgcgccaccgcgcggcgccgccaagccgtcggacgcgctgctcaccatggacgaggccagggacgacatcgaggacctcggctggcgcgagtgccccgtcggctccctcctctccatccgcgccggcggcggcgacgcggcgccctccgccgcccacatgccgatcgcggccatccgccctggctccaccgccgtggagcgcgtctccccgccgagcatactcagcgcctgctcgcccgcgccccccggggcggtggtgatccggaagcggtgcaagaagggccaggggaaggcggccatgagggggaggaagcggcgcgtcgtgcagttgctcacgctcccgtccgtcgagaacttggcggccaccgcctga

SEQ ID NO: 69860 - DNA, 270 bp, Oryza sativa
  Clone ID: PAT_MRT4530_70489C.1
atatcaataggcgagattcattatatcactgaatggggactacataacagaggggcacacgacctaacgctacaattacaattaaaagatcatttataccaatgtgcatcttataaccctgacacatacatacacacacctcaaagttttaagagatgcccaaactagcaccgcaaaaaaatctgggcatctctaaaaggtcttatcgatagtatgcatataccaaatttaaaggatagtaattccgacacgtgggccgacacatgggca

SEQ ID NO: 69861 - DNA, 887 bp, Oryza sativa
  Clone ID: PAT_MRT4530_7048C.1
cgtataacaggcggcaagcgagttgacatccgcaacttttgaccgcggacccaccgcggtgggagggaaccgaaaaagaggggaggggtcaaaaaagagcgactcacctctcccccggagcgatgggcgagaccagatgggcgcccaaacggggaagaggcgcgcgctggttttgaagcgaaaaggccgggcggcgttccccgggtcgcggggcaaaacggaggaccgtacgaggttggcagggaaccggcaaaacccgaaggaggcggtgcctaaagcgggaggaggtccggggcgacgacggcggcaaaccggagctcggcggcgacggcggaaagaaaggacgaaggcgcgggctttattccgacggggaagagagagcggcgagcggcggaaacggaggagagaggcacggggagcgattaaatagggttgggagggagagagggcggccggggaggaaggaatcggccgcggaaatctcggactccatcaatggcgccggcgaggattgcgggagactttccgaacgaatccgagggagagagagagggaaaagaggggggaaagagggagggaatcacggggagtgatttccccctctttatggcgcgcgggaacggcgggatgcggcggattcggcggcggcggcggcgctagggcacgggcaggcggcgggcgcggcgcgaggtaggggatgacaggtgggccccacccgtcagcgagggtggcgggcgggcccacccgtcagcggcgcgcgcgcgggggaaggccgatgggccgcgggggagaggagagagagggagggagttgggccgagccggcccaagagggggaagggggggaaaagaagactttttagggtttttctttttataaaaccattt

SEQ ID NO: 69862 - DNA, 888 bp, Oryza sativa
  unsure (1)..(888): unsure at all n locations
  Clone ID: PAT_MRT4530_70490C.1
ttttttttttttttttgtttggtaaaaaaagggccatgcattcaatttttacaatcagatgcctgacttttttttttacaacttgtaagcttttcttgacccggaaggccaaaagaggacacggtgaaattttccactgagcggtaattttacagagaggggatgaacacaaaacgccaattgaatttaaccatgtcatcatttttttttaccctaatactaaaagaacaaaacgaactggatcaattcagctaatccccctacctaatctatgtctagctaaattactcatctggagttagcgagatcgatggcgatgaggaggacggtgttcgatcagttgatggcgatgtggacggaggcgttcttggcggcgaggcagacggggcaagcgtccagcttgggctcgcacgccttgcagaggcagaggtggcggcatgggaggagcagcacggtggcgtcgccctcaccgcacgacttgcacgaccacttggacgccgccggcgaggtggcggcgtcgtcggcggcgtgcgcgtttgtgtcgaagcaggaggactgggcgtcgtcggcggcggcggtggcgagggggtcggagtcgccgaagccctcggcgggttgggcgggggcggcggcggcggcgcggaggaggaggtggtcgagggtggcgcgtatgcccgccgcgacggcctcgttgctgcgggcgaggccgcaccacgcctggctctcggcggcgacctggcggagccgctcctccagctcggccgcgcggcgccttgcggcgtcgagctcggcctccttctcccgcagccgccgcgccgnggcgtccgacgcccgtcccaccacccncttgcactgcccnttccgcccctgctccagccccgcgcgcat

SEQ ID NO: 69863 - DNA, 3671 bp, Oryza sativa
  Clone ID: PAT_MRT4530_70491C.1
cccctctgctggcttccacctactctccgccggcctgaggctgcggctcccctgcctgcgcgccaccgtcaggaaaatgtcatcaaatcctgatggaggcagaagttttgctcggagagatattttactcaagatccagtcagatgctcaaaagtgatgggaggagggcaaggtttttgaggctgaacctgggaataaacctccgggccctggggaaaagttctttggcaactttccatatccttacatgaatggcttgctacatttgggccatgcgttctccttgtctaaacttgagtttggtgctgcatatcagaggctccgtggctcaaatgttcttttgccatttgctttccactgtacgggaatgcccatcaaggcctcagcagataaactctctagggaggcgcaacaatatggatatcctccagcgtttcctgaagtagaggatgattcaagtgcagaagttgctgatagtagccaggctgacaatgcggcttctgttgtcccagataaatttaagagcaagaaatctaaggctgcttcgaaggttggcatgcagaagtttcagtgggagatcatgagaggctttggcttatcagatgaagaaatcgccaaatttcaggatccttaccactggttaacttacttccctccattggcgaaggaggacctcaaggcctttggtctgggctgtgattggaggaggtcattcataactactgacatgaaccccttctatgatgcatttgtccggtggcaaatgagaaagctgaagaaaatgggcaaggttgtcaaagatatgaggtacacaatctactctccattggatggtcaaccttgtgctgaccatgatcgagcatctggtgaaggtgtacagccacaagaatatgtgttaattaaaatggaagttgttccaccttttcctcccaagttgaagaccatggaaggaagaaatgtttatttggcagcagccacattgagacctgagacaatgtatgggcagacaaactgttgggtattgcctgatggaaaatatggggcctttgagatcaatgacactgatgtcttcattgttacatcaagggctgctcttaatcttgcatatcagaatctatcaggggtccctgacactgatgtcttcattgttacatcaagggctgctcttaatcttgcatatcagaatctatcaagggtcccagaaaaaccaacttgcttaatggagttatctggtagtgatctgattggtttaccactgagcattgtgactagtgtcccaagtgattctccagatgatttcatggcactacaggatttagtcgcaaagccagctttgataccgagggatgcaggtgattctccagatgatttcatggcactacaggatttagtcgcaaagccagctttgagacagaagtatggtgtcaaagatgaatgggttcttccctttaaggttgtaccaataatcaacattcctgaatttggagacaagtctgctgagaaggtgtgcctcgatcttaagattaagagtcagaatgacaaggagaagcttgctgaagcaaaaaggatgacatatctgaaaggttttactgatgggacaatgattgtaggggagttcaatggcagaaaagttcaagaagcgaagccactgataaatgatgagtgtgttgttgctctcacagatcaatggtacattacttatggtgagactgaatggaagcagaaggcagttcaatgcttggagaagatgaatacattctcagctgaaactcgtaatggttttgaacacacgttaggctggctgaaccagtgggcctgctctcgttcttttggcctaggtactcgcattccatgggatgagcagttccttgtagaatctctttctgattccaccctctacatggcatattacacaatcgctcaccttttgcaaaatggcaacatgtatggcaaggaaatatcttctatcagaccagaacaaatgacagatgaagtctgggattatgtgttctgtgatggtccagcacccaatagtgacatccctcctgccctcttgagcaaaatgaagctggaatttgagtactggtatccatttgatattcgtgtctctggtaaggatcttatccaaaaccatctgactttcagcatttacaatcatacagcacttcttccagagcatcattggcctcgtggtttccgctgcaatggacatcttatgcttaattctgagaagatgtccaagtccacagggaatttccgaactcttcgacaggccattgaagaattctcttctgatgccactagatttgcccttgctgatgccggtgatggtatggatgatgcaaactttgtctttgaaacagcaaatgctgctattttgaggcttacaaaagaaattgcatggatggaagaggttatagccgctgaatcttctctgagagctgggcctccctctacctatgctgaccatgtgtttgccaacgagataaacattgcggtgatagaaactgagaagagctacaatgccttcatgttcagagatgcccttaagttggggttctatgacctacagttggctagagatgagtacagactctcttgtggagcagcaggcatgaatcgtgaattattatggcggttcatggaggtgcagactaggctcattacccccatttgtccacactatgctgagcatgtgtggcgaaacatcctgaggaaggaaggatttgcaataaaggcaggctggccaattgctggaaccccagatcccacactaagaattgctaacaaatatttacaggactccatagttaaattcaggaagctgctccagaagcaagaatctggttccaagaaacccaagaagggaactgcacctcctccatctgagcaaaacaagctgactgttggtctggtctacgtcaatgagaactattatggatggaaagagcaatgtttgagggttctccagtctaaatttgatagccaagcacgtttgtttgctcctgatgaggagattaatgaagcattgaagaactgctccatcggacaggaaactaacttcaaacaagtccagaagctctgcatgcctttcatcaagtcgaaaaaagatgaggcgaggagtgttgggccccacgctttgaatttgaagcttccttttggtgaaatgagtgttctcgaggagaacttggagctgatcaagaggcaggtaggccttgaacatgcagaggtcctgtctgcttctgatgaggctgctcgtgctaaagctggcgtgcatgcttctatgctggacaagaccccgccttctcctggtgagccagtagcaatcttcatgagcaaactagacctcgaagcgcggtgctgagcttaactttcacaatgaaattgcaaaatgaatagttaggaggagttcactgagatttccttattttcatgcacaagttaaagttatgttagcttgcagcttctacagtatcatagtattttgtggaaaagaacagtttggttattccctgtaacagtgatggtataagaaacccattttgaagaataattgagtgtattgaatgagttttatttgcatcaggtttgaatttgatgcttctataccagttcactttctgttggatgtgatgtttgagttatgcagaatgttagtttcattactatgt

SEQ ID NO: 69864 - DNA, 536 bp, Oryza sativa
  unsure (1)..(536): unsure at all n locations
  Clone ID: PAT_MRT4530_70492C.1
agaaggtgtgcctcgatcttaagattaagagtcagaatgacaaggagaagcttgctgaagcaaaaaggatgacatatctgaaaggttttactgatgggacaatgattgtaggggagttcaatggcagaaaagttcaagaagcgaagccactgataaagaacaagcttttggaagaaggcacagcagtgttgtatagcgagcctgagaagaaagttatgtcgagatctggtgatgagtgtgttgttgctctcacagatcaatggtacattacttatggtgagactgaatggaagcagaaggcagttcaatgcttggagaagatgaatacattctcagctgaaactcgtaatggttttgaacacacgttaggctggctgaaccagtgggcctgctctcgttcttttggcctaggtactcgcattccatgggatgagcagntccttgtagaatctctttctgattccaccctctacatggcatattacacaatcgctcaactnttgcaaaatggcaacatgtatggcaaggaaatatct

SEQ ID NO: 69865 - DNA, 276 bp, Oryza sativa
  Clone ID: PAT_MRT4530_70493C.1
atggtgtcggcgtaccggcagcgagctgctgccgtgagccatcgtgttcatcctcgatcagccatctccaagcagcaagccgccgcccggccgacctcaccgcagttcttctcgtcgtcccccaccgtctgtcgatcgtcgcagatcggctcaccgaggcaccaagcctcttcgcggctcgtcgtcatcaccgcattcctgtttcgccggtcgcagcgccgcgcctacttctccaccatcacaaccgttgctgtggccttcttcatcaatgcttga

SEQ ID NO: 69866 - DNA, 515 bp, Oryza sativa
  unsure (1)..(515): unsure at all n locations
  Clone ID: PAT_MRT4530_70494C.1
gcgcggtttgttgggtgttttttttttatagtgctttatcaccagctgttttgtgttcaaaacatttcattattcattatttgtggtgagcactatctcgtggcgtgcaacacagcaacggggtgatcctactagctatgaggcaagccagctaancctagggcgggcggggggcgaanatgctgcactggtggggctcaacccggcacatcgacggcgggtgcgccgcgtactggctcgccctgggcagcctcacgcgggtcatccccgggtggtgctgctgctcgccgtagtagccctcctccggcgacccctcggcgtagtacccctggtccgacgacgacccctcggcggcgtgagtactccgacgacgacgacgaccagccttgctccaggggcgtcgggatgctctcctcggagctcctcaccatccggcgggtgggggggcancgggactcgcgggtcacgtgctgcagctgctgggagcactgcatccgcaggcggagcgcgcccgg

SEQ ID NO: 69867 - DNA, 603 bp, Oryza sativa
  Clone ID: PAT_MRT4530_70495C.1
ccggcgccactgacgatcggagatgagtttcaggacaagcatccacgggaggtgcaggacacccgctgacgcgtccgcaggtgctcgaccgcagctcaccggccgggagagtttcaccgatgttcccccccgggcgcgctcggcctgcggatcagtgctgccagcagctgcaggacgtgagccgcgagtgccctgcccgccatccgccggatggtgaggagctacgaggagagcatgccgatgccctggagcaaggctggtcgtcgtcgtcgtcggagtactacggcggcgagggtcgtcgtcggagccaggggtactacggcgagggtcgtcggaggagggctactacggcgagcagcaacagcaccggggatgacccgcgtgaggctgaccagggcgagcagtacgcggcgcagctgccgtcgatgtgccgggttgagccccaccagtgcagcatcttcccgccggccagtactaggctagctggcttgcctcatagctagtaggatcacacccgttgctgtgttgcatgcaacgagatagtgatcaaaacaaataatgaataatgaaatgttttgaaaacaaaaaaaaaaaaaaaaaaaa

SEQ ID NO: 69868 - DNA, 542 bp, Oryza sativa
  Clone ID: PAT_MRT4530_70496C.1
gcaggatcagtgctgccacaagctgcaggacgtgagccagcgagtgccagctgcagccagccatccagccaggatggtgaggagctacgaggagagcatgccagatgcaccctggagcaaggctggtcgtcgtcagtcagtcaggagtactacaggcggcgaggggtcagtcagtcaggagcaggggtactacaggcgaggggtcagtcaggaggagggctactacaggcgagcaagcaaacaagcagcacaggggatgacccagcgtgaggctgaccagggcgaggcagtacgcggcgcagctgcacgtcagatgtgccagggttgagccaccagcagtgcagcatcttcgccgccggccagtactaggctagctggcttgcactcatagctagtaggatcacaccgttgctgtgttgcatgcaacgagatagtgatcaaaacaaataatgaataatgaaatgttttgaaaacaaaatagctggtgataaagtactatatatgattttgtgcgttctggacaaaaaaaaaaaaaaaaaaaa

SEQ ID NO: 69869 - DNA, 165 bp, Oryza sativa
  Clone ID: PAT_MRT4530_70497C.1
atggaggtggactcgccggcgaccggagatgaagaagatggagataatggaaatgggttacatctccggcttctgtccataggcacacaaccaaaaagtccagaagtgaacagaaaagagcttaaaaaaggcgagatgggacaaatccccaacttttgccgataa

SEQ ID NO: 69870 - DNA, 418 bp, Oryza sativa
  Clone ID: PAT_MRT4530_70498C.1
cccccccgggtattgtttgaaggatcttaccggagggagacgcaattgcctgattgccccttgggaccaagctgtcgtcgtcgtctcggagtactacggcgcgaggggtcttctcggacaggggtatctacggcgagggttcttcggaggagggctactacggcgaccagcaacagcacccggggatgacccgcgtgaggctgaccagggcgagccagtacgcggcgcagctgccgtcgatgtgcccgggttgagccccagcagtgcagcatcttcgccagcccggccaagtatctaggctagctggcttgcctcatagctagtaggatcacaccgttgctgtgttgcatgcaacgagatagtgatccaaaacacaataatgaataatgaaatttttgaaaaaaaaaaaaaaaaaaaa

SEQ ID NO: 69871 - DNA, 570 bp, Oryza sativa
  Clone ID: PAT_MRT4530_70499C.1
cagcccgctgacgcgtcccgcaggtgctcgaccggcagctcaccggccgggagaggttccagccgatgttccgccgcccagggcgcagctcaggcctgcaggatgcagtgctgccagcagctgcaggacgtgagccagcgagtgcacagctgcgccagccatccagccaggatggtgaggagctacgaggagagcatgccagatgcacctggagcaaggctggtcgtcgtcgtcgtcaggagtactacggcggcgaggggtcgtcagtcggagcaggggtactacaggcgaggggtcagtcaggaggagggctactacggcgagcaagcaacagcagccggggatgacccgcgtgaggctgaccagggcgaggcagtacgcggcgcagcatgccgtcgatgtgccagggttgagccccagcagtgcagcatcttcgccgccggccagtactaggctagctggcttgcctcatagctagtaggatcacaccgttctgtttgcatgcaacgagatagtgatcaaaacaaataatgaataatgaaatgttttgaaaaaaaaaaaaaaaaaaaa

SEQ ID NO: 69872 - DNA, 435 bp, Oryza sativa
  Clone ID: PAT_MRT4530_7049C.1
cctcggtgcaccaaccgagtgcgagtagcattctagtcggaacaaacggaacaattagtttcaggccgattttagttacaaactttttcttcaaacttttaacttttctatcacatcaaaactttcctatacaaataatcttacaacttttccgtcacatcgttccaatttcaactataaacttttaagtttagcgtgaactaaacacacccctagtggagtcgaaccaaagtgatgcacttagttgtcggccgatgtggcatgctgctacgatgcacatcttgacattgacgtgtcatgaagacatgttcctccatcttgccacactatatactacctctatgacacgcgatgtccatgtatcaataatattactaggatgtatatgatgttacagatttgtgatattttttttcttttattactgtaacaaac

SEQ ID NO: 69873 - DNA, 1950 bp, Oryza sativa
  Clone ID: PAT_MRT4530_704C.1
atggccacagaagatacttctcacatttctggtagttctgactggacgcctccattgctagaacaccgcgccgacgccgcgcacactccccgcggccccacgaaacctttcttggcccgtcgtccctcgacccctcggcatggccggcagtctgcctccgctgcccggcggaacgcctgccgaacccactagtatcttccccttccctggcgtaaaagaaaatctcccgtctcgtctcctccgctctttgcgccgtctcgctggctgaacaggggtaggggcggcgatctccatctgccgagcagagcaggagaggggatcctggtcatcatttgttgaaaaatggccacagaagatacttctcacatttctggtagttctaaacttgatgtccatgggctaaaacataaaaaggtaggaatctccaccaaggacatgaacgcgttattctccttagaggagaatacaactgctagtgggctgggtgaaccatctgaagcttcacctgttgatgttaagccacgtcctgtattgaagcaactatgtgagcagatggatacagcaggccttctgaaatttctttcagaaaattggaaaaaactttctagccttcgtgatgaactttctgctgcactaagatgtgctactgaccctgcacgctttgtgcttggttccttggagggtttcttcccatctgaccatactagttcacctgggaataaacagattattctccaaggccagcgtagaagctgcattattttgatggaagctataacacctgcactagctacgaaggagccaggtgacaaccacccttggagctctgaaattagggagctggccaaggcgattgcagaagagtggaagagtaagctagctgaggttgacctcgatgcttctgatggctactcattggaagcacaggcattcctgcagcttcttacaacatttaatgttgattcggtgcttgacgaggatgaactatgcaagcttgtagttgccgtctctcgtcgcaagcagactgctgagctttgtcgctccctttgtcttaatgagagaataccagatattatcaaggaattggttaatagacacaggcaaattgatgcagttcaatttatacatgcctttgggctttctgagagcttccctcctgcacctctgctgaagacatatgtggaggaattaaaagattcacttggcaataatggggatggcaacgcggcttctctgaaggatgacccaaagactcgggaactacttgcattgagggctgtaataaaatgcattgaagagtataagcttcagaaggactatcctcttggacctctccagaagcgtgttgctgagctaaaatctaagggtgagaaaaggccattggaagctgggcgccataatgcaaagaagcctcgcactttcggcaattcagctgctcgcaggccaccaaatcctgttggttcagctggtcgcagaccttcaggcccggctggtacttggcagcggccccctccaccaatgccttcctatcctgatcgatatggacatgcagatcggtaccattacactgcaccctctgcaacatatgatcctcctgcttatgcttcttacagcgaaccatacagtgcctcaaagccataccagtacacaccaggctcagtagctcctgcatcatacaactcgaatcagttcaaagtagcttatggtggacctggtgccccgccaacagcaggcggctacggaagctacaacgatgcagcagggcagtctacttcgagtagctattcgggttattctggttaccacccttcactaccaagagttcagaccccagatgtaacctttagatatactctagtggattttgtagctgtaactggtgtagatcttgatcttccaaggctggtcgtagcctacaatcttgcacgatttaaggatgcaaagatatga

SEQ ID NO: 69874 - DNA, 487 bp, Oryza sativa
  Clone ID: PAT_MRT4530_70500C.1
agcggaacgataactaaccttcccgatcgcttcaatcattgatcacccaagacatgccagatgacgacacaggaacacacgatatttgttaacgaggttcagccgaaacctacatccccggggctctgattatgggcgctcctccccaaccaatatagctcctagccgctacgagtccatggccacgccgccatcatctccctgcgtgtctacgctacattgtagtcgccatggttacattgtggtgccccccgctctatttaagagagatgccgggttacagagtttgactctaactccaccccctaacacctattacaattccaagtccaactgtaaccaaatagaactagtatattcgacacctattctaacaacatcaatgccacaggatactctcatcagctgtcagctgctggcatgacaggcaacaacaccacagatccagaggttctccgtgcctcgagatccgcgtgcgcgcgagccg

SEQ ID NO: 69875 - DNA, 491 bp, Oryza sativa
  Clone ID: PAT_MRT4530_70501C.1
cattattcattattggtttggatcactatctcgtggcatgcaacacagcaacggggtgatcctactagctatgaggcaagccagctaagcctagtactggccggcggcgaagatgctgcactgctggggctcaacccggcacatcgacggcagctgcgccgggtactgcctcgccctggtcagcctaacgcgggtcatccccggctgctgctgctgctcgccgaagtagccttcttcggacgacccttggcggaagtccccttgttccgacgacaacccctggcggcggtagtcctcggacgacgacgacgaccagcttggttcaaggggcatgggcttgctttcctggaagctcctaaccatccgggggtggggggcccaggggccctcggggttaacgtcctgaagttgtgggaagaactgattccgaaggccgggcgcccccgggcgggggaccatgggtgggaccctttccgggccggggagctgcc

SEQ ID NO: 69876 - DNA, 447 bp, Oryza sativa
  Clone ID: PAT_MRT4530_70502C.1
catcccccggattggtgaggatctacgaggatgaccatcccgatgcccctggaccaagctgttcgtcgtcgtcgtcggagtactacgcggcgagggttcttcgtcggaccaggggtactacggcgagggttcttcggaggagggctactacggcgaccagcaacacaccggggatgacccgcgtgaggctgaccagggcgagccagtacgcggcgcagctccgtcgatgtgccgggttgagccccacagtgcagcatcttcccgccggccagtactaggctagctggcttgcctcatagctagtaggatcacaccgttgctgtgttgcatgcaacgagatagtgatcaaacaaataatgaataatgaaatgttttgaaaacaaatagctggtgataaagtactatatatgattttgtgcgttctggcaaaaaaaaaaaaaaaaaaaa

SEQ ID NO: 69877 - DNA, 1554 bp, Oryza sativa
  Clone ID: PAT_MRT4530_70503C.1
ttaatcatgaatatcatacggttcccagagtagtgataacgcagcagtttccagagtgcttgtgaacttgttaagtgcccctcccatttctcggtatctccagttgctgcctttgcaggtggacgcaaatcctttcacaaatgacataagaagaatcaactcatccttctccacgaaaacaaaaatggaaaccaattgtgcttttatagtaaccatacaaacttcaagaacatcataccattctagattttgcttactggctgacagggataacacaatagcattaacactaatcttactaattttcagctgtggtggaccgtcctctcgagcctcgggctcccacattgcttcctctctagcgatgtttccttccacgagtggcactgctcccgccgactcaaagttccgagggagcatcgttgtggattcgacacggtcgtgacccttggggcgtggtccatttggaaggaacggaacaaccgcgtgttcaacaactgttcttggccctggtccgaggtggccgccgccgacgcagcagaagagaaacagaactcatccatcttcatcagcaaaaactcccacatcgccgggagggagggagaggccgggagccatcgtctgccgccgctgcctcacggccgcgccccgccgtcgtccgccgccgccgccaccgcacggccacactccgctgtcatccgcgccgccggccaccgtcctccccccaccccctccggccagatctgggagggaggggccgggagccgtgccgcctcaaccctcctcgccggccgccgccgccaccgcccgtcgccgctgccgccaggagcacgcgccgccaccgccgcctctggccggcggccaggagaggtgaggggaggagaggggccgatgagagaggagaggtgtggaggggaggccgggaggagaagcggaccacataagggcggttatttggttccaaaggtcatgtccgcctgcgaaaaaagacctcgcgtcgggaaaaatgccttttctagtaatgggctcagggcgatggtagtagtaaccggcaccagagaggggctgtgtgatggcttgccgttggtgccagagagggggctgggggaatgtcgtgccactggtgttggagaggggttcctcttccaccggacaccaaacccctccccctcctccgtcgccggtgatgccaagctaagtggcaaggccgctggtgtggatctcgtcctcggcagccgggcgaagaacgagcgagcgaaggagcgcaactgcggcggcgactgctgctgcgatgacgacgtagacaataggggactgcaagaggacgagcggcaggaggactgcaggaggagagacggcggaatgggggcggcgtgcccactccgcctcctctccaggcccgcgcccgctgcccacacgctccccctcggggcacgctgctcccacggccagcctctctcttcccccacccatggccgctgccgactcccaccgccacagccgccgctcctcaccgcccaaccgccgctgtccccactgccgctccggtggtga

SEQ ID NO: 69878 - DNA, 451 bp, Oryza sativa
  Clone ID: PAT_MRT4530_70504C.1
caatccaatttctcataccatttcagattcaaacctaattacatgtaccatctcagattcaactaataacagatacaatcagaatacaacagaattcaaacaatatttcatctcagattcaacctaataacaggaaatctgaaaacagaaaacaaaacaaatctttcaaacattgaatggaatcactccttgcttctcgtcctccactcatagcaaatagaggattgaattacagcaaggccttcttgttgatgtgcaaatggaatttttcgctacaacttatacatagcttcttgagatgtgcttatcacagatttcccaattaccctcatatcaagttatcaaccatatagagccagtgatcttcaaatttatatcaaccatatacagccattgatctgcaaattgcaaacttccacacatccagagaaccaacctggaataacaatct

SEQ ID NO: 69879 - DNA, 1716 bp, Oryza sativa
  Clone ID: PAT_MRT4530_70505C.1
atggccgccgaggcccccgccggcgcccagaacggctgcgtcttcggtacgggccccctaccccccgcttccctctcgccgcctccggcatggttcgatcctgacctgagctccggggagggagctcacgtcggaaacattccttacgatgggacgcaggagcagctcgtgcagatttgcgaggaagtcggccctgtggtctcattcagattggttattgataaagaaacagtgaagccaaagggttatcggttttgtcagtacaaggatgaggagactgctctacgggcacgccggaaccttcaaggttatgaaattaatgggcgtcagttacgtgttgattttgctgaaagtgggaggaaggctgacagaaacagagaaaaggtcgaagatcctcagtttcttactgtagaaggaacacatatagcaacttccaattccgatgtttagaagagagattgtcttgctttggtgaaccttaaccacaatcagatggtattctctcaactgttcctagaggttgtgcaggaccttgccaagcaccaatggcttgtaggacccttctgcacagctgcataattttcctcagtatccgcattcatctcagcctggactccggttgtaggcgatacaggtcttcatcagccagttggtcttccatcggctattcatgctgcatctgtgatggctggtattcttggaggatctcaaactgcaaatgttcaaaatggtttacctgtccagtatgggcttggaaatgaccctcttactcattatttggccagaatgtcaaagcaccagttgtatgaaatcatgtctgagttgaagtccctaactagtcaaaataaggatgttgccaacaaactgctgcaaggaattccacagctgtcaaaggccctatttcagatgcagatggcaaagagccaacagccctctagctccttggcacaatcatcatctcacataagcgaaccatttccacagccagatgctatgatatcaagtgttccaagaccttctgcaagcttgccaaacccaaatgtcctgcaggacccttctgcacagctgcataattttcctcagtatccgcattcatctcagcctgcgggcacaatatttccacatggaagtcagtctggggtgggcatacatcctccaattgtatctcaactccttggtgcctcttccagtgttcctcctctaccccttgctacctcaggaagcctgatatcgcaggttcagcccccatttatgccacatcaccctaggccaccagctatgccagcgggtatgcaacaactaccattgactcatccacatgttccccaggtacctgctatacctgatatagcacagaaggaaatgaggtttcctgagcaagcaaatcgttcgacggagtttgctcatcatccaaagttgcgaaaattggaggatggaacatccacacctggaattgtaaacaacaatccagctgtttatcctgctccatcccaaggaatgctccctggtggaccatcagggagctataattctgctgctgttagcttccagcagccagagaacgaagtgcctcagctcacacccgatgttgagtcggctcttctgcagcaagtcctacaactgacacctgagcagcttagttcgttgccagtagagcaacaacagcagttactacagcctgtgagcgacttttggaagaatattcttctggattag

SEQ ID NO: 69880 - DNA, 400 bp, Oryza sativa
  unsure (1)..(400): unsure at all n locations
  Clone ID: PAT_MRT4530_70506C.1
gctgttgtttttttttttctttttttttttttttttgttttcaaaacatttcattattcattatttgttttgatcactatctcgttgcatgcaacacagcaacggtgtgatcctactagctttgaggcaagccagctaagcctantactggccgggggggggggggctgcactgctggggctcaacccggcacatcgacggcaggtgcgccgcgtactgcctcgccctggtcagcctgacgcgggtcatccccggttgctgctgctgctcgccgtagtagccctcttgcgacgacccctggccgtattacccttgtttcgacgacaacccttggcggccgtatttttccgacgactttttttaccagccttgttccaggggcatcggcttgctttcctcg

SEQ ID NO: 69881 - DNA, 661 bp, Oryza sativa
  Clone ID: PAT_MRT4530_70507C.1
tttttttttttttttccccctcccggtcataacctcctctccatcttccctgacgaaggagcacacaagagaagacagagagaggagtacaggagatggcaggctgtgatgaagctaagtcgttggcttcaatggaggaagaggcgtgcattgagaagaagtatggagggattgcaccaaagaagcctctgatttcaaaggaccatgagcgcgcctactttgattccgcagactgggttcttggcaagcaagctgcaaacagcaacggttcaaaggccgcggttgagactctcaagcccaagctcaagagaacgcctcatcaccagctccctcctcgcaagccaacctgcgcatcaagctgagccgcgaggcatatcagaatgcagcggcagctggagacctcgaagcaacaaggggacaggtggactaagatcagtgttgtagcctgtcctaaatcgtaggtggaaagaaacagcccagcaactctgcatttgcagattagcctctctggcagttgcagcctctatgtctatcagaattcagaacggattaaccattgctcagtgatatctccattatctaaaaaaagggattaacgaacattgtcatgataaattgataatgatatcacttggtacaaaaaaaaaaaaaaaaaaaaaaa

SEQ ID NO: 69882 - DNA, 455 bp, Oryza sativa
  Clone ID: PAT_MRT4530_70508C.1
cattattcattatttgttttgatcactatctcgttgcatgcaacacagcaacggtgtgatcctactagctatgaggcaagccagctaagcctagtactggccggcggcgaagatgctgcactgctggggctcaacccggcacatcgacggcagctgcgccgcgtactgcctcgccctggtcagcctcacgcgggtcatccccgggtgctggtgctgcttgccgtaataacccttctccgagaaccccttgcgtagtacccctggttcgacgacgaccccctggcgccgtagtactccgaagacgacaacgaccaggcttgcttcaggggcattgggatgctctcctcgtagcttctcaccatccggcggatgggggggcaacggcactctcgggttacgttctgcagctgctggcagcactgcatccgcaggcccagcgcgccccgggcggcggg

SEQ ID NO: 69883 - DNA, 591 bp, Oryza sativa
  Clone ID: PAT_MRT4530_70509C.1
gccagtgcccaccggaagtctccacaggacagcccgctgaacgcgtcccgcacaggtgctcgaccggcagctcaccgcccgggagagttccagccgatgttccgccgcccgggcgcgctcggcctgcggatcgcagtgctgccagcagctgcaggacgtgagccgcgagtgccgctgcgccgccatccgccggatggtgaggagctacgaggagagcatgccgatgccctggagcaaggctggtcgtcgtcgtcgtcggagtactaccggccggccgaggggtcgtcgtcggagccacggggtactaccggccgaggggtcgtcggaggagggctactacggcgagcagcaacagcagccggggatgacccgcgtgaggctgaccagggcgaggcagtacgcggcgcagctgccgtcgatgtgccgggttgagccccagcagtgcagcatcttcgccgccggccagtactaggctagctggcttgcctcatagctagtaggatcacacccgttgctgtgttgcatgcaacgagatagtgatcaaaacaataatgaataatgaaatgttttgaaaaccaaaaaaaaaaaaaa

SEQ ID NO: 69884 - DNA, 6037 bp, Oryza sativa
  Clone ID: PAT_MRT4530_7050C.1
ttgcaggatcaaatcaactggcacgctcatacatccgaaggcgagttttggacctgcactggagttaagcagatctcccaggcctcgtgttttctatcaacacgcttttggcacgcccggtgggaccgattagaagtcagaaagtaattttcctcatggccgagaagccgccaccattgccatcctcggctagcccgggttctgttaaagagaagatccagcaattagatcaatctgaagttaatgagggcaacgtcatgaccatttctccggacaagttaacacctgatcagaaggagttagaagcaatcatgcagcaagcacagaaccagttcttgaactcattcatgcagacccacaagggaacagtggtgcaaaagtatcaggtgcgagtagtggctgatgttcccgggaccggttcttccaatgatgggagactgaaagaagccctagatagctcggctcaaccgagcgacagaggcactacagatggatcggctcaggagagtgatggtaaccactctcaaggggtacatagaattcaaggtgatggcactcagggaccacaggaccgggttgactatgctgtgcacaatgctttaatcaatcaatatggggtattagtcaataccttatcaaacatgatgaagttgattgccgatggttcaatagctgaacatcaggctacaggcccagtttatttgccaggaggtacctttccaaactatcggcctctggtcactgatattcatccatctattcaagcggttccccacatcgcatcaccagcccaaccgacggcgccgacattgattcccccacctgctccatcaacaccagcaccgggctagctggttaatcctcggctgttgatgagagagcggccacagcataatgagcaagttgcgaatcggctaacgcaagatcaggtcgctgccatgtttctaccacctcagtctactgttgatccagtccagcagcagccgattcaacaaacacccccaatccaacaggttgtgcagccagttcaacaaacgccaccaaggcagcagattgtgcgacataatctgaatcaggttgtcccagagcatttggtccatcacgtgcagccggaccacacgacgtgatgagggaacaattcgggcttaaaacgaaagatactggaaacttgtaccgacaaccatatcctgagtggtttgagagagttcctcttcctaacaggttcaaagttccagatttttcaaacttctcagggcaggatagtacatcaacttatgagcatattagccgatttttagctcagtgtggtgaagcatcggctgtagatgccttgagggttaggttgtttcggttgtctttggctggatcggcttttacttggttttctgctttaccgtgtggatcaattaacagctgggcctatctggaaaagcagtttcatagctatttctatagttgggtacatgagatgaagttgtccgacttaacagcaatcaggcagaagcatggtgagccggtgcatgaatatattcagaggttcagagagatgaggaataaatgctttagcttgagtttaactaatgctcagttagccgatttggcttttcagggtatgattgctccgatcagggagaaattctcatctgaggactttgagagcttatcgcatcttacacaaaaggtaactttgcacgagcagaggtttgctaaagctaggaggaattctaggaaggttaatcacgtcttttcttatatgtgtggatcggatgatgaggatgatgatgaccctgaaatagctacagccgaatgggtaaggagcaaaaaggttataccatgccaatgggtaaagaattctggaaaagaggagaggtatgattttgacattaccgaagctgacaagatttttgatctgttgctccgagaaaagcaaattcaactgcctgctggtcataccattccatcggctgaggaattaggcaagaaaaggtattgcaaatggcacaattctggatctcatactaccaatgattgcaaggtctttagacagcagatccaggtggctatcgaaggaggcaaaatcaaatttgatgattccaagaagccgatgaaggttgatggcaatccttttcctgtcaatatggtgcatacagctggccgaatagctgatgggggtcgtgcaagaggttttcaagtgaattcagctaaggtcatcaataagtaccaaaggaggtatgataagcaacagaagaggcattatgaggaggataatagtggtatgagactaccatctatcaaggactgtcctggatgaggtggtgatacaaggggttcaagccggccgtatattaaaatcaatcggctggaacatgcaagggttcctgttcatcaaagattgggcccggtaaatcaggatcatgaccctaaggatgacgaggataggaaaattcagtggtgtcctactggtatttttacaaagaatcagaagagaaggaaaacaaagccgaagcaggaatggcgcgttaagaagcaagttcctgtagccgatgaagctgtggttgatgaagcaaagagattagccaaagggaaaagcgttgtgattgcgtcggttaacatggtttttatcttgccagccgaatttagggtcgaccaagccgatgttgatgagatagaagaagaatcggctaagttggttttatcgccagaacaagcagtctttgaaaagcctgagggtacggagaatcggcatcttaaaccatcttaaaccattgtatataaatggctatgttaatgggaagccgatgtctaagatgatggtcgatggtgggatttgatgccttatgctacgttcaggaagttaggcagaaacgccgaagatctcatcaaaacaaacatggtgctcaaagactttggcggcaatccatcagaaaccaagggtgttctaaatgtggagctgacagtcggcagtaagactattcctactaaatttcttgtcatcgatgggaagggttcttacagtttgttgcttggaagggattggattcatgccaattgctgcattccttcaactatgcatcagtgcttgattcaatggcaaggcgacaagatagagatcgtgccagccgacagccaattgaagatggagagcacaagttattacattgagggcgtcgtggagggttcaaacgtctacagcaaggacacggtagatgatctcgatgacaaacaaggacagggttttatgtcggccgatgatttggaggaaatagatataggtccagaatttagaaccaagttgatagagctgttgaaagaattcagagattgcttcgcttgggagtattatgagatgccagtactcagccgatcgatcgttgaacatcggctacctcttaaaccgggggttagaccgcaccaacagcctccgagaagatgcaaagctgatatgctcgaacctgtcaaggctgatattaagcgtttatatgatgctggttttattcgtccttgccgatatgccgaatgagtttctagcatagttccagttatcaagaaaaatgatttgaataaagctaccccaaaggacgaatatccaatgccagtagtcgatcaactagttgatgctgcttcaggacataagattttcagttttatggatggaaacgcggggtataatcagatcttcatggctgaggaagatattcataaaacagcttttaggtgtcctggtgcaatcagcttgtttcaatgggttgtgatgactttcggtttaaagagtgctggagctacatatcaacgagctatgaattacatttaccatgatctaatcggctggttggttgaagtctatattgatgatgtgtttgttatatctaaagaaatagaggaccatatagccaatttgagaaaggttttcgagaggaccaggaaatatggcttgaagatgaatccgacaaagtgtgcttttggtgtatcggctggccagttcttaggatttcttgttcatgagagggggattgaaataacttagagaagtatcaatgcgatcaagaagattaaacctccagaggacaagacagaattgcaggagatgatcggcaaaattaattttgttcgaaggtttatttctaacttgtctggaaggttagaaccttttacaccattattgagattgaaggctgatcagcaatttacttggggggcggaacaacagaaggctttggataatattaaggaatatttgagttcccctctagttttgattcctccgcagaaaggaataccttttcggttatatttatcggccggtgataagtcaatcggctcggtcttgattcaggagctcgaaggaaaagagagggttgtgttctatttaagccgtcggctcttggatgcagagactagatattcccctgtggagaagttatgcttgtgtttatatttttcatgtacaatattgaggcattatctactgtccaacgagtgtactatcatttgcaaggccgatgtcgtcaaatacatgttatcggctccaattttgaaaggaagggttggaaagtggatattctctttaactgagtttgatcttcggtatgagtcgccaaaggcaattaagggtcaagctatagccggttttattgtggaacatcgtgatgattcaatcggctcggttgaggttgtgccgtggactttattcttcgatgggtcagtctgtactcatggttgtggcatcggcttggttataatctcccctcagggggcatgctttgagtttgcctatactattacaccttatgcgactaataatcaagcagagtatgaggcagttctcaaggggttacagctactccaggaagttgaagccgatactattaatatcatggggactctttgttggtgatcagtcaattggcgggagaatatgagtgcaagaatgatgtgttgctagtttataatgagaagtgccaagaactgatgaagaaatttcggctagtaactttgaagcatgtgtctcgagagcagaatattgaagctaatgagggcatcgggatataagccgatgatcaaagatgttcagattgaagttgctaccataatagccgatgattggagatatgatgtttatcggtatttatgggatccatctcagtcggcttcttggaagttaagatataaagcattgaagtatacattgttggatgatgagctttattatcggacaattgatggggtgttgcttaaatgtttgagtatcgatcaggtaaaagttgcaatcggtgaagttcatgaagggatatgtggtactcatcaatcggctcataaaatgaaatggctgcttcgacgtgctggatatttttggccgacaatgttggaggattgtttcagatattataagggttgtcaagattgttagaaatttgaaacaatccagagagagccagcatcggctatgaatcctattattaaaccatggccgtttagaggttggggaattgatatgatcggtatgattaacccaccgtcgagtaaaggacataagtttatattggtggcaaccgattattttaccaagtgggtagagacgattcctttgaagaaagttgattctggggatgctatacagtttgttcaagaacatataatttaccgatttggtattcctcagaccattacaaccgatcaaggttcaatctttgtgtccgatgagtttgttcagtttgtcgatagcatgggaatcaaattgttgaattcttcaccgtattatgcacaagctaatgggcaggctgaggcatctaacaagagcttgaacaagttaattaagaggaagatttctcattatcctcggcaatggcatactcatttagccgaagcattgtggtcttatcagatggcttgtcatgggtcgatacaagttcctctttataaacttatttatcgacatgaagctgttttgccatgggaagttagaatcgactctaggagaacggaattgctcaatggcaaatacttgaagaaatattaccctagtgtttggattaacgca

SEQ ID NO: 69885 - DNA, 1260 bp, Oryza sativa
  Clone ID: PAT_MRT4530_70510C.1
atggctaaccttgtttttttttcacttttgctgtgtatggctggttttgatttgacgaaaaacttccaagacaattcagatgctttcttcaggagtgtgaagccgcgagttgtccctctgcagaaagctctttcgacaaagaaagcaaccatcccagtgtcaccgagcttcaagaatatggctgagaagaccctccgctatttcactgcaccctctactgacaacgtgccggttgggccgcaaatcaacttgggggatggcgatttcgatctaaacaccagcctcattacgatggcacaggcaagcccattctgtggcaagcctaacgagaatgccaagtgcttatcttcaacagttcctggagatctgcagcacagcgaagaacgactccagacccgccagtgtggcatgcatactgtcaaggagatagaaatgctggctgctaagcttgacctcctcatgaatcgccttgaagaccaagagaagaacatgccccaaggcaccgttaaggccttggatgcacacatcacgtgcgaggtctacggcaactcgggtcattccgagacagactgtcttgagacccgtgaagaggcggtgttcatgaacaatggatatcatccacaaggaggtcaggggtggaaccaggcccgccgttttaccaaggaggcaacaacaacaacagtgttcctccatagtcgacactccgccgacgcactctggaaggggtacgacaatcgttggggtatcgagatacacttcatcaagtggaggagcctcaaggatgcgctcgacacagccctcatgttttgtgtgtgcctagtgctcgatagagttccccgccatgcttggatcctagacatcatcaaacaagtcattgcccgccgatgcgccttggaatcagttgatatgaacctcgtgcagccggtcgacacgcgcttcatcaagctctggacatggatggcgaacccgagcatgatccctaaacacgtttggctcatcttcaccaaaaaagtgtgggatggctcgacgaagtccgtcttggtgatagagacatcgctagaacaatggcaacacggcgacaagtatccggtgctcctccactacgacgaaatccatgacaacaccacggtgaccgtcgacctcctcaacccggtcaagtgcgagccaatgaagagaagcctcctggcctggcaccttggggtgatcgatggcgagcagtcgctggcctgcgtgtttgaggagttcccccatcacccatag

SEQ ID NO: 69886 - DNA, 560 bp, Oryza sativa
  Clone ID: PAT_MRT4530_70511C.1
ctagtggatccccgggctgcaggctcagaagaaaagggagcagcctgttgtgtgggggtcagacaatgcacagaaggaagagatcatctgggctccagtaaatgtgcatatcttacgaagtcttcccaaggcacgccactcttagatgatagttgtcattttgcttattcatcatttgattcaacaagtgatgaagtttcgaccatctttggagaattagatttggaagctttgagcagatgggatggccgaaggtggtcaagctgtaaaagtcaggatgggattgcactgcctatgagtggagctgatcatgcagtttcggaccagagaagcttgagccagaaataccgaccaaggtcatttaatgaacttgttggtcagagttttgtagtacaatcacttaataatgccatcataagagaaagaatagccccagcatatttatttcatggtcctcgtgggacaggaaaaacatctgcagcaaggatattttcagcagctttaagttgtgttgctattggggagaacaagccctgtggggcttgtatggagtgtacgga

SEQ ID NO: 69887 - DNA, 361 bp, Oryza sativa
  Clone ID: PAT_MRT4530_70512C.1
ggattgaaaaaaaatttgaattaaacatttaaaggaattaaaaaaaaaaaaaaaaattataaggaggtaaaaggtgcaatactgatttataaaaagggaagataaaaaggaactgaaaaagaggaacaaaagttataaaaattttaccgtataaaattttttaaaaatatataattaagagggaataaataaaatggctataaacagattaagaatggataaaaaaacaaaaacaaaattaaggaatattacagggaaagttctattataaaagtgaaaatagtttttccaaaataattgaagttctgatctgaatatgaaaatatccaaaagaaactggtttaaatgcgaggaagcaaat

SEQ ID NO: 69888 - DNA, 235 bp, Oryza sativa
  unsure (1)..(235): unsure at all n locations
  Clone ID: PAT_MRT4530_70513C.1
gggggnnnnttnnnnnnnnnnnnnggggaataaatatacactttttttagggggacgcatgatttacattactcctaggtgacagagatggccccctaattgaagaaacccatttcggtggaaacaaatccaatggaacatttcccttgtttatttggggggttttagactttgtttacaagggccttgaaccagggggataaacatttttttttcgagtttcccaggttggttg

SEQ ID NO: 69889 - DNA, 786 bp, Oryza sativa
  Clone ID: PAT_MRT4530_70514C.1
atggagggcaagtctggcgcagtgacagttaagctcggtaggcaaagatccaacaatatgctccttagaggggcgtgggtccctgacaggtgggagccagggccaccatcatgggcccacagcacggactacaagacgcagtatgacaggggctgccccttgcatgagagggaattctggaggttcaattcctacaatgctgaaactcctcaagattcagttcaaatccaaagtggggaagaagcaaagcgattcaagaagagccgcaatcactcaacataccttcttgatttgcctctgcaagttgatttggcactggggttgatgattgcattaaaggctgcaaatcttcagctgcagcaatgcacaatactgctcctggatactgaccctgcactgagtttggaggttgcatttctggctgtaaatcctgaattgctgagctcgacataccttcttgttccagctcttcagattgatcctgacctgaggttgatggctgcatttcaggctgaaattcctgagttgcctctaaacctacaggacttgcaattgaatgtcgtgaagtttctggactttgttgggcagggtggcttgctcttcggcaacaatgtcatcaactacaactccggtggaagtggtgaagggtgcatcctttggagtgaagtctccagcactgaggctgattgttgcctttcaggctgcacatctcgggctgtctccctgctcagggtggctgctgtgaagtctcaacagtctgtgagccaggcaaggttgataaattag

SEQ ID NO: 69890 - DNA, 369 bp, Oryza sativa
  Clone ID: PAT_MRT4530_70515C.1
atgtcgaatttaggtaaggtcgattttagcaataaagtgaacaagcccagaatgtcattttcgcccctgggtcttcttccacctccagatccgcagcagcaaaaaccacttcggcaggagaggcagccggagatggccatcggcgccgataagatagtcatccctcagcaggaacggctgcggccgtggggcaatgcagatgagcagcctgaggcctggattggggatcccagcgtgtgctggatagtggggcttagcactaataattcgcaccagtcagagaaggcacctttagttgggcaaagaatgaagcacatgtatttgatacttatatcaaccatcaaatgttctgtcagacaaatccaatag

SEQ ID NO: 69891 - DNA, 8425 bp, Oryza sativa
  Clone ID: PAT_MRT4530_70516C.1
ttttgttttttttttttttttgtgtttttttttttaaacggcgaaacatgcaccagcatgggccactaagattaagcaatatacaaaatgcacccacatttccaactaaaaaaacactcacatttttgtaacaacagggttgacagactggatccaatgctacaacaggtcaactcattgacagtaaagccccttactgtcaatgagatagcagagacaatacccacatgtcagaacaaaaaaaatatcagcagcccatcatattatcttcagcaggaaaaggggtaacctcaacatttccagacccgtatcaacaaggtttgatatttgcaggaaaggtagactgattatacaagatggatattcaaattgatgttagcacccgtcatcccccaaaaaagaaaccccgacccactgtacttctattgatgtccgtctcttgctatcagaatactaaaggggttagatcgactataactcaaatcagttaactattgcactagtaacctacaatttgactgaaccttcctcactacgattcatcgtcagaaaggcacacaacctctgtgctggagaccgtccctctggcctcactagtcagcgcaagcctagctgttagccatgtattcagtgatgctgatgcagaagaacctgagggattgacacctgaaatttgagatccagcgtgctggcttccagcacctgcattcagtggacctgaggtcctgtgaacaaccgtgttcaatgacaggggtgccgtgaggctaggatttgaactagatgggagcacaaatggcagtagggatgctaggatagatggtcgttggtgctgatttccatgactcgtggcataaggtgacggcatcctaagctgctggagatgaggagagggagcatgcggttgtgccccagcagctctgtaggtgccatgtggcataggcattggtgtactactaaaaggtgatgatgacattgctctatacatattgccaggtaagattgactgcggttgggtagcctgtgatgatggttgaaccaccagtgaaggttgcacatatggtcctgatgaatgaagcacctgtggtcgaactgctgatgacaaggtaactggtgatgctgtgacttgctctgctacaatccttgcagatggttcctgagaagactgaaccagctgcccaattgtgggtctcgtggatcccccttgagctgcagataatggtaggaatttccttcgaaaattctcagccagtgattggtttataaagactttcctgtagatagtatcaagttctgcctccttctgagcgtaaaaagaatcttccttttgaagtaatgagtcatatttctgttttagcttctccatttcttggttatactccactaggagttgttttctcttttgttcatgaactttactaagaacattgctggtatgttttaatctttccagctcatttttgagaggttcgtcactaaatctttgataattaaacactaatggtgccactggaagaggctgggtgagctgttcagaacttagtgcagagttggactgaacacctatctgattcatgtcttcagagcgtattccttcaagttggacagtctgtattgtggatgatagatccagttggggctgcaaatcacaagtttctgtcgtgcaagatcgctgcactaagtttgctcttgtttctgcagatcgctcttgcattgaacctgatggtagttcagactgcctttcatgtgttgtttccatgcacaaagcacccgttggttctactcctgtctgcagatcccatgaaggcactacactttgatgggcagtagtaatacttcgtggcacaggaataccagacagatcagtcctttcaaatggagcatcctgtgttgaggttaatctctgtgtctcacattgcaaattctgagctgctgcagcactcaacataccttcttgatttgcctctgcaagttgatttggcactggggttgatgattgcattaaaggctgcaaatcttcagctgcagcaatgcacaatactgctcctggatactgaccctgcactgagtttggaggttgcatttctggctgtaaatcctgaattgctgagctcgacataccttcttgttccagctcttcagattgatcctgacctgaggttgatggctgcatttcaggctgaaattcctgagttgcctctaaacctacaggacttgcaattgaatgtcgtgaagtttctggactttgttgggcagggtggcttgtattttgttgtataggtatatttgattgacaagtctgagtttcaacttctgtcgaaactaccaaggcagctgtttcgtgaatgatgtaagttggagattctgagtgtgaaggctcttcggcaacaatgtcatcaactacaactccggtatcaagtaaatgttgttgagttgttgcaccttcctgcaagaaaacaactgctcgatctgattgacaatctgtttgacttatgttgttactttcaagtgaagcatcaaacaatgaggttgatggttgcaattcaggttggaaattctgagctggctgtgtggtaagcaaacctgttcgttctgcttctgcaggtggaagtggtgaaggtgctagattttgttgggcagacagatctgtgctctgttgggaagacatatttgatatatttccctgacttccaacctcactcaaaccttgacatataaccaggctttgtggagtagcaaagattggagattccaaatgggctcgaacatcacaaacagtgttactatcattagcatcaactatctctcgagcatctcctaaatggccacaggtttcacctctctgtgacagaactgtttccagctgatgttttgtttgactgtcgtcatcagggtgcatcctttggagtgaagtctccagcactgaggctgattgttgcctttcaggctgcacatctcgggctgtctccctgctcagggtacttgctggttctgcttctgcaggtggattttgtgaagatagtgaactttgtacgagtggtacacttatactctgccgttcaagcatacttgattgatcagtctgggtttcaacttccgtagacaccagcaaggcagctggtttgtgtgcagcagtataagattgtgtctctgagtcaagtggatctgcagcagcagtgtcatcaacttttgctgtaactccagcagtagcatcaactgaggttaaatgacaggaagtagaaccttcctgcaatgggctagttgatgtatctggttgatgaactgtttgattattattatctgggcacatccttgcagatggagaatccaatgttgaggtcgttgtttgcatttcaggttgcacatcccaagctgttactcccaaattttcagtcagttttgcttctgcaggtggctgctgtgaagtctcaacagtctgtgagccaggcaaggttgataaattagattgagtagccacttccttagaagctgggaaaatcgtgaggttttgtgtagaagcaaccattgttgactccaagttggcataaattccaatggcaggagaagttgcaactcccggcaatgtactaggattggcattgtccctctcaacattctcagtacttgtatattcactggccgaagattcctgattaattgaatcatcatttgaaggcctaatactcggtgatttagctttttgtaagccaatgccatcaggactatagcaggtgttgttttctggaaaatcaactacttctggtgctggttggccagcgaccatgaccacttcaacagaaccatttctcactgtctgtgcagaaatgggttctgatggaactacattccttaccagtgtatttaccattttcaatctatcatgacaaagctgctgacaatctgaaacagcgcttccactgacatgggaattgctactttgttccttcaaatggatgaattcttgcataacaaagtttgaatctggtagagcaatctgctgatcaaaggtgtgatctaattggcctgattttgcttccaaacaaagtttttccttcagctgtcgctcttcagcccatgtattagattgcagtgactcaagtttgctgtgctggagtctcatgtgctccagaaatgcatacatcagcatagtgaaccactgaacagtttgttttattgtgtcatttcgggtctctacatcagcatgacttctacaaatatgttccagaactaaattgcacactgttttcagtctggcagttttattttgtgtgtatttctctaactctgaaatctgagactgttgtttatcaaagatacggtattctcttacagagaaaacattgtcaattaagttgattcttttctccacaatgtcaggaagttcatcagttgaaaaatggcattccatgtgagttcctggaacagctatcagttcctgctcttctgaaaccatttgtgcagcaacaaatgagccttcttgaagtgcaccattcatgaaattatcatgaagatccattctctgcttagggaaaatgtggtcatttctcaagatattagaggtctcctgctgtgaaggtttggtcttttctactgatgttgattgacaattgctgccagttgcacctgctttctttggaaattttctctttaggctgtcatagaccaaccttgccagctcctcattgcactcgtattttaaccttttttcagcaagggcaagtgactctttatgatccaccttaaagttatgaatagaggcaactcgccaacacaaagctatgttcaacgcatgaaatatgtactttggctcctgaacaactacatgattattcaaaagatattcaaagaactgctcaaccagcaacgtaacattgtctacttcaatgagaacttgtcctgctattttcgctccattaaactgtattgtattcggtagttgtaacaccttaattaatttcgacaactcttgcttcatttgggcatgaagattcttgggtgtactcatcaggctttccgacccttcagattgaactgatttttgctgcgtgacatcaactggttgaagagcagggccagatgtagtacaaatatcaggcaatgcatcatcgttacttttgtcagatacaacttttgaagatgaacccataatctcaccaacctttctatgcttctttctggcttcattgatttcttcagccggagcattgacctcatccatggtctgggactttgtaactcttgattgcagtggctcagatatacagctcacatgaggggatcttccatccaataaatttaaccagaactcagctggattatcctcaagcacagagattccctccttttcacccatcagagtaatatttcttgaatatagttccccactcatattagctttgcttatggacttcctgtgtacttcagtgctgtcttcaacagttgtggataactttgttaagaactcaacgattacttcatcaataaagtgtctctccatttcagaacttttacttgcatggtcatcttgctggacctcatcaagtctactgaagagaaatgcagcaccccatctgagtaaggaatgttttaaactagtccttagatcttgtatgttgttatcaataacaatgccctgcctcgcaagaacaagactcttctcctcaactgtaaaaggagtgtacaagcgaaaaatgctcacacgctcaaattgtgactctatcttgatcttttgaagagccttcaagtcgtttagtgggttgttgtcagaaccatatatgatgatggcatcaatagatgaaagcttaatgcttgggaggcacgcacgattttcaatcagaaagacaaatctaccattagtcttgttgttgaacttatcaattgctgcctgtttccttgacaatactgcacgatattcaacacgttcatatgattctgggccaaatctgtgatgcataagatcttccaaaatatttcccattttgtttccacctgctctatcagactggaaaagaagaatgacccttaaactcttcttcttgatctcgttaagcattttgtcgagaaccagtagcttgccacttgcatgcaccaccgtatctatattttcagttacattgctattgttgctaagtgagcttcgcagaaattcattaacgatgtaagggtgatcgcagcactttttgagagacagataaatatcatgaagagctccaacgctatcagtttccatctctgaccggaggacggatgactttgaaagcaatatggaacagtacatctctaactgcggttgtgaaatgcaagatggaacccagtactccaaaaattttgaagaatctgttttacgctcatatgcaatatgatgtgtgaatcttgcttttgacatcacaagcgcatcatcagcattgacatagtcactataacctttatcttctgaattaagaaaagctagcaggttcatgtactcaggaacattatccttgattggggagcccaaaagcaccattctaaaatcagtagaaattttcttgagttgttcaaaatatttgaatgcagagttttcataataatcaactataacagcttcccagcgaatgcgctctatagtttcaatatcctctaggatagcatcaggatgggataagagaacttgtaacatcatgcagcgtctgttgtcatagaactccaggtcttgaattaatttgagagtatctttctgcccatcatacacaacaacattgataaatggtgccaagtgattgaactgaatctcccatgcagaaagagaagcaggagtcgtgacgatcagtaaaggttggcagacatcaggtaatacagtcaacgtgaacaagatggtttttgttacgtattccttatcatcaacaaggacagcaccatgagatttgcaccagaactcaagaagttgattgatagaaaacaaatgatcgttgtcaaaaccaggaggccactcgtctggtaatctctggagtttctgaaatgtcttatgcttaacctttgtttctacgggaatagatgattgcttagcagctttacggcggttctcatacttccttttaagttcatcagcctgaggagtacgcaaaaagcatgcagtttccagttcccatgttgcatgttcatagccaagatccctccatttcactaaccattcaacattacaatgctcaatgttagcacgacttgaacaaaaaaaatcatcagcttcttttgggggcataagtggccttttcctcaacaggtggtgtggctcagtccattccttcttccaatttgtcttttctttatgatccctcttattaaacaaggacagaagatcacaacctccaggggtgtcattgataacaccttccggaacccagcgattatggacatgtgccagattcttatacttcacaaggtactgcttgccattctgcattccctccttgacattccacagagactcaattccatcagcaacagagtgtattccaaacagcaacctcaggagacaaatattccagccaatgatccagacaagaaacatggtagcttcttttgcagccttctccatcacaggacctgaatcacaaacccgattaagatctcctggggtaccacaagcaacgcatatgttggaattgccctccatttcatcagatgcggtcaccttgaactgacttgaagctacttctttttgaatgctaaggggttcaccatctccatgtccactctcgggctcctcgtaatgaataggagggattggggcactttgcaatgacgatatagaattttgccttgaatgcccagtaggccgatctctaccttcaacttcaagtctactctcagcaactttgttttgtgggcatgtttcgatagatatatgttgatgtaccagtgttgctctctgccacattcccattggaagtattttccttgcccgctctgtggagcttgcttttttggatcgcttgaaaagtgatctgtaggattttgcggtcattcttttccgcttctttgataaactgctagtgcttccaaccccgctgctatgctcttctgcaacatccttagaactagcggtggtggtgctagaagatctggtgggagctcttgatgttgaagaatttgaagcattgttactagccctttttaacattccgacgcgtgctacctcggctacttcgtcttgttgtgtgccggaaagccttggggaacatctcctggaggtcggcatgtctggccctccacgcagaggagagcggagagaggccatagccctctggttcgcgccgtttgtgggtgcagagaattgtggatttccagaagtacgcgaacgggttgggtacccggtgcctgcgtttgccctggccgtactgcctccaccccttccatctctggatgttcctccgggctgagtcttccacat

SEQ ID NO: 69892 - DNA, 420 bp, Oryza sativa
  Clone ID: PAT_MRT4530_70517C.1
caagaactagaaagcctacgtggctacgtaatactctgtttttatattaataattgggaatatttagagcatactttagctttctttgcaaaaatccaagagagtggcttaatccgcccgttagtccgttactagggccggccgtcgtagcttccggatacaccaaccaatatggcttgctttttccgtcgcaaatcaccaagattttcacatgtagatgcaaccattgtacgcttgctgccgtacgtcggcggcgtcgtgccgtgccgtgcggtcgccggtcagaggcagctctgtgggatgaccacgccggacgccgacccgccggcgttcttgcaaaaggacctcgccggcttgccggcgccgccgtcttacgtcaggttgatgtttctgaccctgatccccgggcatgggttggtc

SEQ ID NO: 69893 - DNA, 543 bp, Oryza sativa
  Clone ID: PAT_MRT4530_70518C.1
actctggacaacaatatcagagtggcgcagcggaagcgtggtgggcccataacccacaggtcccaggatcgaaacctggctctttaatattaaaaaccggcgatgagccgacaggccccaccacaacgcgtcgaggagataaggtccgcagcgtccgctcgctcgctcaaactctctcgtctcctctcgatctctctcgttctctctgcgctctttcccctctctcttgagcaccctctcttctctttcatcggaggcggcgactagaggagcggcgtgcggcggcatcgacggtgtcagcggcgcgcggcgggaggagcggcggctgcctggaggcgccctccctccgacagatccggcagaaggaagggcggcgaaggcagcaccggcctcgcaggggctaggaggggcctgcgcgccctcccctccaccagatctcgagggctcctgccttaaagatgctgcttctgcagcctccacctccctcaccgacaaggtcaccgctgcctcgctctctcgttgcttgtgccgccgcacacccat

SEQ ID NO: 69894 - DNA, 1029 bp, Oryza sativa
  Clone ID: PAT_MRT4530_70519C.1
ctattgaatcggctgagtaatctgctgccttggtggcatatgctggctcggcagtgctggattggcagctggtggatttggaaagaacatagcagccacctgctcctgagttagccgattgatgttttgtccaccatgctgtggctgttctcttgtatacaatcgaggattggtcatttgcctttgtgccgatgatggtgcagctggagcagaagttgtaaccggtgccatcagcagagttgatggtgtgttagaagaaccctgttgattgcctgtaaccaaaggcttatagtttggaaaaacaccacctggcaaatacactggttctgtaacttgatgctcagctattgtgccatcaaccattgttttcaccatgttggttaaagtattgactaagactcctgattgattgatcaaagcatgttgcatagcgtagtcaatccgatcttggaagttgtcaaactgtggttgtaatccactgccatctttgtcgcctggttcaccagcagtacctttatcgccttgagctgagcttgaaccaacttcatcggcagcgaccactttcaacttgtatttctggacaattgtcccttggcgggtttctttgaatgaattcatgaacttgtccttcatgctgctcatcatctgttcaagctcctgcctatgttcagccgacaatttgtctagtgtgactagaataatatttccttcgtgaacttcagacccagctggatttggcggcttgttttgaggatctgttgacttcaaagcttgcttgtcccctgacaagtttatcggatcccgctgggcgtgccaaaagcgtgttgatgcaaaaacacgaggcctggaagatctgcttaacttcagtgcaggtccaaaaatcttgccttttaggttcgtgagcgtgccagttgatttggtccagcaataaacaagaaataaagacaaataaaccgcggttaaaaccataaatgatagccgatcggctaattgccgatgacatatcatttttctctgaggcgatgtcat

SEQ ID NO: 69895 - DNA, 2466 bp, Oryza sativa
  Clone ID: PAT_MRT4530_7051C.1
atggccgagaaacaaccaccaccaccatctagcccaggctttgttaaggacaagatgctaaagctaggattgactgacgtcaatgaaggaaacgtcgtgccgatcgatccagaaaaattcacacctgagcagaagaaagagtttgaagcaatgttgcagcaaaagtacaaaataaaagtggttgctgatgatcctgggaccagttcttttaaggatggagatgggaaacaagctccagacggctcggctcagccgagtatcaaaggtgctactgacggctttctaggaaatcaaggcgacaattctcaaggagtccatggagtacaaggtgacggggtgcatggagttcaaggtgatggtgctcaggggctgcagggaggaaatcttaatcagaatagtgatgtggcacaggattttttcaataacttccaagatcgggttgattacgctgtgcatcatgctttgatcaatcagtctggggtgttagtcaatagcttatcaaacatgatgaagtcaatagccgatggttcaatagctgagcatcaggctgcaggcccggtttatttgcaaggagcagccgattcaacagacacccccaattcagcaggttgtacaaccaatccggcaacaggtcatgcaaccattcagcaaacaccaccaaggcagcagcccctacagccgattcagcagacgctgttaagacagcaaatcgttcagccgatccagcaccaaggttcaataagcgcatcggccgggtttgcaacgcctggtggtcagcctgtacaacaatttttaaaccaagttgtcccagaacatttggttcaccacgtacagccgggtggcacagtaatgcctcaagttattcctgagcacttggtacgcaatatccagccgaaccttcataattaccaagggggtaacttgaattatcaatatcagcctccttccccgcaagcccaatatcagctaggggcattggctcaacctcagtttgcgtctcaatacggtcagttcgagcccatgcaacagcagtcacaaggggcagctcagcaacaaccgtgggccaatgtgattgctgacgtaatgagggaacagtttgggcttaaaccaaaagagactggaagtttgtatcggcagccttaccctgagtggtttgagagagttcctcttcccaattggttcaaagttctagacttctccaaattttcgggacaagatggtgtgtcaacttatgagcacattagccgattcttggctcagtgtggtgaagcatcggctgtagacgctctgaaggttaggttattccggttatctttatatggatcggcttttacttggttttcctctttgttgtatgggtcgatcaatagttgggccgatttggagaagcaattccacagctatttctacggtggggttcatgagatgaaattatctgacttgatagcgattaagcagcggcatgatgaacctgtgcaggagtatattcagagattcagggagatgaggaacaaatgcttcagcttgagtttaactgatgcccagttagccgatctggcctttcagggtatgattgctccgattagggagaaattctcgtctgaagactttgatagcttgtcacaactgatacagaagctaaccttgcatgagcataggtctgcggaagttaggaaaagctctaagaaggttaatcatgtttgtctgtacatgtatgggtcggatgatgatgaggatgattctgaaatagctgcagccgaatgggtgaggagtaaaaaggtcataccatgccaatgggtaaaaagttctggaaaagaggagaagtatgactttgatattactaaagctaacaagatctttgatctgctactccgagagaagcaaattcaacttcctgctggtcatacaatcccatcggctgaagaattaggcaaaaagaggtattgcaaatggcataattctaggtctcattctactaacgattgcaaggtttttagacagcagattcaagtggccattgaggggggcaagattaggtttgattattccaaaaagccgatgaaggtcgatgataacccttttcctgttaatatggtgcatacagctggccaaatagccgatagggtccgtgcaaggggttttcaggcgaattcggctaagattatcgacaaatatcatgaagaatacgatgatggttttgatccccattggggttgtgagttctttagattctgctggaatgaaggtatgagattgccatctattgaaaactgccctgggtgcagtgatatcgttgagagctcaagccgatcatataataggggtaatcgactaaggcagacaagagtttctgttcatcaaagattgggtccagtgaatcaagatcatggccaagaggacaatgtaatcaggaagaatcaatggtgtccttctggtattttcacgaagaatcagaagaacatttaa

SEQ ID NO: 69896 - DNA, 2083 bp, Oryza sativa
  Clone ID: PAT_MRT4530_70520C.1
acaccaccattgctgggcatctacgtcttcaccgaccggctggcgttcgccgtcgcagactggtgtttccgcctgcacggttggcctattatgccgccgttgttgggcatctacgacttcaccaccggcatgcctccgtcgccgccaactggtgtcctcacctatacagttagttggtcacaccaccgttcatggacgtccacgtcttcaccgactggctggccttcgccaccgctgactggtgtttccgcctgcatggctggtatattatgccgccgttgttgggcgtctacgacttcaccgtcagcctgcttccgtcgccgccgactggtgctcacgcctatacggttggttggtcacaccgccgttgatgagcatctactttttcaccatcgacttgcctttgtcaccgctgactggtgtctcgcctatacggttggttggtcacaccaccgtcgatgggcttcatcatctacaccaccagcttggttccactggtgccgactggtgttttcgtcagcaagggtactatatttacatcagatactactcattctatacgtttgttctgcaggatccagatccagatatgcataatagggattcatggctttaagcttatctcctatgcttcaggaatagatcaatcagaacatcaccattggcttgttgtcgccgccgccgactggtgtccttgcctacacggttggttggtcacaccaccattgttgggcgtctactccttcacccaccggttcgtctagtccgccgctgactggtgtttctgcctacacggttggttggtcacaccacagttgttgggcgtctacgtcttcactgatcggcttgcctttgccggcgccgactggtgtctccgcctgcatggctagcctattatgccaccgttgttgggcatctatgtcttcaccaccggcttgccctcggcgccgccgactggtgtctccgcctgcatggctggcctattatgccgctgttgtcgggcatctacgtcttcaccaccggttcgtctagtccgccgccgactggtgtcttcacctatacggttggttggttacaacactgttgttgggcgtctatgtcttcaccattggcttgccttcgccgccaccgactggtgtatccgtctgcacggctggcctattatgctgccgttgttggacgtctgtatcttcatcgaccggccgcctcgtatgatgccaacttgtgctatcgtcttcacggccacgacgccaccgccaccgccgctaataggcgtcatcatcttcaacgcaagctgtctgttgactagggccctcgcctctacggctggtttataccactatcttccgtcgccgactggttatgccaccgtcggctggtgtttttatcttcacaatcacgcgtctttgctaccggtttgcttatgatgccgccgactcgtgttcacttcatcatggctatgcaactttgtcattatggtggagctacttcatcttcattgtcttcggcaccagcaaactctattgccggtacttcgcaagttttgctactttaccagccacgacgtctccaagagcctcgacatctcggtatgcgtcactaaatatgatgccatgttattataacaagtggtgttccagtattcaagatttctacccagacatgctcaacacatatcttcactcaagttatggctattcgacgacaagaagctacagttctcgactctatgttcagctgtttcccaactaaccaaagaacgttctacttcagtaactcttattatttcactttcgatgagttgaacaacaatatctattttcctccaatttttcaccttcacggttgagctactacgcaaacgctgatgagcgtcttcgtcgttatcatcggctgctacaccattattgactggatcgccgacatcgtcatcttcatcaacatcctgtcaagcctcttcaacatagcctactatgctgctgttgatgggcaacttcgtcatcatagccggctatctctgttgctgctaatcatcattaccgtcggatgcgtttgtcgtcgccgactattttcttcatcttca

SEQ ID NO: 69897 - DNA, 1621 bp, Oryza sativa
  Clone ID: PAT_MRT4530_70521C.1
cagccattccagcttgcccgtgcccagccaccaggcgtgcggcgcgccgctgcctcctccgtcgacgcgcgcgcggccgccgcctcctcctccgtcgacgcgcgcggccgagagaggctcggcccgggcagcgacggtgctgggcggcggggcggacggaggtggcgccagcgctgggcggcgggtcgagcggaggcggcgaaatccgtggccggagaaagggagggcccgggtggcgacggcgctgggcggcggggcggatggaggcggcgccggcgggcagcccgagcggcaaccccaccagcagcctcatctccgtcactctcccacgatgggtatcacccctcctctgctccgacaaccggcggctctcctccccaggccggcgacgcggatctggtggtacgggacgaccacggagcggccggcgagctccaggcggcgcggcggcgatagcagctcgacggcgtcgccctccctatcccccacacctccgtcgcctctgccccctcaccaccgggtcactccctcaccaccggatctcgccactggatcccgtcgccgacggagatctcgccgtcggatcctgccaccgaccttcttaagtggtggtggtggagggggggagggtggattggggctcgtcgcctcgaggaggccgacggcgatgtggctctacggcgagggtcgacccaccgcctgttcttcaactgcttccgatgtccctccatatatctcagggcagctgagcctgcctatttctattcagatacagtgcttcctacatgatcaatatctctcaaatctcaatgaagataggcagattgttattccagttgaatctgagatggtacctgcaattagatttgaatctgaaatgattcttgtagtggaagttcgttgggcggcaggcggccagtggcggagcgggcggtcagcggcgtcagcggctgaggctgagcacacccgagcggcagggggtggaggtggaggcggcggccggtggtgtaccgggctgccggggcggaggcggagctcgcctcggcgaccggtggcggaggcgaatcgagaactgcgccacacgccgatgtgggaagagggtgacggcgatggggcgacgtgtggtggcgagcagttgcagctgcagggcggacacgaaggggtgacgagggaggaggatgtcgccgctgccccttccatcctccccgagaccggcggcatcatgcatctcgtcctcaacctccgtcgcttcggcctcggcgtggcggagctcgagcgcctcaactgcggcggggacccgttgcacgacctcaacgtcgccatggctgccctggaaagctccgcctcagccgccgccgccgtccgagcaagctctgtctccgccaccgactgctcgctccaccactggccgcctgccgcccgggagagctccgtctccgccgcggactgcccgctcccactggccgcccaccgcccgggcaagctccgccaccggccggtccacctccgcctccgctgtgcatgccttgcgcgtggttgcgcccgcgagagagagagagaacagatagaggaattgggtatgacatgtgggtcccgccattactttaaaagaaaatgctga

SEQ ID NO: 69898 - DNA, 640 bp, Oryza sativa
  unsure (1)..(640): unsure at all n locations
  Clone ID: PAT_MRT4530_70522C.1
acatattgtggatgtattctgtactcctatgttcattcatttatatatttacctttctccattatcacattgttttgacatagtaaacctgaaacctagtagcatgaagcctcatgcctcatttgttttttaagactggtttaggtaatctaagtcttttacatttccatataaactttattatctgttngtcagtttctatgaaattctcataggattttattggaatcattatatatctatagatttggaaagaatgacatcttaacattatttggtctcctgatccacaaatatgatgtatatgtacatttacctggggttttagaaggctttttccccccatgtgttttcgcatacagattttgtatgtataatgttcaattaatacctaagtgttttataattttggtttatcacaagcagtattatttatttcaatttccaattgtaaatttctagcatttagaaaaatgatgaacatttatatactgatttttatcctatgacctcactaaagtcagaaaaagatacaatttccaaatatcagcaaggaaaaagaggctatcactacagattctttaaaaatataattagagaaaactgaacaattctatacccaactttttgactatcatta

SEQ ID NO: 69899 - DNA, 1209 bp, Oryza sativa
  Clone ID: PAT_MRT4530_70523C.1
atgttgtcttccgctagcccgtctaccgcgccatcggccgagtacgctgagttgtcaatcgggccatcggtgacagaagctgaatttccgatgccagagccgattgtggaagatgatggagaagaacgcactcatcgcagatgcatgtcatatggagaatatgcatccacaccaaccgatgctggagcaaagctgtcggctgagctgctcaaggactggttttgcagcttttatgaaggttttcaaaaagatgcctgggtttggttcccttatgaagactcagcagatcttgagcttccatcagactttaggtttgaggatattaatcatgaaagataccaaaaggccagggaagttctctcaactgcaatcagcccatgcatcttacccgtcggcatccaccaagggagaaatatccaagtctcctacgaattctatcacccaatgagttcaaccaaacaacttggattaggccaactcccaatcggcttattctttgccgacaagatccagtgccgaggagaaatctcatcaactctgatgatggattggctgcttaacctccaaggacctcctctgggttgtattgaaaatatcgaattggcaggattcaagagcagaaactttgacagatggtggggtgaatggaagctgcatctatttcatcaatcggcctcaatgtacatgacagatctattccctaatgtcataccccagacaacagaatcttcccctccacatcaaagcaatagtggtataaatatccaatatgccccaggtttaattcctaatggaggtggaccatcccctcctgtcattggctataatgcccccaagacctcaactcttcttcaagggctcatcagagaaccagccgatacaggtaagaagagaagaactaggtcatcggctgcagatacattaactctagcctcaaagaagaaggccaaactcaagaaacctaaaccaaccgatgatctgcttgtcctggatccatctattgagcaagctctggatgaagaagacattgaggatgatgttgatcagctgcagaagaagaaaattgctgtaaagaagaaatcggcagcaccaattttcaatccagctccaccagttttagctgatctcttctcttttgacattagagattatcttgatgaagaaacagaagaagacactaccaacaaatctttggttctgttgatgtaa

SEQ ID NO: 69900 - DNA, 501 bp, Oryza sativa
  unsure (1)..(501): unsure at all n locations
  Clone ID: PAT_MRT4530_70524C.1
tcaaacggcngananattngatgccagacgccanantttcggcgtcagaattnaggtaaacaatnntctctcggcatgcaatactcatcctcacagggtgggcactggtggcnanntgggcaaatcctttcaatgggcaagggaggatgaggaacactcanctgantcngccnctccatttnaaaananccaatacancgggctcggaatngggttcnggcaanggcaatcaacacntcngagagcgacgnctcctgtncnaatccntgcacctaacnngttgctcnnagggtcctgcnctntccannaanccngcnggggtnnngncaccntctnnaaactagnanntnctctcctngcntnncggtcnnnacnnnngttttttttttttttntcnnnanacccngnccncnctacaacnggaagantaccnnttcccgncntcnantnggcnttncaacgngccngngcncgnncanantttcnnatattctttnnacc

SEQ ID NO: 69901 - DNA, 581 bp, Oryza sativa
  unsure (1)..(581): unsure at all n locations
  Clone ID: PAT_MRT4530_70525C.1
gttgtttccgtgcttaaggtgtgcttgccgatttcaagcgagagacaatcggcaacttcaacccctcgaaagaagaacgtcatggatgcagagattccaagacagttccagttgatgatttctggagcttcaacaacaagctacgagggcagctcctttcagtctggatataccggtggggtatcagaaataagccacatttctgggcggtgaaaggaaattgctatttgttacatatgctgggagatggtttgatcatttgcttgctccatgtcgttgtgacttaagaatggatgtgtgtatattggatttaaacattttcgtgaagccatctggggacttgagagtggatgtgtgtagattggatttaaacatttttgtgaagctatttgggacactacactagaccaatataagtccaggagtggcgccttcagtagcaaagtactcagaagagtaacttgtatgtctcgtcttctttttcaaatataaaaggggaaacactcttgcnttgctaaaaaaaaaaaaaaaaaaaaaaaaaaaaaaaaaaaaaaaaaaaaaaaaaaaaaaaaaaaaaaaaa

SEQ ID NO: 69902 - DNA, 706 bp, Oryza sativa
  unsure (1)..(706): unsure at all n locations
  Clone ID: PAT_MRT4530_70526C.1
aagtaccaaaataattcccccatctctctctcctctccctttccacttcccagtccggcagtccctacctcccctggctcccttctctatggccggaggcccaatctccagcacggaaacatggttcgtcgcctcttcctcctcctcattgtcacgtcgcgggatgcaacatgatgctgtagcagcaatgcgacgaaaaagttcagcgagctcgccgcctcctgcaagtggaaccttccctatctccactgtgctatcgcgtttcttgcggacttgcggaggttgtggttgaggcagtagcctgtggggcggtgatgcggcgccgagatcccgctcgtccacggatttccggtcgccatcgccgggattcgtcttctccggccaacccctcgccgcgccgcccgtcctcggccaggatctggtcgggatcgcttgtggtaggtgttgggcacttggggtttgaaagacagcatcgttgatgtgctttgagttcctgcctaattgacttacgctgactctgtcaatatcaacatcttcagttactattcccatgatccctaaaatcccagcagttgcgttgcgtggtaggttatgtaaagcgcattcctgtgatgaaaaatataccctgngagacagatagtcagttgtatcaagcgatccaacacactaggtccctaaatattatcgtagataccattttctctgc

SEQ ID NO: 69903 - DNA, 443 bp, Oryza sativa
  Clone ID: PAT_MRT4530_70527C.1
tttttttttttgaagcaaagttacaacacgaatgttacacacaattttaaaagcatcgtgacttcatcgcactagacaatagcatataaactgctgctcccaggcaacagtttgtttgtgttcctgttccaaatgatgcaggctgctatggagacagccctgtggtttagaataggtgttaggtcaaatgtcatatctgatatggaccatcttttggacagttagaaaagaggttttgcaagacaaaataatagcatggtgcaatcacaaagttcacatgttggtcatgttgtgccgacattggaaaattgcctccaaatctacaactgaattggatattcccattttcagtatttttgaaatcggtgatagaaggctgctgattcttttgttcagatgttagtgaaagtaaacttgttaactaggggtgggcaatcaagctt

SEQ ID NO: 69904 - DNA, 1434 bp, Oryza sativa
  Clone ID: PAT_MRT4530_70528C.1
cccgcgtccgctccattattccgactctcgtaagattaaggggggaggaattggagggcagaggccgccattttaatcagtggaaataaaatccacgcattttatatatttaatttaacccccaattttaacttagcagcacactagctagctagctgctaagttaactatttgatcaggttacagttgctggcctgacagttaattaatctcttgctggttgattagttgctatcagctacacgctctcgctagctgccactgtactaatacatactcccatctattcgcctgagaaaatatcgaaaagtagcagcaaagaggagcaggcaagatggtgatgaaccctgacgccgtccgcaatgtcgttggaatcatcggtaacttgatatcgttcgggttgttcttgtcgccattgccgacgttcgtgacgatcgtgaagaagaaggacgtggaggagttcgtgccggatccgtacctggcgacgttcctcaactgcgcgctgtgggtgttctacggcctacccttcatccaccccaacagcatcctcgtcgtcaccatcaacggcaccggactcctcatcgagatcgcctacctcgccatctacttcgcctacgcccccaagcccaagcggtgcaggatgctcggcgtcctcaccgtggagctcgtcttcctcgccgccgtcgccgccggcgtgctcctcggcgcccacacctacgacaagcgctcgctcatcgttggcaccctctgcgtcttcttcggcaccctcatgtacgccgcgccgctcaccatcatgaaacaagtgatcgcgacaaagagcgtggagtacatgcccttcacgttgtcgctggtgagcttcatcaacggcatatgctggacaatatacgcgttcatccgctttgacatcctcatcacgataccgaacggcatggggacgctgctgggcgcggcgcagttgatcctctacttctgctactacgacgggtcgacggccaagaacaagggcgccctcgagctgcccaaggacggcgactcctccgctgtgtagctacatatgctatatatcttgccatgcaaagaaccacaagatcgaagctaacacaaaccatgcagcatatatgcacatcacacatgcagtatcacaacgtacgcatgcttggatctgcacgcaccacgcgcgcgtgcatgtaactgtgacgggttataatcgatctgttggatggatatggatcatggatgcaggcaatgcagctgctcttctgtttggacccactgaattcgcccgtgcatgcaggcagcttctttgtgtgtgtacatatccaactatgcaagaggcaggtatatgtgagcaaaaggcccccaaatgcaatgagatcgatacacatgtttgactgttcgtcttaaaaaaaaaaaaaaaaaaaaaaaaaaaaaaaa

SEQ ID NO: 69905 - DNA, 441 bp, Oryza sativa
  Clone ID: PAT_MRT4530_70529C.1
ggatcctggctatccccttttgaagaagttaattggtgaaagtcgtgccgaggttttgtctgggccatcactacatttatacttacttttgacttatattctgtgtggtgttatttgaattttgaggtatgtatcatcttgacaatcaggatctggtgatggagtttctgtttgaaggagtaaatactcttggaacaaaatcatttctggattatttccctgaatacgcccgtgatgatgggtcagtgaacaagaaaaggagtatgatcggcaagtcttttgaaactaggccttgggacgccaatggagaattcattggcgatgccgaagcacagtaaaatgttcgctacgcctttcggcctgatcaatctttcttatgcttgtagtactgttttctttttttttagaaaacttacatttttcatgctcatattcctgaac

SEQ ID NO: 69906 - DNA, 401 bp, Oryza sativa
  Clone ID: PAT_MRT4530_7052C.1
aacaaacaaagccccgggaaaaagaaaaaaaaaaaaacttcccggaaaacctttttgggccggggggggggggaacaaaaacccccccttttaaactcggggggcgggggggaaaaggaaacccaaaaaaaacgggggagttttccaaaggggacaaaaaaattctttcccattaaaaaacggacaaaaggcttgggggggccacccccccaacggggggcctttaacccccaaggggaaaaggaaccaacccttgcaacttggggccggggacccgggggttgttcccaaagccccaaaaagggaagggggaaaaggcccccccaacaggaaaagtcccccagggggcttgggaaaacaagacaaggactttaaggggggaaaggggggccacccccctg

SEQ ID NO: 69907 - DNA, 246 bp, Oryza sativa
  Clone ID: PAT_MRT4530_70530C.1
catactctcaggtcgacaaacgcccaggaaacatggctatttagagccatgtgctgtcccttccacattcatgaataataacacctggaccaaatttatacatggtagccctccttgaaaactagaatatacacacttaggtcgcctgccactgtcttccctaccagacataagagcacgtacctggaaaaggatgcctggcactactgataacgtactagtcttacaagaaaaagaagccgtttg

SEQ ID NO: 69908 - DNA, 492 bp, Oryza sativa
  Clone ID: PAT_MRT4530_70531C.1
atgggccgcactcgcaagcgcgccgctggcgccagcgccatccctgctgtcgtccgccgtcatccctaccgctgtccgatgccaccaccgcaatccctaccgccgctccccttctccttttgcatcggcctcagaggatttggtggtgctgctgctccgccgttcgtcgtcactcacagcggcgccgccggtcctccggcaccggtgggcctccagagggcggatccgccgccgccaggcctcgagagcggcgtggggaaggaggaggcggcgggagtggatctggcgtctcctcctccctccccaccggcggcggcagcaaataggagggatggcggctcgcgcaggcggcggcgatgctcgggggaggtggatccaacgccaatggtgcttgagtccaaccatgacaacctcgagtgcgacgatgctggtggcgggtttgcttgggccaacgatggccagcggatttttgtgatgatgatatcttgttaa

SEQ ID NO: 69909 - DNA, 1650 bp, Oryza sativa
  Clone ID: PAT_MRT4530_70532C.1
tttttttttttttttttatctcaactccccacatcaatcggggtcctcaacagaggggaacatgttaacagtcccaagttgcgaatgtaacatcttctttccggcggatgttaatggtacctcacacggtgtccatccatccattcattcattcatggtgttacaaacacgcctgtactaatctgcctacagtgtaggcaacctcttattgaaattgacattcttgcttctgataatgctatacccacgattgtacagtacaggctgctgagcattattgtctttacttacacggatctggtgaatggttcagttacagcctcacaaaatatacacaagcacagcatcataagctactaaaactgatcaaagctactttctgcatggttcttcgctggttgcccctccattgtcatgtgagaagtgggatttcaatccaatccagcactggtagtaatcgagatcccgggatggggaatcgagggcccattggcaaaccctggggatgagtgcagactcgaacatgaatgcaagcgtgccgcttagccttgatggctcattggcatcaggacggctgattgttgcctcgtatgtcttggtgtctgggccatgaggtgtcatgcaactgtgaaggctagcacctccaggaagaaaaccatcagctttggcctcgtatattccatagatcaatcccataaattcactcatgcaattgcgatgatagtatggagggcgaaatgtgttctcagcgaccaaccatctaggcgggaatatcacaaaatcaagcaatgcgacaccaggcttatcagttggtgcagtcagcactgtatttactgatggatcagcatgatcgaatagaacagtgttaaatggacagaatttactcaggtcgtacttgtaagggacataatttccatgccacgctaccacattaaatggagaaaagtcctgagtggcagtgaatagctcaccaccatatttctgcacaattgtgtatcctgggcggtggacttgctcaaaccatgctgttggggaaaggaaatcccttgccgaagccaagccatttgcaccaatcgggccaagatcagggagctgaaagtgggtaccgaaaatctcagaaacatagccacgtgaaggaccatcgggcaaatcaacagcaaagcgaaaaccctggggaatgacaacaatttcaccaggtgggactagcagcttcccacattcagttgtgatcaacagctctgggatattcctgtagaaggtaggcataattccttgctgggggacaatgaggaaatcgccgtcagcgttgcaaaaggcgcatccgtccatggacttgttagcagcgtacgttcggaggttgcgggcgcgcggggcggtgaagggcgtgccggagagctgctcggcgtagagtcccagcgggcagaccagcgggctgttctgcccgcgcgggagcgtccccgccaccgcctccgacgacaagctgttgcccagccccgacagatatacgtactccaacccccccttctcctgctgctcattctgcgccgcgggggttgccgttgccatggccatggccgctggccggaggagagggagaaggacaacacaactgcttgtctcctttcagtttcaggaggcttctcctcgtgc

SEQ ID NO: 69910 - DNA, 518 bp, Oryza sativa
  Clone ID: PAT_MRT4530_70533C.1
cggcctccgaatccagtctccaccactccaggacgtgaccgcgagtcccctgcgccgccatccgccggatggtgaggagctaccgaggagagcatgccgatgcccctggagcaagctggtcgtcgtcgtcgtcggagtactacgcggccgaggggtcgtcgtcggaccacggggtactacggccgaggggtcgtcggaggagggctactacggcgagcagcaacagcagcccggggatgacccgcgtgaggctgacccagggcgagcagtacccggcgcagctgccgtcgatgtgccgggcttgagccccacagtgcagcatcttcgcccccggccagtactaggctagctggcttgcctcatagctagtaggatcacaccgttgctgtgttgcatgcaaccgagatagtgatccaaacaaataatgaataatgaaatgttttgaaaacaaatagctggtgataaagtactatatatgctttctgctgcgttctggacaaaaaaaaaaaaaaaaaaaa

SEQ ID NO: 69911 - DNA, 276 bp, Oryza sativa
  unsure (1)..(276): unsure at all n locations
  Clone ID: PAT_MRT4530_70534C.1
gcttttcttctctaccagcggcagcggcggctggtagggaggaggagatcgccaccagatcgccatggagacgctggcnagcgccatgcggcnnnaaaaccgccgcttcaagcccccctccttctnctccgnctncgnctccgccgccctctcctcggggagggtccccctcgtcaggccttcctctctgcctcgcgggcttactcgccgccgctgggcagaccgcaaccggatacctgctggctccagaaagctcgcacttcaagtctgcgggag

SEQ ID NO: 69912 - DNA, 545 bp, Oryza sativa
  Clone ID: PAT_MRT4530_70535C.1
ccgggctgcaggcttatgaagtgctccacccatgcatcttccttgatcttttgttcaggttaggcaaacatctcagacaaagtttttctttcttttcttactcgtttcctttggcatcaactgtgcatccttcaccaatacaagtgatgatcaactcttataccttgggttcactagtgccaacctcatcactgatgatactactgtagtcacgtcaaacggactacttgagctaaccaatggcacaattaatcgcaaaggccatgcattctacccatctccattgcacttccgcaagccacacaacaataaagtacattctttcgcagtttcattcgtgtttgccatccgctctagctatcccagaatgagcctacatggattggcctttgttgtttccccaagcataaatttctccaatgcattggctatccaatacttgggcttgctaaattctaaaaacagaggcagcaaaagcaaccatatcttagctattgagtttgacactatcttgaacatcgagtttgaagacatcgatgacaacc

SEQ ID NO: 69913 - DNA, 362 bp, Oryza sativa
  Clone ID: PAT_MRT4530_70536C.1
gtggtgtgtttttttgttcaaaacatttcattattcattgttggttttgatcactatctcgtggcatgcaacacagcaacggtgtgatcctactagctatgaggcaagccagctaagcctagtactggccggcggcgaagatgctgcactgctggggggggggggggcacatcgacggcagctgcgccgcgtactgcctcgccctggtcagcctcacgcgggtcatccccggctgctgctgctgctcgccgtagtagccctcctccgacgacccctcgccggggtacccctgctccgacgacgaccccttgtcgtcttagtcctccgtcttcgactacgaccagtctttgctccaggggcgt

SEQ ID NO: 69914 - DNA, 469 bp, Oryza sativa
  Clone ID: PAT_MRT4530_70537C.1
cccacgcgtacggcccgggcgcgctcggcctgcggatgcagtgctgccagtagctgcaggacgtgagccgagagtgccgctgcaccgacattcgccggatggtgaggagctacgaggagagcatgccgatgtccctgtagcaaggctggtcgtcgtacgtcgtctgagtactacggcagcgaggggtcgtcgtcggagcaggggtactacagcaaggggtcgtcggaagagggctactacggcgagcagcagcagcagccgttgatgaccctcgtgaggctgaccatggctaggcagtacgcggcgcagatgacgtcgatgtgccgggttgagccccagcagtgcaacatcttcgccgactgacagtactaggcttagctggctagcctcatagctagtaggatcacaccgatgctgtgctgcatgcaacgagatagtgatcaaaacaaataatgaataatgaaatgtt

SEQ ID NO: 69915 - DNA, 598 bp, Oryza sativa
  Clone ID: PAT_MRT4530_70538C.1
tccccgcgcctcgccgtggcgcccgcccgcactcccccgccggagaggtccaccgatgttccgccgcccgggcgcgcatcggcctccggatcagttctgccagcagtctgcaggacgtgatgccgcgagtcccgctgccccgccatccgccgtgatggtgaggagctacgaggagaccatgccgatgccctggagcaaggctggtctgtctgtcgtcagtcggagtactacgcggcgaggtgttcgtctgtcaggagcaggggtactacggcgaggggtcgtcggaggagggctactacggcgagcagcaacagccagccggggatgacccgcgtgaggctgaccagggcgaggcagtacgcggcgcagctgccgtcgatgtgccgggttgagccccagcagtgcagcatcttcgccgccggccagtactaggctagctggcttgcctcatagctagtaggatcacaccgttgctgtgttgcatgcaacgagatagtgatcaaaccaataatgaataatgaaatgttttgaaaaccaaatagctggtgataaagtactatatatgattttgtgcgttcaaaaaaaaaaaaaaaaaaaa

SEQ ID NO: 69916 - DNA, 3114 bp, Oryza sativa
  Clone ID: PAT_MRT4530_70539C.1
atggactccaaggctgccggctcgtcggagatcgagcgggcgtggcacctcctcaccgtggtcatccgcctcggccggcccgccgccgcctccgacgtcgcgcgcttcgcgaccgccgacgacgtcgagcggctgtgccgcatccccgggtcgccgcttcggctctccgggggcgtcgtggcggcttccgagacggccttcgtggcgttcctgaggtacgtggggttggatgttccgccgccgagggtgagcccgagggcgcccgatgatgtgatgaggtggttgcggaggcgggtgcccgttacgtacgagcgcaagcggaaggcgtcagatgcggggcgcttcgtcgcgaggaagcgtctcctggcggctcccgatgcagatttgccggaacacgagctgcggcagtcgcagcaactgatcgtgcaaagctgtgctccagttgctactggagaggtacatcaggaggctacccaagaattgcaagacaggcttcctagtctcaacatatttactgctcagcgttcctttgaagtttcaattggctctaatgtattttcagacattgaaattagcatgccttctcttccgtccaagattgaccagtttataggaggcaatgatggcagtgttcttgtgagcatggcttctgcactagtgccaaaggaggtgacagacatgtctggctgtatcaatatcttccatgctacagttgacagagagagtactaggattggtgaacctgaaggatcagcttcactttgttgttctagagtagaggaccgtgaggaactagaaaaggagtccaccctccttactatggcagttggcttagctgtgggaaagaaaaatgggattgagcaggatctgaatcttagacctagcagtcctagaaattgtagcacaaaggcaacagatgatatggaaacgttcgatgtgatttcgaaagaagctgaagctctacaatattgcagcccaaatgctcaatacccacagaagatcctaacttgtggtcaggacagtgatgctctagtagttaatgctcatgtggcaattcatgagaataagatagaagacattacattccagcctcctgaaggcaccaaaacagaagctattgtacatgaaatggtccatgaaactatgggaagtttgtgtcaaccttcttcaaacacaaaggttgaacatgcagtgttgccactacaagccccaacttatggttgcattagcaatgagaacttgaacattgctgctgaaaacagagcaagcacacatcaaaatcatgtggagccatcaacacagaacgaagtggctgtcagattatctaagaaagagcaagatagaaagattatgaagcaaagggataagggcaagaaaaaagaagcactgcccaaagaagataaggatcaagttgcagcaaaggttcaaaagggtcatacagaaccaaaaccactgcctaacttcaaaaattttgaaattgaagaagaggaaggttcagggggttacgggactgtttatagggctcgaagaaaatcagatggaagactgtttgccataaaatgtcctcatgcaaatgctcattcacatcatgtttacaatgaacagaagatgttggaacgctttggaggcaagaatttcgtgattaaatatgagtgctctcttaggagtggtgatctagaatgctttgttctagaacatgttgagcacgatagaccagagaatctgagaaaagaaataggtttgtttgatttaaggtggtatgggttttgtctgttcaaagctctggcaagcttacataagcaggggatagtgcatagagatgtcaaacctggaaatttcctgttctcccgtaaactggcaaaggggtatcttattgacttcaacttggcaaatgaccttcaccagaagttctttcgaaacagtaaatctgagacaatctcacgtgggaaggataccatatctcagcctgcactgaagtctaccccagtggttcaggccaaagaaccagttgccgattcaaagcagctccttggatccaagaggaaaagatccaacagaagcccagtgggtagtgcacctaagaatgataataaaagtaggcatggtatccaagctgctgatgtgtctggtgtaacctctgccaaggatcctacaagcacgaaaacatcattagacaggttgaagcagccaatgccctacaaagggcggaaggaattaatgaacttcttgcatgatgcaatgcaaagtcctgacaaaaatacttcgacagcacctgtttcccaaaggaagagggttgctgctcctctcggaaatgtggatcagaagctctttatactcaccccgatgcccctgtgttcgggtggtagtgctattgctggttctggcatgcttaacagcaaaggaaatggaaaacatcgaagagaaggtccatgtgttggaactaaaggatttcgagctccagaggttctttttaggtctttccatcaaggttgtaaggttgatgtctggtcagcaggggtgacactcctgtacttcataattggcaaatcgccttttggtggagatcctgaacagaacatcaaggaaatagcaaagcttagaggcagcgaagaactatgggaggtggcgaaactgcacaactgtgaatcttcctacccatcggacctattcgatgccaaatcgttgcgctcagtggatctcagggagtggtgtgcagccaatacgcgcaggccggagttcttcaagtcgatacctgactcattgtttgatcttgtagacaagtgcttatcagtcaaccccaggtgcaggatcacatcagaggatgctctgatgcacgacttctttgctccgtgccatgatctaattcggcagcacaggcttgctagaaggccagccccttctaataatctgccatgtttgcctcaagacaaatcggtcaaggcaaacgagtcgaagcgatcttcttccaccgtgccgactactgttaactctactgatagtgggtcactgacgtgtgggcccaacttttgtgggacgtgggtcactgacgcgctcctttgtgggacgtgggtcattgaagtgtgggcccaacctttgtgggacgtgggtcactga

SEQ ID NO: 69917 - DNA, 4145 bp, Oryza sativa
  Clone ID: PAT_MRT4530_7053C.1
ggggcacttgttcagaagtataaaataaaagtggttgctgatagtcctgggaccggctcttctaaagatggagaagtgaaacaagctccaggcggctcgggtcagccgagtactaaaggtgctaccgacggctccccgagcgatcatggcgacaattctcaaggagttcgtggcgttcaaggtgatggtgctcaggagccacaaggaggaaatcttgaccagaatagtgaactagcacaagattttttcaataacttccaagatcgggttgattacgctgtgcatcatgctttgatcaatcagtctggggtattagtcaacacattgtcaaacatgatgaagacaatagccggtggttcgatagctgagcatcctgcaggcccagtttacttgcagggaggtgtcttcccaagttatcaatctttgatcaccgatgttcagccgtctgttcaagcagttccctctgttgcgcccacaactcagccgacggcgccagcgtcgactcctttgcctgctatactagctatgtcgccaggacagccggtgaaccctcggttgttaacaagggaacaaccacaacatggcgggcaggctacgaatcggctaaccaaaaatcaggttgctgccatgtttctaccacctccacctattgttgatccagtgcagcagcagccaattcagcaggcaccaccaatccagctggttgtacagccaatccaacaacaggtcatacaaccagctcagcaaacaccaccaaggcaacaacctctgcagccggttcagcagacgccaccaaggcagcagcctcagcagccgatccaacagactccgttgagacagcagatcgttcagccgattcagcacccggggtcagtgaatgcatcggccagcctccttccccgcaagcccaatatcagccagggggattggctcagccctagttcgcatctcagtatgggtatgattccttcaatcagggagaaattctcgttcgaagactttgatagcttatcgcatctgatacagaaggtaaccttgcatgagcataggtcggcggaagttaggagaagctctaagaaagttaatcatgtttgtccatacatgtatggatcggatgacgaggaagatgattctgaaatagctgcagccgaatgggtgaggagcaaaaaggtcataccatgccaatgggtaaaaagtcctagaaaagaggaaaagtatgattttgatatcaccaaggctgaaaagatctttgatttactactccgagaaaagcagattcatcttcctgctggtcatacaatcccatcggcagaggaattaggcaagaagagatattgcaaatggcataattctgggtctcattctactaacgattgcaaggtttttagacagcaaatccaggttgccattgaagggggaaagattaggtttgatgattccaaaaagccgatgaaggtcgatggtaatccttttcctgttaatatggtgcatacagctggtcaagcagccgatagggtccgtgcaaagggttttcaagtaaattcggctaagattatcaacaagtatcaaaggaagtatgataagcagcaggagaggcattatgaagaatacgacgatggttttgatcctcattggggttgtgagttctttagattctgctggaatgaagggatgaggttgccatccatcgaaaattgccctgggtgcagtgatatcgttgagaactcgagccggtcatacagtagaggtaatcggctaaggcaggcaagacttcctgttcatcagagattgggtccgatgaatcaagattgtggccaagaggatgaggtaatcaggaagaatcaatggtgtccttctggtattttcacgaagaatcagaaaagaagggtccagagattgaggaacagggagcgttttcaggaggttgaagaggaaatcaaccatcggctgaggaaaccaaagccaagacaggagtggcgtgtcaagaatcaggttcctgtagccgatgatgctgcagccgatgaggcgaagaggttggcaaaagggaagagcgttgtagcggcaccaattaacatggtctttacattgccagccgaattcgggatcgatcaggccgatgtcgatgaggtggaagagggatcagctaagttggttctgtcaccagaacaggcagtattcgagaaacccgaggggacagagaatcggcatcttaaaccattgtatataaacggctacgtcaatgggaagccgatgtctaagatgatggtcgatggtggggccgcggtaaatttgatgccttatgctacgttcaggaagttgggtaggaacgccgaggatctcatcaagacaaatatggtgctcaaagactttggtgataatccatcggaaaccaaaggtgttctgaatgtggagctgacagtcggcagtaagactattcctaccacgttttttgtcatcgatgggaagggttcgtacagtttggtgcttggaagggattggattcacgccaattgttgcattcctttgactatgcatcaatgcttgattcaatggcaaggcgacaagatagagattgtgccagccgacagccaatcgaagatggagaacccaagctattactttgagggcgtcgtggagggttcaaatgtctacgccaaggatatggtagatgatctcgatgacaagcaaggtcaaggtttcatgtcggctgatgagttggaagaaatagacataggtccaggcgatcggccaaggccgacatttattagcaaaaatttgtctccagagtttagaaccaagctgatagagctcctaaaagagtttagagattgcttcgcttgggagtattatgagatgcctggactcagccgatcgattgttgaacatcggctacctatcaagccaggggttagaccacgccagcaacctccgaggagatgtaaagccaatatgcttgaacctgttaaagctgagatcaaacggttgtatgatgccgattttattcgtccctgccgatatgctgaatgggtttctagcatagttccagttattaaaaagaatggcaaggtcagggtgtgcattgattttcgagatctgaataaagctacaccaaaggacaaatatccaatgccagtggccgatcagctggttgatgccgcatcagggaacaaaattttgagttttatggatgggaacgcaggatataatcagatctttatagctgaggaagatatccataagacggcttttagatgccctgaagtggaggaccacatagccgatttaaagaaagttttcgagagaaccaggaaatatggcttgaagatgaatccgacaaaatgtgcttttcgtgtgtcggccggccagtttttgggatttcttgttcatgaaagggggatcgaggtaacccaaaggagcgttaatgcgatcaagaagattcagcccccggaaaataagacagagctacaagagatgatcggcaagataaattttgttagaaggtttatttctaatttgtctggaaggttgaggcattatctattatctaacgagtgtactgttatatgcaaagccgacgtagtcaggtacatgctatcggctccaatattaaagggaagagttgggaagtggatattttccttgactgagtttgatcttcggtatgaatcaccgaaagcgattaagggacaagctatagccgattttattgtagagtatcgtgatgattcaatcggctcggttgagatagtgccatggactttattctttgacggatcggggggtatgtttcgagtttgctatactattaaaccatatgcgaccaataatcaagttgagtatgaagcggtgctcaaggggttgcaattactcaaggaagttgaagccgataccattgaaatcatgggggattctttgctagtaatcagtcaattggcaggagaatatgaatgcaagaacgatacgttgatggtttataatgagaagtgcttggaactaatgaaagagtttcagctggttactttaaagcatgtatctcgagaacaaaatcttgaagctaatgatttagctcaaggggcgttggggtataagccaatgatcacagatgttaaagttgaaattgcagcgatgtcagccaatgattggag

SEQ ID NO: 69918 - DNA, 471 bp, Oryza sativa
  Clone ID: PAT_MRT4530_70540C.1
atccaggggattattgcagtagtattgaaaaataaaattgtccagaacgcacaaaatcatttttagtactttatcaccagctattttgttttcaaaacatttcattattcattatttggtttgatcactatctcgttgcatgcaacacagcaacggggtgatcctactagctatgaggcaagccagctaagcctagtactggccggcggcaaaaatgctgcactggtggggctcaacccggcacattgacggcagctgcgccgcgtactgcctcgccctggtcagcctcacgcgggtcatccccggctgctgctgctgctcgccgtaatagcccttcttcgacgaccccttgccgtagtacccctgttccgacgacgaccccttgccggcgtagtactccgacgacgacgacgaccagccttgttccaggggcatcggcatgctctccttctagctcctcaccatccgggg

SEQ ID NO: 69919 - DNA, 228 bp, Oryza sativa
  Clone ID: PAT_MRT4530_70541C.1
cgcggatcggggcgggtggcgggcgggctcgagcggcgtggcgggcaacgacgggtggcggcggcgggcgggagcggcagcgggctcgactgccgcgacctagggagcggctgcggcaacggcttcgatgggcggcgacgacatcggtgggtggcagcggcaggcgacgagggttgcggatccagtggcgccgccctcgggaggggccggatccgctgtcctagggag

SEQ ID NO: 69920 - DNA, 464 bp, Oryza sativa
  Clone ID: PAT_MRT4530_70542C.1
gcaaaacatttcattattcattgttggttttgatcactatctcgtggcatgcaacacagcaacggggtgatcctactagctatgaggcaagccagctaagcctagtactggccggcggcgaagatgctgcactgctggggctcaacccggcacatcgacggcagctgcgccgcgtactgcctcgccctggtcagcctcacgcgggtcatccccggctgctgctgctgctcgccgtagtagccctcctccgacgacccctcgccgtagtacccctgctccgacgacgacccctcgccgccgtagtacttccaccacgacgacgaacaagcttggttcaagggcattgggattgttttcttgtaagttcttaacattccgccgattggcggccaacgggacttcgcggttaacttcttgaagttgttggaagaattgattcccaagccgagcgcgccccggcgggg

SEQ ID NO: 69921 - DNA, 528 bp, Oryza sativa
  Clone ID: PAT_MRT4530_70543C.1
tcaccggcgctcacctccttctgctacccgcggcagcactccgacccccgcctcccttcccagtatcactcctgctgcctccatacttgcggccgatcccaacaatggaggcttgtctcctgcctccaccgccctttcccccttccctccgactgccagtctacctcggtggaccatcactgaccccctgcacggcaagcgaggtgcatctgccgccgttgtggtcctcgccgagcgatcgatggagtcctcacatcgggacgccgggctctcacatcggggccgttcaggctcccgcctcctccctttcttcgtgctcggagacggcggtttctttcctccccgcgccggcgcgttccagcaccagcagatgccgatgatgatgatcagggtggaggttctggccaagaagctggcggcgggaatggcgaagatgaagccggcggtggtgatgactccaatggtcatggtgatgagcaagatggtgattactccagcgatgtgcagcgacgggatgtccctcgacat

SEQ ID NO: 69922 - DNA, 492 bp, Oryza sativa
  unsure (1)..(492): unsure at all n locations
  Clone ID: PAT_MRT4530_70544C.1
ggcagctcaccggccgggagaggttccagctcgatgttccgccgcccgggcgcgctcgtcctgctgatgcagggctgccagcagctgcangacgtgagccgcgagtgccgctgcgccgccatccgccggatggtgaggagctacgaggagagcatgccgatgcccctggagcaaggctggtcgtcgtcgtcgtcggaatactaccgcggcgaggggtctttctctgagcaagggtactacagcgaggggtccttcgaagagggctactactgcgagcaaaaaaaacaacccgggattaccctcctgaaggctaccagggcgaggcaatactcggcgcagctgccgtctatgtgccgggttgagccccagcagtgcagcatcttcgccgccggccagtactaggcttagctggcttgcctcatagctagtaggatcacaccgttgctgtgttgcatgcaacgagatagtgatcaaaacaaataatgaataatg

SEQ ID NO: 69923 - DNA, 993 bp, Oryza sativa
  Clone ID: PAT_MRT4530_70545C.1
atggaggcttgtctcctgcctccaccgccctttcccccttccctccgactgccagtctacctcggtggaccatcactgaccccctgcacggcaagcgaggtgcatctgccgccgttgtggtcctcgccgagcgatcgatggagtcctcacatcgggacgccgggctctcacatcggggccgttcaggctcccgcctcctccctttcttcgtgctcggagacggcggtttctttcctccccgcgccggcgctgcccacttctatggagagcactttcccgtcacctcggccgccgtcaacaccatcctcctcgacgccaccgtcgtcccccgtgccaccaccgtcggcaaggtcgcctaccgttccagcaccagcagatgccgatgatgatgatcagggtggaggttctggccaagaagctggcggcgggaatggcgaagatgaagccggcggtggtgatgactccaatggtcatggtgatgagcaagatggtgattactccagcgatgtgcagcgacgggatgtccctcgacatgagtctgctgatggttcagagatacatgacgagcaccatgtcattattactggagaagaaccacctgtttcgcctgttccaagggaaccacctgttgcgcatgtgcgcaatcgaagaccgatttccttactctgtgccgttccgatgttttttctgtatggagcataccattttacgattgggggatcagcatttggaatagacaaacatgtcactcacgatcgtctgatggccggaggcattctcgcaggcatctggttgtttctgcttccatttctgatccttggacatgtatacttctcccaccgtatccgcgtccgtgtcttgagaaacaatgcaccatcggcaggagaagctcaagtccccgcaactgacgtacaagacgaaggctacttccctcgcaagatcaaagcttccgtttctctgatggtccttagggcatccacaatgtgcatataa

SEQ ID NO: 69924 - DNA, 582 bp, Oryza sativa
  Clone ID: PAT_MRT4530_70546C.1
ccgccaagctcaccgccgggagaggttccagccgatgttccgccgcccgggcgcgctcggcctgcggatccagtgctgccagcagctgcaggacgtgagccgcgagtgccgctgcgccgccatccgccggatggtgaggagctacgaggagagcatgccgatgcccctggagcaaggctggtcgtcgtcgtcgtcggagtactaccggcggccgaggggtcgtcgtcggagccacggggtaactaccggccgaggggtcctccggaggagggctactaccggcgaccagcaacagcagcccggggatgacccgcgtgagcgctgaccagggcgaggcagtacgcggcgcagctgccgtcgatgccgccgggttgagccccagcagtgcacgcatcttcgccgccggccagtactaggctagctggcttgcctcatagctagtaggatcacaccgttgctgtgttgcatgcaacgagatagtgatcaaacaataatggaataatgacatgcttttgaacaccaaatagctggtgataaagtactatatatgattttgtgcgttcaaaaaaaaaaaaaaaaaaa

SEQ ID NO: 69925 - DNA, 663 bp, Oryza sativa
  Clone ID: PAT_MRT4530_70547C.1
tcagctgacaaacgagtaatcatctatgaacactttctcgagttctatcttcatcatcaaaagctcggagattgtagccagcttcttttctctttcaatgaggaacttggcgaagatgtcgacggcagccttggatgttgatggtatgttgatcatgcagttctggaggatcttccatctcatgtgcgctaccatcaccgagagtaacttgtatctttccatcctccatcggaaagctcggctacatggcatgaccgagcagcagcctaaagattctgcacgaagacgagcggggtccctgactccccctgtccatgagccccttgagacggcggattcggcggaaagaggttggttgaggtgtaatagctgcggggctatgtcgtagtggtcgtccgccatcaaacaatcaagactcaagaggcttccagctggtgcccggtccttccactttgtgccaagcttgaccgacagcccatcgggtcgagcgcatcggcatggagggaggtggatggattggagaggggaggcacggaagcagacgggttgtggccgacgaagaggtggcttgagaatcgccggaggaagtcgacggaaagggcggtgggctggatttgcaccgccgtctgagatcgtcgccaccaccgagctccttgtccccat

SEQ ID NO: 69926 - DNA, 353 bp, Oryza sativa
  Clone ID: PAT_MRT4530_70548C.1
cattattcattgatcggtcggatcactatctcgtggcatgcaacacaggcacggtgtgatcctactagctatgaggcaagccagctaagcctagtactggccggcggcgaagatgctgcactgctggggctcaacccggcacatcgacggcagctgcgccgcgtactgcctagtcctggtcagccttacgcgggtcattcccggctgctgctgctgctcgccgtagtagacctacttcgacgacccctcgacgtagtacccctgatccgacgacgaccccttgccgccgtagtactgcgacgacgacgacgaccagacttgctccaggggcatcggcatgctctcctcgtagc

SEQ ID NO: 69927 - DNA, 183 bp, Oryza sativa
  Clone ID: PAT_MRT4530_70549C.1
atgacgagggagggggcgcagtcaagtaagacggcggagcaggttgtgggcaacgccgacgaggttggggagggagaagtggcagggatgggctgtcaacgagccgagctcgagcgagctcgtctgcccaagctcgagctcgacacaagctcgagccgagccattgcaccttcgagcttttag

SEQ ID NO: 69928 - DNA, 1155 bp, Oryza sativa
  Clone ID: PAT_MRT4530_7054C.1
tctggttcgctacccggtctccacccatcaagattgcagtaataatccaagctcaataaacgagccaatccgtcgaagaaggaagcagcggcgatggcggcgaggtccggcgaggtgcgggcgacggtgctgggcatggcggtgctggcgctgcttctgctgctcggccaccacgcggcggccatcgaggccaacgtcggcgtcacccgccaggccagcttcagcctgaacggcggcgccggcgccggcgccggtgctcgcgctggcgctggtgctggcgctggcgctggcgtcggcgctggcatcggagctaacgtcggcgttggcgctcgcgccggcgtcggtgctggcgtcggcgctggcgtaggtgcgaaggtcggtgctggcgtcggtgcgaaggtcggtgctggcgccggcgttggagcacgcgctggcgttggtgcgaacgtcggtgctggcgtcggtgcgaaggttggtgctggcgtcggcgttggcgctggtgctggcgtcggtgcgaaggtcggtgctggcgtcggcgttggcgctggtgctggcgtcggtgcgaaggtcggtgctggcgttggtgcgaaggtcggcgctggcgttggtgctggcgtcggcgccggcgtcggcgctggagctcgcgttggcatcggtgctaacgtcggtgctggcgctggtacgggcgtcggcgctggtgctggcgctggcgctggcgcaggagtcggcgctggcgctcgcgccggcatcggtgctaacgtcggtgcgaacgtcggcgctggcgtcggcgctggtgctggtgctggcgctggcgctggtgcgggagtcggcgctggagctcgcgctggcatcggagctaacgtcggtgccaacgtcggcgccggcgtcggcgctggtgctggtgctggtgctggcgctggtgcgggagtcggcgctcgcgccggcatcggtgccaacgtcggtgccaacgtcggcgctggcgccggcgctggcgctggtgcgggcatcggcgccaacgtcggtgccaacgtcggcgccaacgtcggcgccggcgtgggcgtgcgcgcgaacaggcagaacagcttcagcatgaacagcgcgtgaccgtctgataccaccaaccccggctggttgatccttcacacgcggccgcat

SEQ ID NO: 69929 - DNA, 550 bp, Oryza sativa
  Clone ID: PAT_MRT4530_70550C.1
ccgacgcgtccgccagccgatgttccgccgaccgggcgcgctcggcctgcggatgcagtgctgccagcagatgcaggacgtgagccgcgagtgccgctgcgccgacatccgacggatggtgaggagctacgaggagagcatgccgatgcccctggagcaaggctggtcgtcgacgtcgccggagtactacggcggcgaggggacgtagtctgagcaggggtactacagcgaggggtcgtcagaggagggctactacggcgagcaacagcagcagccggggatgacccgcgtgaggctgaccagagcgaggcagtacgcggagcatctgccgtcgatgtgccgggttgagccccagcagtgcagcatcttcgacgccggccagtactaggcttagctggcttgcctcatagctagtaggatcacaccgttgctgtgttgcatgcaacgagatagtgatcaaaacaaataatgaataatgaaatgttttgtaaaaaaaaactaaaaaatcctttatataaaccaactaaaataacttgctggaacatttttt

SEQ ID NO: 69930 - DNA, 426 bp, Oryza sativa
  Clone ID: PAT_MRT4530_70551C.1
atgtggaagaagatcgcggccggcgcggcggaggggtggcgcggtctgctgccgaagacggcgtccgccaccaccaagctcgtgcccgattcttctccaaagtcggcgacgccgaccgcggcgctcaacctcgtcgccgacgcggtggcggcgtggcgccgctggcttcgctctccatcagcgagtcccaccgcgagcgttggaggtgtggcgtcgttggctacgcgcgtcgacgcggcgctcgctctcctcgttcatggatcaagcttcgtcggagactcacgcgcccccaccaactccacggccgtctccaccacgtgttctcccgcctcctccattgtctgctgcacggagggcgaaggggtgtcgcactgctgcttcgtcggcatctctgtcacgcaactactcgacgtcgtcgacgaactc

SEQ ID NO: 69931 - DNA, 811 bp, Oryza sativa
  Clone ID: PAT_MRT4530_70552C.1
atgacgagggagggggcgcagtcaagtaagacggcggagcaggttgtgggcgacgccgacgaggttggggagggagaagtggcagggatgccacttatacccctaaaggtggcagcgcagaagacaaatgaggtagcgcgactcagttggggaaggaaggctgtcaacgagccgagctcgagcgagctcgtctgcccaagctcgagctcgacacaagctcgagccgagccattgcaccttcgagcttttaggcaagctcggttcgagctcgagcttggtgccgagctcggccataagtaggccgcgcgcggaggcgaaatgtggaagaagatcgcggccggcgcggcggaggggtggcgcggctgctgccgaagacggcgtccgccaccaccaagctcgtgcccgattctttccaaagtcggcgacgccgaccgcggcgctcaacctcgtcgccgacgcgtggcggcgtggcgccgctggcttcgctctccatcagcgagtcccaccgcaggtgtgtataccctcctcatcagctgccgtggagggcaccgccggagaacaagcccccccgtctccgacgcagcgttggaggtgtggcgtcgttggcacgcgcgtcgacgcggcgctcgctctcctcgttcatggatcaagcttcgcggagactcacgcgcccccaccaactccacggccgtctccaccacgtgtctcccgcctcctccattgtctgctgcacggagggcgaaggggtgtcgcatgctgcttcgtcggcatctctgtcacgcaactactcgacgtcgtcgacgactcgtag

SEQ ID NO: 69932 - DNA, 2130 bp, Oryza sativa
  Clone ID: PAT_MRT4530_70553C.1
atggcggatgatctttttgaacaactccagaagttcaacataggttctcattatgcttatgataatgagatggaccttgcattggaaagggcattctgctcattgctagtcggagatgttagcaagtgcagaatgtggcttggaattgataatgagtcttcaccatacagagaccccaaaattctagagtttattgtgaccaactctagcatcagtgaagagaatgatcttcttccagggctgtgcaagcttttggagacttggcttatctttgaggtttttcctaggagcagagatactcggggcatgcagttcagacttggagattactacgatgatccagaagttttaagctacctagaaaggatggagggtggtggtgcttctcatttggctgctgctgctgctattgcaaaacttggtgctcaagctacagctgcacttggtactgtgaaatcaaatgctattcaagcgttcaacaaggtttttccattgatagaacagttagacaggtcagccatggaaaatactaaagatggccctgggggatatcttgaaaattttgaccaggaaaatgcacctgctcatgattcgagaaatgccgccttgaagattatctctgctggcgcactgtttgcactgttggcagtaattggggccaaatatttgcctcgtaagaggcccctttctgctattaggagtgagcatggatctgtggcagttgctaatagtgtcgactctactgatgttgtcggctgctgctgttgtggccaacatttgcttgctgctgctgcatcccctgataatgttgctgctgcccaagatgcagctttgctgccgccgccttcatttgctgctactgcggccgccgctcaagccgaggtcgcctgcagttctgaccgccaaaacacccactgcctacccgtcgccgcccgccgccatcaaaatccattagctctttccttgccatggatgagaggatttgagatctatgaaagtcaggaacaagcacgcaagcgtgataccgtgaccgtcccgttttcacgtggggtcatatccaccgtccgattagaactcaacgggcgcgatcaccaactgcagcaacaactacaagagaaaaagggaagccacagcaagcaaaaccaaaaggccagcgaagccaacgcgtcacctcctctccccgaacccccaaccctccagaaccttccgcctcccgccggcgccggcgccgccgactcggccgcggaaaccctagcgtgcgctcgcgcccgccctcgctcgccggccacctccggactccgcctcctccgcctgctcctcgtctccggcccctccgccgccgtcgaccggtcagatctcgacgccgtcaagccgcgatggaggactgggcccgcagtgcctagtgcaaaagctgagccgcttaaaagtaagtgggcagatgaagatgtggaagaagatgatgtaaaagaatcatgggaagaagaggaggaggagaaacctaaaccaccacctgtagaaaagactgcaccaaaacctagtgggaaaggtgctgcgaagaaaggaaaacaacaagcatcaactagttctgaagtagttcaagatgaggctctggatgatcctgctctagagaaacttcgtcaacaaaggcttgtggaagaagctgactttaagtcaactacggaactttttggaaagaaggacggcagtgaaaagtccctagataccttcatcccaaagtctgagagtgactttgcggaatatgcagagcttattgcaaacaaactgcgtccctatgagaaaagcttccactatatgggtctactcaagaatgtcatgagactttccatggcatcattgaaaggtgcggatgcgaaagatatatcgtcctccattgcagcaattgctaatgaaaagatcaaggctgagaaagaagctgcagcaggcaaaaagaaacaaggggcaaaaaagaagcagctacacattgagaataaagacgatgatttcatccctggaaaggaggcacctgaacacttgaaacgattgcatgggaacaatgcccatttgttcgacgttgattttgactctcacagaatagggaagagcacctgtgtgctcgagctcgacacatag

SEQ ID NO: 69933 - DNA, 1703 bp, Oryza sativa
  Clone ID: PAT_MRT4530_70554C.1
tttttttttttttttttttgcaggactcctttttaaaccagatacacatgtctgcacaggtttcctctttttatctccaaaagttctgagctagcaataatatagttattacagctaaatacacctacattctttgcgaaaatgaagaacacagggggatctcagcactcatctaacaaaactgtcagaaagaacgaagacatctacactgtctatttacacaatcaaactgaaaggacaagctactgcacactgttctacgacttgaggactgctccttccgttatcttccaccctcctagcttggagaaggccatctcataccgggtagtgtattttgtgtcatatgaatcattgtttctgggctcagtaacatcagtaagttggcctgcctcatcaatcgtagcctccacagtcgctcgtcgaccatctagggagatagtgatgctatcaatcgtcacatcggatagtgtatactcccagaaccacccatgacgctcaatctccgctgctcggtcagtccacacctttagcatgttgccatcaagaacctcttgcaatgatgcaaccgaatgttctggtcccaaggccttagatttgatactctgccacttgcgaacaatatcttctgccagcttcgcatccattctaggaatatgtactggatcttcatctagtgcaggatcatcagtagagtcgacactattagcaactgccacagatccatgctccctcctaagcgcgcaaaggggcctcttacgtggcaaatctttggccccaattactgccaacagtgcaaacagtgcgccagtagagataatcttcaaggcggcatttctcgaatcatgagcaggtgcattttcctggtcaaaattttcaagatatcccccagggccatctttagtattttccatggctgacctgtctaactgttctatcaatgggaaaaaccttgttgaacgcttgaatagcatttgatttcacagtaccaagtggagcaggcggaggaggcggagtccggaggtggccggcgagcgagggcgggcgcgagcgcacgctagggtttccgcggccgagtcggcggcgccggcgccggcgggaggcggaaggttctctccgggtcggggctcgcgggccgcgggtgtcgcggctcctaggaaaaacctcaaagataagccaagtctccaaaagcttgcacagccctggaagaagatcattctcttcactgatgctagagttggtcacaataaactctagatttgccggctctctgtatggtgaagactcattatcaattccaagccacattctgcacttgctaacatctccgactagcaatgagcagaatgccctttccaatgcaaggtccatctcattatcataagcataatgagaacctatgttgaacttctggagttgttcaaaaagatcatccgccatcatgatgaattgtggccttttacttataattgcttgagcgacatgtgcaagtgctacattgtaaatttcaaaccattcaggaggaatgctattcggtgtttttgaaaagaaatccatctgttcaattgatgtcatcctcaaaaaagcctcgttcatgaaggcttcacgagaaaatcctcctccaacggtagcaatacctcctctgccaacgctccacaaaatgtttctcgcaccttgaagcccttcttggcgcttcttatgat

SEQ ID NO: 69934 - DNA, 1031 bp, Oryza sativa
  Clone ID: PAT_MRT4530_70555C.1
tcagctgttgttagcagaattctactgttttgcctgcgatggtttctttgcattacatctaacgaagctttttgtggaccggacaccgaacacaatagagacccgtcaactccagataagcgttgtcaatgtcagaaccccggattttcttaagttgtacgctatgaagccctgtatacctgttgcctaattgcccatgatcctttctgagctcaaggtaaatacatgccgtacaatctgttccaccatgttaactatctagtttttgttaattcgtcagctcacaccaaaaactttggtgcatgttctcggggcgagtaagtcaatctaaagggctgggtcacttcttttgacgtttggatagttgtagttagcagaattagaagcgattctcagatgaccacgtctgcgggaaacgccccaaatagtgttttctctgcctctgttgaatggactggcatccattgatgctgggtatagaatgaagaacgagcaaccaacagtcacgacaactgcaaagaagtaatcttttccaccgtacttcttcctcattataattgtgccccaaatcatcacaggtatcatctttgcacatttggcaagtgtttggacagggaagctcacatacttgagtgcctcatattggcaagttgtagtcagtatgtttgatacagagaccacacagtacttctgaagtggagccacagggtccagggatttcttacttgccgttagcaccagcgcagacaccgtagacgtggtgatacggttacagaaaacaagaaaaagcgagtatctgaagaactccttttctgctccatatggaactctcatcggacgagtgagttgatcaatatctggagaaggccgtagatgaggagggtgctcatgatgccgacgaccgcgaagccgcacctccccaccaatcggcgccggtcctccttgtccttccccgtcgccgccgccgccaccggcagcgtccccgccaccgccgccgacgccgacgccgaagacgacgccgcgtccgccat

SEQ ID NO: 69935 - DNA, 1349 bp, Oryza sativa
  Clone ID: PAT_MRT4530_70556C.1
gaccaaaaacacaatggtggattaagaataagaaaaaacgcctatgtgtcgagctcgagcacacaggtgctcttccctattctgtgagagtcaaaatcaacgtcgaacaaatgggcattgttcccatgcaatcgtttcaagtgttcaggtgcctctgaatgaaaataccaactatgccgcaaactctaatctctgcttgccaaggtatacatagaagatgacggttccctcacagccgatcacatgaaatcgtactcatccggatcatcaaaattaccctttccagggatgaaatcatcgtctttattctcaatgtgtagctgcttcttttttgcccctacagatttcgttgcaaacatcagtaccaaaagaatgtgatagaaaaaacagcttacagtttgacatcagcaccgcatgtaggacataaagcgcctttgacctcaccttgtttctttttgcctgctgcagcttctttctcagccttgatcttttcattagcaattgctgcaatggaggacgatatatctttcgcatccgcacctttcaatgatgccatggaaagtctcatgacattcttgagtagacccatatagtggaagcttttctgtatacatgaagacagggatgaaggtcagatcctgcagagacaattccccaataaacgcagatttcaaaatgttcaaaaaacctcatagggacgcagtttgtttgcaataagctctgcatattccgcaaagtcactctcagactttgggatgaaggtatctagggacttttcactgccgtccttctttccaaaaagttccgtagttgacttaaagtcagcttcttccacaagcctttgttgacgaagtttctctagagcaggatcatccagagcctcatcttgaactacttcagaactagttgatgcttgttgttttcctttcttcgcagcacctttcccactaggttttggtgcagtcttttctacaggtggtggtttaggtttctcctcctcctcttcttcccatgattcttttacatcatcttcttccacatcttcatctgcccacttacttttaagcggctcagcttttgcactaggcactgcgggctgaaagtcttcagaatcccagtcctccatcgcggcttgacggcgtcgagatctgaccggtcgacggcggcggaggggccggagacgaggagcaggcggaggaggcggagtccggaggtggccggcgagcgagggcgggcgcgagcgcacgctagggtttccgcggccgagtcggcggcgccggcgccggcgggaggcggaaggttctggagggttgggggttcggggagaggaggtgacgcgttggcttcgc

SEQ ID NO: 69936 - DNA, 723 bp, Oryza sativa
  Clone ID: PAT_MRT4530_70557C.1
atgcagaggagggacgagaggagaagaggagaggagtgctcgcctcctcactttctccatgttcgcctcaaagctcgtgctcggcgatggcgacggcgcgaggcggagactctcggagatgctgacgcgacggcggcggcggcagcgcgaggggaaggcggaggtggaggcagcgcaagcgggaggcagaggcggcagcgcaagcgggaggcggagcaaggcggcggcagcgagagagggctcggtctctcgggtcgcagatcacgagtggacctgcctgcctgcctgcctgcgatggggtatggggtacacgccaactctcgacgcatggccatctttgtccatgcgttgcacatcggtagcggctaccaggaatttctgccggctagctttgtcttgtctatcgcgctttcacgaatcacgcctgggttttaccgtaacagtttattacgtctatggatcggactatttttttttgtccggatactaattttaatccagaaacttaatgacccaaacatggtctcaacgttgatggttttgagccgctctgtctgcaaccacctacctaaagtgagagcatacgcgggtacaatctcacttgagccgtcgccgaattcccttccgttcattgtgctccacaatcatatgtacccagaaacggttggtaaagaacatccacattgtgctcccaaatcagatggaataggtatagatgattga

SEQ ID NO: 69937 - DNA, 623 bp, Oryza sativa
  Clone ID: PAT_MRT4530_70558C.1
tttttgtaagggtcaataaacgggtgcacatgctccattaaccatagcaacaagcacacacaagatctttcctgagcttcctgtcacagctcatacaagatcttcaacgaaaagattacagtacatgaaaaaaagtcaaggattcattcgtccatatgtctatttcttctataggcatatgtttcctcagattcattagaaaaaaccttacacctaccacagtaatcagctacacgtaggaaaaattcacaacacccccaagacgaaggtcaggaaaccccccccccctccccccccttgataacacagattacagaaagctgcagtcagccagtcacttctactaataaccagcgctgatcttcctttccatccgtctctatacatcatcgatcaccgatattagggaggcgctaacaaacaccaccaaaagagcaaagggggtttaaacaaaaacacaaacccatatgtaactttgtaagtgatagttttttggtggtaaggtgtgaggatcatctggtcttggcttgccggaaaacgagcagaacaatcccggaggagttaccttaatttcagggccttcttcttggaagtgggaacccggtgaggatcgagccggaact

SEQ ID NO: 69938 - DNA, 1416 bp, Oryza sativa
  Clone ID: PAT_MRT4530_70559C.1
aacaacatgacatgaatattcgaaataaactcacgccaataactaattccaacacaggcagagtgtacctctctctaacatgccacactttgtcaatggatgagaagatttggatgtaatcttgcttcaaagatattaaaatggcttcgagttattcatcaaggatgtttatttccattgatgatctaaaactagttggaatgaagttccatgattgccatgtactaattacataggtcctatcaattgctattagaagtattttgccaatcaagatccatcacacgattatgcgttcttgtgccttcttcaatgccattggtaaaaaagttgttaatatagaaaaattaatgtcctgcactcaaatattatcaaactatctatcttcttgagatgcatttttcccgccgttctttgatatcatggtttattttcatgtccatcttgtggagaaaaataaagtatgtgggctagctttccttagggagatgtacccattagaaagatacatgggaattttgaactcctatgttcggaatagatccaaacgggaagggagcattattgagggtcacacgggtcacacaactaaggagtttattgacatctatatcgattacatgtctgagaccaatccaatcagagtttgttgatctcatcatgtagtaggctatccggtattgccacattaggcagaaaaagaactgtatcagatcaagacgagtatggccaggcccattttactatcctctatcatatgacagaagttgcgccatactttgaagataatttagcgagggttggacatgaaaacaagagtcaacaggatatctagatcaacaaagagcatatctgttgttttaatgaatggtctaagcatcgtataagtacatagactaatagcacttgcaaacacttacatggttagcgccttagtggcaggaccgctatgggatattgacacttcacatggatatgctatcaatggatacatattttacaccatcaagcaagatgtcaagagcatagtacggaacaacgggtccgtatagaggcatttcaggaccaacttggcatcaactcatactacagccacataaagcagatctaggagctgaactatgttaagttcaaagtgtcgtttctttgctgatgggtcaatctatgcggagttaaggttgataagaaaggtttaaaaaatgatgatctaagcaaggtcagatacatggatgaaccatttgttcttgcaaaacaagttgtgcaaatattctaaattaaagacccggtaaacaaaacattgcaaatcattagggagggaaaaagaagatatgctggggttgacaacatcgttgatgaggatggttacaactagaacctgcaccgtcgaccttgtctccacctcctcgaggcaccacc

SEQ ID NO: 69939 - DNA, 1131 bp, Oryza sativa
  Clone ID: PAT_MRT4530_7055C.1
atggccaccgctgccgccgcctcgctgcagtacgcgctgcacggcgccgcctccgcctccgccaagcccagatccgccgcgccaggcaggagcgtgcgcgtggtcgcggcgaggaggtcggcgagtgcggatgcgacggcggaatccaagtccggcggtcatgaggtcctgttgtttgaggcccttcgagaagcattgatagaagagatgaaagaagatcctacagtttgtgtatttggtgaagatgttggtcactatggaggttcatataaggtgaccaagggcttggctgagatgtttggagaccttcgggttcttgatacccctattgctgagaattctttcgctggcatgggagttggagcagcaatgaaggggctaaggccaattgttgaaggcatgaacatgggtttccttctccttgcttacaatcagatctcaaacaattgtggtatgcttcattatacctcaggtggccagttcaagatcccgattgtgattcgaggccctggtggtgttggtcgccagcttggtgctgagcattcacaacgtctcgaatcgtacttccagtccattcctggacttcaaatggttgcttgctctactccttacaatgctaagggcctgatgaaggctgccataaggagtgagaaccctgtggtgctgttcgagcatgtccttctgtacaacctgaaggagaagatccctgatgaggaatacatttgctgcttggaggaggccgagatggtacgtccaggtgagcatgtgaccatcctcacgtactctcgcatgaggtaccatgtgatgcaggcagccaagacactggtgaacaaagggtacgatccggaggtcattgatatcaggtcgctgaaaccattcgatctgcacacgatagggaactccattaagaagacccaccgcgttctgattgtggaggagtgcatgcgaacgggtggtatcggcgccagcctgaggtcggccatcattgataacttctgggactaccttgatgcccccatcatgtgcttgtcatcacaggatgtaccgacgccatatgctgcaactctggaggacgcaaccgtcgtgcagcctgcccaaattgtggccgctgtcgagcagatctgccaataa

SEQ ID NO: 69940 - DNA, 224 bp, Oryza sativa
  Clone ID: PAT_MRT4530_70560C.1
ctttggttagctatgggctccctacccgccgccgacaagccgttgccggcgctccggtaccctccggcttcgccgcgacgacgacattgtcaacaactaccatggagttaccgtgccggacccttacagatggatggaggagctggagtcggaggaggtgaaggggttctggaacgcccaggcggcctgggccgatgcggtgctctccacctgcgacgaccacc

SEQ ID NO: 69941 - DNA, 2646 bp, Oryza sativa
  Clone ID: PAT_MRT4530_70561C.1
atggagccggccgagcgtcaccggcggcggcggcggagggcgcacacggcggacgaggcggcggcggtgctgcggaaggcgtggtgccggctgcggctatcggcgcgggatccgtcgcgggtgccgccgtgggacgccgtcgtcctcaccgcggccagccccgagcaggccgcgctctacgaccgccagcttgcgcgcgcccgccgcctcggccgcttcccggcctccaccgccgccctcgccgtccccgaccccgacgccgcgcgcatcggctccggcgccgccactctccacgccgtcgcctccctcgtccgccatctcatcgcccaggcttccaaggaagagatcgccgaattgctgcccgaagcaagtgattcttcagcagatgacatcccactcagctcggtggtacgattcatggcgaacaaacacgtactgctgcttcacgctgggggtgatagcaagagggttccatgggcgaaccccatggggaaggccttcctgcctctgccttacttggccggagacaatcctgatggacctgttccgctgcttttcgaccacattctcgcgatctcatccagcgcaaggcaagctttcaaaaaccaaggtgggatcttcataatgaccggggatgttctcccatgcttcgatgcttcaaacctagttcttcctgatgatgctgcttgcatcgtcaccgtgccaacaactctagatgtggctgctaatcatggtgtagttgtagcggcaaaggacggaactgatggggagaactattccctgtgtttggttgataatctcctccagaagcctacagtgcacgagcttgtggagggccaggctattcgagatgacgggagagcactgcttgacacagggataatatcagccaggggtaaagcatggcaggagcttgttagacttgcatattcatctagccatgtcatgatcaaggagctcataactggcagaaaagagatgagcttatacgaagatcttgttgctgcatgggtgccttccaggcatgaatggttaaggacccgtccatttggcatggaactaattgctgctttgggaaagcacaggatgttcagcttttgttcatatgatttctcatttttacattttggcacatccgctgaagttcttgatcacttggcgggctcatattcaggacttgtagggcgaaggcacatgtcttcgataccagagactactgcttgtgatattgcggcaacagctgtcattttgtccagtaaaatttctgctggggtctcagttggagaggattcattggtctatgattcatcactttcaggtagaattaggattggctcacaatgtattgttgttggggtgaatatacatgagttacatgggaacagtcatggggatcagtattctggtgttcttccgcagagcagaagataccaggtcaaaatggatctgcttacagcttctggagatctttccactgcagctattgttgaagataaagtgtgggcttccatagcaagtgaaactgcatcagctataaaatatggatctaaagagccatcaagcgattccaagtgttcaagtaatggtaacctgcatcctaagaaggctattgtggaattaccggtccgtgtcgactttgtcgggggttggagtgatacacctccatggagtttggagcgtccaggttgtgttttgaatatggcaatacggttggaagggaaccttccagttggtgctatgatagagacaacaatggaccaccttggagttctcattgaagatgatgctggcagaaatgtttgtattgatgacctgtcttctattacttcaccattcaaagaaaatgattcattccgtttagtcaagtctgctcttattgtgactggtgtcctaaaccatgaaagattgtcaaaattagggttgaacattaggacatgggcaaatgttcctcgtggaagtggtctgggaacttctagcatattagcagctgcggtagttaaggggctattccaacttatagaaggtgatgaaagtgatgcaactgttgctagagctgtgctggtagtagagcaagtaatgggcacaggcggtggatggcaagatcaaattggtggcctatatcctggaatcaagtgcactcagagttttccaggacagccattgcgtttgcatgttgttccattgctggcatctccgcagttgattcaagaattacaacaacgtctcctggttgtgttcactggtcaagtaaggcttgcccaccgggtcctgcagaaagttgtcactcgatatctccgccgtgatagcctgttgatatctagcatcaagaggcttgctgagttggcgaaaattggaagggaagccctgatgaatggtgaaatagacgagcttggtggcataatgtcggaggcctggaggctgcatcaggagctagatcctttttgcagcaacaagcttgtggacgaattgtttgcatttgctgacccttactgctgcggctacaagcttgttggagctggtgggggcggctttgcgttgatgcttggaaagaatcttaactctgccaaagaactcagacaagcactcgagaattctgccaccttcgatgtaaaggtgtacaactggaacgttgctatgacaccatga

SEQ ID NO: 69942 - DNA, 486 bp, Oryza sativa
  Clone ID: PAT_MRT4530_70562C.1
atggcgaggcgcgacggccaccatacgcacgacgcgacggactggtgcgtcgtggcggacaggtgcgtggcggcggtgggcagctgctggtgcggctgcggcgacggtggcgcggacttggccgagctctgcgccgtggcggcggcggcggcgttgcagagcggctgcagcagcgggtttgaggtggatccatggcgacgggtcggtggagaacaggacctgcagagcggcggcggcgccgtgaggctcagcttcgagacgcaccacggcggcggcgtggcaccttcgccggagttcgcggcgtgcgcggcgagctcctgcagcgcggaaatcatggtgttgctgctcctgcagcgcggcgagctcctggtgcaccatgaccggccgagccatcaccaccgccgttacttcccaacgccgcaaccagtcgaagccgccgccgcagttgaagttggatggggatttcaggggctaggacaacgctaa

SEQ ID NO: 69943 - DNA, 423 bp, Oryza sativa
  Clone ID: PAT_MRT4530_70563C.1
agagtacaaacccccattcccaacaccttcgcgacgggagcgagccaagcacgagggaaaaaaaaaatccccgaatccgcgacgagcgaggcggcgagctcgctgcttctatcgatccggagagggaggtagggaggagtgagcttgctcgctgttgccgccgtggccgaggccgaggccgatcacggcgccccgggtgctcagatcgagcgcggcatgatggatccggggatgatgtcgctggcgcaggagcagatgaccaagatgtcccccgttgacctcgccatgatgcagcagtagcttctgtcaaatcctaacctactaaaggtagcatgctgagagcatgacgaatatgacagctgatgacttcaaacgagctgcacagctcatgaatcacacaggaccagatgaaatgcttgacat

SEQ ID NO: 69944 - DNA, 3379 bp, Oryza sativa
  unsure (1)..(3379): unsure at all n locations
  Clone ID: PAT_MRT4530_70564C.1
atggagccggccgagcgtcaccggcggcggcggcggagggcgcacacggcggacgaggcggcggcggtgctgcggaaggcgtggtgccggctgcggctatcggcgcgggatgcgtcgcgggtgccgccgtgggacgccgtcgtcctcaccgcggtcagccccgagcaggccgctctctacgaccgccagcttgcgcgcgcccgccgcctcggccgcttcccgggcttcttcgccgccctcgccgtccccgaccccgacgccgcgcgcatcggctccggcgccgccactctccacgccgtcgcctccctcgtccgccatctcatcgcccaggcttccaaggaagagatcgccgaattgctgcccgaagcaagtgattcttcagcagatgacatcccactcagctcggtggtacgattcatggcgaacaaacacgtactgctgcttcacgctgggggtgatagcaagagggttccatgggcgaaccccatggggaaggccttcctgcctctgccttacttggccggagacaatcctgatggacctgttccgctgcttttcgaccacattctcgcgatctcatccagcgcaaggcaagctttcaaaaaccaaggtgggatcttcataatgaccggggatgttctcccatgcttcgatgcttcaaacctagttcttcctgatgatgctgcttgcatcgtcaccgtgccaacaactctagatgtggctgctaatcatggtgtagttgtagcggcaaaggacggaactgatggggagaactattccctgtgtttggttgataatctcctccagaagcctacagtgcacgagcttgtggagggccaggctattcgagatgacgggagagcactgcttgacacagggataatatcagccaggggtaaagcatggcaggagcttgttagacttgcatattcatctagccatgtcatgatcaaggagctcataactggcagaaaagagatgagcttatacgaagatcttgttgctgcatgggtgccttccaggcatgaatggttaaggacccgtccatttggcatggaactaattgctgctttgggaaagcacaggatgttcagcttttgttcatatgatttctcatttttacattttggcacatccgctgaagttcttgatcacttggcgggctcatattcaggacttgtagggcgaaggcacatgtcttcgataccagagactactgcttgtgatattgcggcaacagctgtcattttgtccagtaaaatttctgctggggtctcagttggagaggattcattggtctatgattcatcactttcaggtagaattaggattggctcacaatgtattgttgttggggtgaatatacatgagttacatgggaacaggtctcagataatcagtactagctcatacttcacattacctgatcgacattgcctctgggaagtccctttggtaaactctgtggaaagagtaatggtttactgtggccttcatgataatccaaaagtatctatgaagaaagatgggacattctgtggcaaaccatggagaaatgtcttggaacatcttaaaatccaggatacagatctgtggagctcaaccaatgaagacaactgcttatggaatgcaaagctttttccagtcatgtctctacctgaaacgctgaaagtaggtatgtggcttatgggatcgacatgtgacctggatggcaaagtcgcttccctgtggaaagaatcacggaggatcagcttagaagagctgcatcgttcgattgactaccatcagctctgtgtgaattcaagcaagcatcaagcagatctagcaaccaacattgctaaagcttgcatgacctatggcttgcttgggcgcaacctgtttcaactatgtgaggaaatgctacaaaaggaaaattcatgcgtagaagtctgtaatgagttactttcgctttgtcccagtcatggggatcagtattctggtgttcttccgcagagcagaagataccaggtcaaaatggatctgcttacagcttctggagatctttccactgcagctattgttgaagataaagtgtgggcttccatagcaagtgaaactgcatcagctataaaatatggatctaaagagccatcaagcgattccaagtgttcaagtaatggtaacctgcatcctaagaaggctattgtggaattaccggtccgtgtcgactttgtcgggggttggagtgatacacctccatggagtttggagcgtccaggttgtgttttgaatatggcaatacggttggaagggaaccttccagttggtgctatgatagagacaacaatggaccaccttggagttctcattgaagatgatgctggcagaaatgtttgtattgatgacctgtcttctattacttcaccattcaaagaaaatgattcattccgtttagtcaagtctgctcttattgtgactggtgtcctaaaccatgaaagattgtcaaaattagggttgaacattaggacatgggcaaatgttcctcgtggaagtggtctgggaacttctagcatattagcagctgcggtagttaaggggctattccaacttatagaaggtgatgaaagtgatgcaactgttgctagagctgtgctggtagtagagcaagtaatgggcacaggcggtggatggcaagatcaaattggtggcctatatcctggaatcaagtgcactcagagttttccaggacagccattgcgtttgcatgttgttccattgctggcatctccgcagttgattcaagaattacaacaacgtctcctggttgtgttcactggtcaagtaaggcttgcccaccgggtcctgcagaaagttgtcactcgatatctccgccgtgatagcctgttgatatctagcatcaagaggcttgctgagttggcgaaaattggaagggaagccctgatgaatggtgaaatagacgagcttggtggcataatgtcggaggcctggaggctgcatcaggagctagatcctttttgcagcaacaagcttgtggacgaattgtttgcatttgctgacccttactgctgcggctacaagcttgttggagctggtgggggcggctttgcgttgatgcttggaaagaatcttaactctgccaaagaactcagacaagcactcgagaattctgccaccttcgatgtaaaggtgtacaactggaacgttgctatgacaccatgaacaagtatagaactcgcggagcatatgttttcttactntttccttctggtaaacagaagttgcatatactgctggagcctggcgtcattgtacatttgtaccgtccggttcatttattcagatatgaagtgcattatttcaaaaaaaaaaaaaaaaaaaa

SEQ ID NO: 69945 - DNA, 738 bp, Oryza sativa
  Clone ID: PAT_MRT4530_70565C.1
atggcggcggatgcgaccacgacagcctccgcccttcgtgcgcgcgccgcggagttccgcaaccgcgcggagaagcttcgcgagctgctcgtcgtggatgatgagccggaggaaggcatcacgcgcgacgtggcccgcaatctgctgcgcatcttagtggagcagaacgccatgtacgagttttttccgtcgccgcgccagggatgttgccggggaggaggaggaggaggagcaggaggggaggaggaggagttcgtgggcggcggcgagggggcctcctccgatgcgacggataggatcgtcgaggacgccgggatggacctggaggagggggagatcgtcgaggacgccgcgatggcccaggagcagggggagggggaggaggttgaggggaagcaggacgaggtcatggtcgatggcaagcggatcccctccgagttgtgggacttggtgtcgctggacgacgacgagatagcctccgcacaggaggtagctcgtgccaggatccgtcatggcaaggagatggagaaggtatggcttcacctcagccacatcgaccacgatgatttccgcgctctcgattcggcctgcctcgattacctctcgatcaagcgcttctccgagccgattctccaggccagcgagttgcttgacacgatccgctcgcgtgactgggcctctgcgctggagaggcgcgcggctgagctcgacacggaggcagcgtccctggagacatag

SEQ ID NO: 69946 - DNA, 1498 bp, Oryza sativa
  Clone ID: PAT_MRT4530_70566C.1
gctgcaggaattcggcacgagggccactgccactgctcccccctgcaacttggacatgtggcttagctactcgccgtcgcggtctcggatgatagtataagcgtgagggttgggcaatctaggcaggagaggtgactgctagcgaggaaagggagcatatatactactatagcttagcttgctgcaggtgctagctagctgaggcatggagcttgacgaggagtccttcttggatgagctcatgtcgctgcggcgtgatggatcggcgccgtggcaggcgccgccgtacccgggtggcggcggcggcggcggcggtggcggcatgatgatgagtgacctcctcttctacggcggcgacggcggcagcgcggaggcgaggggcgggatggacgcgtcgccgttccaggagctggcgtccatggcggcgccgccgcctcagcatccgcacgaggagttcaacttcgactgcttgagcgaggtctgcaacccgtaccgcagctgcggcgcccagctcgtcccctcggaggcggctagccagacgcagacgcagctcactcctctccgcgacgcaatggtggcggaggaggagacgagcggcgacaaggcgctgctccatggcggcggcggctcgtcgtcgccgacgttcatgtttggaggtggcgccggagagagctcggagatgatggccggcatcagaggcgtcggcggcggcgtccacccgcggagcaagctccacggcacgccgtcgaagaacctcatggccgagaggcggcgtcgcaagcggctcaacgaccggctgtccatgctccggtccatcgtgcccaagattagcaagatggacaggacctcgatccttggtgacaccatcgactacgtgaaggagctgacggagaggatcaaaaccctcgaggaggagatcggcgtcacgccggaggagctcgacctgttgaacacgatgaaggattcctccagcggcaacaacaacgagatgctcgtgaggaattccaccaagttcgatgtcgagaaccggggcagcgggaacacgaggatcgagatatgctgcccggcgaaccccggcgtgctgctgtcgacggtgagcgcgctggaggtgctggggctagagatcgagcagtgcgtcgtgagctgcttcagtgactttggcatgcaggcctcctgcttacaagaggacgggaagaggcaagttgtcagcaccgacgagatcaagcagacattgttcaggagcgcaggctatggcggaaggaattatagtagatcgagtaccatttatgagttcatattcatcagcagtggtagtacctcgtttctgaacacaccagagagcaaattaaagatttgctcaagtattgtaagctttgcatttgtgaatcggtatgggaaccggccgtgtgatttgtcgaacattggatttgaattaaacgccaagaaatggttcatctggttttgtcccgagctatatatcatatgcgcgcgcatatga

SEQ ID NO: 69947 - DNA, 308 bp, Oryza sativa
  Clone ID: PAT_MRT4530_70567C.1
cacactttcttgtagaacgcaaacaaacccaggggggggcttatataatccagtgggcgggcaaagacagcacgctgcctctggactaggctcgccgacccctcctcctacagcgagacgatcgtcgcgaggctccgcttcgggccggacaagaagtccgtgcccaacaatgccgcgagggcgccttcccccactacggacactcctctatagccccccgggccagcagctccgtactacctgcacgggtcgttcaccatgcactactggtacgacccaatgggcctcactaagacgcgggagcacct

SEQ ID NO: 69948 - DNA, 521 bp, Oryza sativa
  Clone ID: PAT_MRT4530_70568C.1
ccggccgggatctcttactaaggcgagatggctagtctcgcctccgtagccagctggttaaaccggatgtcgacgccgccgtcgccgacacagacactgagccgctcgtcctccaagcaacatggtgtattgggcttccctcgcaagggttactccgatcgctaggcctctatgcctcgcgagatcaagggcgcggttcatcctggcatctattaatcgaaagaatattctctcactggaaacgacaagtgcacgaggagtcccacataattcggcgaaacatcaagaaaagaaactctgcggtgcagagatgaatgaccccctccacagaagtcgctgttctgaaaggtactgatgcgaaacaagtggaatagaattcgagccgtacagatgaaacagctcaatgatgatattgaagtttccacctacaacgcagatcgtgacagatgattagttagacacacaagatactatgagaggatgctagcttcaataaggacatacatcagatcagtctatct

SEQ ID NO: 69949 - DNA, 482 bp, Oryza sativa
  unsure (1)..(482): unsure at all n locations
  Clone ID: PAT_MRT4530_70569C.1
atgcaagtgtacaaacaannttggtaccttggcgtttaattcaaatccaatgttcgacaaatcacacggccggttcccataccgattcacaaatgcaaagcttacaatacttgagcaaatctttaatttgctctctggtgtgttcagaaacgaggtactaccactgctgatgaatatgaactcataaatggtactcgatctactataattcctggagcgaagtgcatatgcatgtatagctattactcctatatcatggatgatgaagatcatatatatgcaacctgtacctgctcacagtgctcagcgttcaatggattgtatagctagctagctacagacaccttccgccatagcctgcgctcctgaacaatgtctgcttgatctcgtcggtgctgacaacttgcctcttcccgtcctcttgtaagcaggaggcctgcatgccaaagtcactgaagcagctcacgacgcactgctcgatc

SEQ ID NO: 69950 - DNA, 5890 bp, Oryza sativa
  Clone ID: PAT_MRT4530_7056C.1
ctagcagcggtggcgtggcgccgggtgggagctggagcagcggtggggacgacgagggcagtagatgcggcggccatcgaccgacagcggcaccgtgggtcgggcgccgggcgggagttggagtggcggcgagggcggtagatgcggcggccatcgacgggcagtggggacatcctgattttggcaagtataggcgaggcagcgactcgccaggggagggcgccgcctggcgcgacctccaccgccggcgacgatgccgtgtgcctgctcatgagcgtgctctagagatggcagcggccgtgaggcaaccaagcccggccctgccttagcagggtcgatggcgcacagacgcggctgctcctcccaaggctggcaggggctagaccaccagtcaacacgcttttggcacgcctggtgggacagataagaagtcagcaagcagttcttcctcatggctgagaaaccaccgctgtcgccatccccggctagtctaggcactgttaaggaaaagatccagaagttgggattgacggacttcaatgaaggaaacgtcgtgcccattgatccaaaaaaattcacacctgatcagaagaaagatttcgacgcgatgttgcagcaagcacgggatcagttcttgaactcattcatgcagacccgcaaggggacacttgttcagaagtacaaaataaaagtggttgctaatgatcctgggaccagttcttctaaggatggagatgggaaacaagctctagacggctcggctcagccgagtatcaagggtgctaccgacggctctctaggaaatcaaggcgaaaattctcaagaagtccatggagtacaagtctggggtgttagtcaataccctatcaaacatgatgaagtcaatagcgatggttcaatagctgaacatcaggctgcaggcccggtttatttgcaaggaggtgtcttcccaaattatcggtctttgatcaccgatgttcagccatctattcaggcggttccctccgttgcacccacaactcagccgacggcgccggcatcaactcctctacctgctacatcatctatggcgccgggccagccgatgaaccctcgggtgttaatgagagagcatccacaacatagcgggcaggtttcgagttggccaacccaagatcaggttgctgccatgtttctgccacctcaacctattgttgatccaatacagcagcagccgattcagcaacagccgattcagcagacaccccaaattcaacaggttgtacaaccaaaccaacaacagccttaccctgagtttgttgagagagttcctcttcccaatcggttcaaagttccggacttctccaaattttcgggacaagatggtgtgtcgacttatgagcacattagccgattcttggctcagtgtggtgaagcatcgactgtagacgttctgaaggttaggttattcaggttgtctttatctggatcggcttttacttggttttcctctttgccgtattggtcaatcaatagttgggccgatttggagaagcaattccacagctatttctacggtggggttcatgagatgaaattatctgacttgacagcgattaagcagcggcatgatgaacctgtgcacgagtatattcagagattcagggagatgaggaacaaatgcttcagcttgagtttaactgatgccgagttagccgatctggcctttcagggtatgattactccgatcagggagaaattctcgtctgaagactttgatagcttgtcacatctgatacagaaggtaaccttgcatgaacataggtctgcggaagttaggaaaagctctaagaaggttaatcatgtttgtccatacatgtatgggtcggatgatgacgaggacgattctgaaatagctgcagccgaatgggtgaggagtaaaaaggtcataccatgccaatgtgtaaaaagttctggaaaagtggagaagtatgactttgatattagtaaagctgataagatctttgatctgcaattccgagagaagcaaattcaacttcctgctggtcatacaatcgcatcggctgaggaattaggaaaaaagaggtattgcgaatggcataattctgggtctcattctactaacgattgcaaggtttttagacagcagattcaggtggccattgaggggggcaagattaggtttgatgattccaaaaagccgatgaaggttgatggtaatccttttcctgttaatatggtgcatacagctggccaaacagccgatagggtccgtgcaaagggttctcaggtgaattcagctaagattatcaacaaatatcagaggaagtatgacaaggagcaggagaagcattatgaagaatacgatgatggttttgaccctcattggggttgtgagttctttaggttctgctggaatgatggtatgaggttgccatctattgaaaactgccctgggtgcagtgatatcgtcgggagctcaagccggtcatataataggggtaatcggctaaggcagacaagagtttctgttcatcaaagattgggtccagtgaaccaaggtcatggccaggaggacaatgtaatcaggaagaatcaatggtgtccttctggtattttcatgaagaatcaaaagagaagggttcaaagattgaggaatagggagcgccttcaggaggttgaacaagaaattaatcatcggctgaagaaagcaaagccaagacaggagtggcgtgttaagagtcaggttcctgtagccgatgatgttgcagccgatgaggcaaagaggaagttgggtagaaatgccgaggatctcatcaagacaaacatggtgcttaaaggctttggtggtaatccatcggaaaccaaaggtgttctgaatgtggagctgacagtcggcagcaaaactattcctactacgttttttgtcagcgatgggaagggttcttacagcttgttgcttggaagggattggattcatgctaattgttgcattccttcgactatgcatcaatgtttgattcaatggcaaggcgacaagatagagatcgtgccagctgacaggtcagttaatgttgccagtgccgatttagctctttgggagatggatggcctggattgtttatctggaaaagtctgggatggagattttctaaaaatggagaacccaagctattattttgagggcgtcgcggagggttcaaatgtctacactaaggatacagtagatgatctcgatgacaagcaaggggttagaccacgccagcaacccccgagaagatgtaaagccgatatgcttgaaccggtcaaggctgagattaagcgattgtatgatgctggttttattcgtccttgtcgatacgctgaatgggtttctagtatagttccagttattaagaagaactgcaagatcagggtgtgcattgatttccgagatctgaataaagctacaccgaaggacgaatacctaatgccagtagccgatcagctggttgatgctgtatcagggaacaaaattttgagttttatggatggaaacacaggatacaatcaaatttttatggccgaagaagacattcataagacagcttttaggtgtcctggtgcaatcggcttatttgaatgggttgtcatgactttcggcttgaagagtgctggagctacatatcaaagagccatgaattacatatatcatgatctaatcggctggttggttgaagtctacatcgatgatgtggttgttaagtccagagaaatagaggatcacatagctgatttgaggaaggtttttgagagaaccagaaaatatggcctaaagatgaatccgataaaatgtgcttttggtgtatcggctggacagtttttgggatttcttattcatgaaagggggatcgaggtaactcaaaggagtgttaatgcgatcaagaagattcagcctctggagaataagacagaattacaagagatgatcggcaagataaattttgttaggaggtttatttctaatttgtctggaaggttgaggaattatctactatccaacgagtgtactgttagatgcaaggccgacgttgtcaagtacatgttatcggctccaatactgaaaggaagggttggaaaatggatattttccttaactgagtttgatcttcggtatgagtcaccaaaggcgattaagggacaagctgtagccgattttattgtggaacatcgtgatgattcaatcggctcggttgaaatagtgccatgtactttattctttgatggatcgggggcatgtttcgagtttgcttatactattaaaccgtatgcgactaataatcaagctgagtatgaggcagtgctcaaagggttgcaactactcagggaagttgaagccgataccattgaaatcatgggggattctttgctagtaatcagccaattggcaggagagtatgaatgcaagaatgatacattgatggtttataatgagaagtgccaagaactaatgaaagagtttcggctggttactttaaagcatgtctctcgagaacagaattttgaagctaatgatttagcccaaggggcatcggggtataagccgatggtcaaagatgttaaggttgaaattgcaacaataacagccgatgattggaggtatgatgtgcatcaatatttgagtaatccaactcaatcggcttctcggaaattaaggcataaggcattaaagtatacattgttggatgatgagctctattatcggacgattgatggagtgttacttaagtgcttgagtgctgatcaagctaaagttgcaatcggcgaagttcatgaaggaatttgtggtactcatcaatcggctcatatgatgaagtggttacttcggcgtgcagggtatttttggccgacaatgctggaggattgtttcagatattataaggggtgtcaagattgtcagaagtttggagcaattcagcgagcgccggcgtcggctatgaatcctattattaagccatggccattcagaggttggggaattgatatgatcggtatgataaacccaccatcgagtaaaggacacaagtttatattggtggcaactgattatttcaccaagtgggtggaggtgattcctttgaagaaagttgattctggggatgccattcaattcgttcaagaacatataatataccgatttggtattcctcaaactattactaccgatcagggttcaatctttgtgtccgatgagtttgttcagtttgctgataacatggatatcaaattgttgaattcttcaccttattatgcacaagctaatggacaagccgaggcatctaataaaagtttgatcaaattgattaagcgtaaaatttctgattatcctcggcaatggcatactcggttggctgaagcgttgtggtcgtataggatgggttgtcatcgatcaatccaagtccctccttacaaacttgtttatgggcatgaggctgttttgccatgggaggttagaatcggctctcgaagaatggaattacaaaacgatttaacagccgataagtattacaaccttatggctgatgagagggaggatctggttcagtcacgattgcgtgcccttgcaaaggttaccaaggataaggaacgtgttgctcggcattataataagaaagtggtacctaaagatttttcggaaggagagcttgtatggaagttgattttgtcgattggtactcgtgatagtaaattcggcaagtggtcaccgaattgggaaggaccgttccgaatttataagcttgcgtctaagggagcatatatgttgcaagggcttgatggtgaagtctatgggcgagcgctcaatggcaaatatttgaagaaatattacccaagtgtttgggttaatgcatga

SEQ ID NO: 69951 - DNA, 303 bp, Oryza sativa
  unsure (1)..(303): unsure at all n locations
  Clone ID: PAT_MRT4530_70570C.1
gctcgtcttcctcccaccttccgccgccgccgccgtcgctctcctcttcgctccgccgcgangtaagaaggagangaggagaaattgtgaacaccacaacgttatncccaattgncacttnaaaaaacactggcagactatgtcaagacattggtncaccaagccgcccgcaaacagangcgcgcattnctccgccagaagaangctgttaaaattttccccggcccaacatttggcctcttcgaaccatgttcatggccaacttttgaagtacnacatgaatcgaaggcttggagagcttta

SEQ ID NO: 69952 - DNA, 652 bp, Oryza sativa
  Clone ID: PAT_MRT4530_70571C.1
cgattcgatcgacgtccacgggcgccgtcgctcgatcgcgattgatgtccacggccacgttgcgatccatcgatcggcgatcgatcaggttattgttgagttaaacaatcgttttgctgaaaggtctactcagctattgagatgtattgcttgccttgatccaaggaattcttttgccaactatgatgaagataagctcattgaacttgctaagatttatgcagatgacttttctgaatatgattgtttagtccttagagaccaacttgacacatttatctctaatgtgagatctgatttggatttctcaagctgctctgaccttggtaaacttgctgctaagatggtccaaactgatagacacacagtttttccattggtatatcgcttaattgaattagccttgattttgcccgttgcaacggcaacagtggaaagagccttctcagctatgaatgttattaaaactgagctgcggaacaagatgaatgatgaatggatgaatcactgcatgatttgctatattgagcgggatgtttttactagcattgaagatcatcagattatagaacattatcatgctttgaggacgcgcaagcacaaattacctagaggtatgtcatgcattgctttgtaacctacaaataattaa

SEQ ID NO: 69953 - DNA, 519 bp, Oryza sativa
  Clone ID: PAT_MRT4530_70572C.1
cccggcgctctcgcttcggatcagtctgccagcagctgcaggacgtgaccgcgagtccctgcgccccatccccggatggtgaggagctacgaggagagcatgccgatgccctggaccaaggctggtcgtcgtcgtctgtcggagtactacgctgtcgaggggtctcgtcggatcaggggtactacggcgagggtctcggaggagggctactacggcgagcagcaacagcacccggggatgacccgcgtgaggctgaccagggcgagcagtacgcggcgcagctgccagtcgatgtgccgggttgagccccagcagtgcagcatcttcgccgccggccaagtactaggctagctggcttgcctcatagctagtaggatcacaccgttgctgtgttgcatgcaacgagatagtgatcaaaacaaataatgaataatgaaatgttttgaaaaccaaatagctggtgataaagtactatatatgattttgtgcgttctggaccaaaaaaaaaaaaaaaaaaaa

SEQ ID NO: 69954 - DNA, 567 bp, Oryza sativa
  unsure (1)..(567): unsure at all n locations
  Clone ID: PAT_MRT4530_70573C.1
ggttgtggtgttttaatttatttttttttgaacgcacaaaatcatatatagtactttatcaccagctattttattttcaaaacatttcattattcattatttgttttgatcactatctcgttgcatgcaacacaacaacggtgtgatcctactgggtgtgaggcaagccagctaagcctagtactggccggcggcaaaaatgctgcactgctggggctcaacccggcacatcgacggcagctgcgccgcgtactgcctcgccctggtcagcctcacgcgggtcatccccggctgctgctgctgctcgccgtagtagccctcctccgacgacccctcgccgtagtacccctgctccgacgactaccccttgccgccgtagtactccgacgacgacgactaccagccttgctccaggggcatcggcatgctctccttcnagctcctcaccatccggcggatggcgggcagcgggactcgcggtcacgtcctgagctgctggagcactgatccgaggcgagcgcgcccgggcggggagacatcgggtggaactcttccggcggggagctg

SEQ ID NO: 69955 - DNA, 190 bp, Oryza sativa
  Clone ID: PAT_MRT4530_70574C.1
ttggccccttaaacacccgggggtataaagcataatccagcatgcatgcacacttacataattctccatatttaagcccagcgcatgtgcatgcagttaattaaacaactccttggcttggattcaaattaaaacactggaactacagtctatacgtacgtataaaaactcatcatgcacattctttttt

SEQ ID NO: 69956 - DNA, 339 bp, Oryza sativa
  Clone ID: PAT_MRT4530_70575C.1
atggtgagcgaagatgctcatgaaagcgatggaatttgggttcaggtggagaagatgaaggccgtaaaaattcagaagaagactaacgacattaggatgacaacggacaaggttaacgacatcacaacatcacacgacgacgaaaaaactcaagatccccagacttatagagggcccgaggatgaggtagtaggtccaggagcggaacctcagactacgataattcctcactccttcgtcgtcatcaagaggcagttctcgcaggtcgcgagaatgaaagttctattcaacattgtcgaagactccgtgtctctacggttctacaccgggatcgactaa

SEQ ID NO: 69957 - DNA, 630 bp, Oryza sativa
  unsure (1)..(630): unsure at all n locations
  Clone ID: PAT_MRT4530_70576C.1
gactcactatagggcgaattgggtaccgggccccccctcgagtttttttttttttttttttagtactttatcaccagctattttgttttcaaaacatttcattattcattatttgttttgatcactatctcgttgcatgcaacacagcaacggtgtgatcctactagctatgaggcaagccagctaagcctagtactggccggcggcgaaaatgctgcactgctggggctcaacccggcacatcgacggcagctgcgccgcgtactgcctcgccctggtcagcctcacgcgggtcatccccggctgctgctgctgctcgccgtagtagccctcctccgacgaccctcgccgtagtacccctgctccgacgacaaccctcgccgccgtagtactccgacaacaatacaacaaccttgctcccaggggcatcggcatgctctcctcgtaactcctcacaatccnggggattgcngngcacggcatcccggtcactcttgcactgctggcacactgctcccangccaaccncccgggcggggaaatcggtgnnctcncccgcggtaaatgcngtcaaaacttccggcccttcaagggntcctgactccctggatgctttctaaccttcaaccc

SEQ ID NO: 69958 - DNA, 465 bp, Oryza sativa
  Clone ID: PAT_MRT4530_70577C.1
tgtaagttctgctcggccatttgcacaagaaaatggtatccataattcaacaatgccacaacctgtttttagatcatctgctgaaccaacaaaggagaggcccacagaggtagtctttttatcttacttttgtagttagatatttaattgaagaatcagtattattatagaaaagtattgcaactttctagatgaactaagtgtcaaataataatgttggaattatgtgatgtgcccttgttcttttcgactttacttattgtgctcaagtaactaataatgcacagcttatgataacaaagttaagtaaaactggagataattgcagagcataagcccaggcatcctggatctgagtatatgctgtagttgaattgcaagtgatcatgttttctgactgccgcgcatcatgacattttagtgtttagcattctttcatgagaccaaatttattgcttttgtttg

SEQ ID NO: 69959 - DNA, 570 bp, Oryza sativa
  Clone ID: PAT_MRT4530_70578C.1
ggtggttggtttttttttttttttttttttttttttttttttttttttggccaagcacaaaatcatatatagtactttatcaccagctattttgttttcaaaacatttcattattcattatttgttttgatcactatctcgttgcatgcaacacagcaacggggggatcctactagctatgaggcaagccagctaagcctagtactggccggcggcgaaaatgctgcactggtggggctcaacccggcacatcgacgggaggtgcgccgcgtactgcctcgccctggtcagcctcacgcgggtcatccccggctgctgctgctgctcgccgtagtagccctcctccgacgacccctcgccgtagtacccctgctccgacgacgacccctcgccgccgtagtactccgacgacgacaacgaccagccttgctccaggggcatcggcatgctctcctcgtagctcctcaccatccggcggatgggggggcagcggcactcgcggctcacgtcctgcagctgctggcagcactgcatccgcaggccgagcgccgggcacgagccgcccgggcg

SEQ ID NO: 69960 - DNA, 603 bp, Oryza sativa
  unsure (1)..(603): unsure at all n locations
  Clone ID: PAT_MRT4530_70579C.1
gcagtgagattgagagagttcagggggcaaccagnggagggaggcccgatagccggtgcggccgtgtagggagcagtgaccgccggggggggccgaccggaatccgcgcccggggcgcaggcctgggcaggagtgggccgcagtggcggggggaccgngagtgccgttgcgccgccatccgccggatggtgaggagttacgaggagagcatgccgatgcccntggagcaaggctggtcgtcttcgtcgtcggagtactacggcggcgaggggtcgtcgtcggagcaggggtactacggcgaggggtcgtcggaggagggctactacggcgagcagcagcagcagccggggatgacccgcgtgaggctgaccagggcgaggcagtacgcggcgcagctgccgtcgatgtgccgggttgagccccagcagtgcagcatcttcgccgccggccagtactaggcttagctggcttgcctcatagctagtaggatcacaccgccgccgtgttgcatgcaacgangatagtgatcaaaacaaataatgaataatgaaatgttttgaattcctaattgtttcttcaaaatcataatgcaatttactatat

SEQ ID NO: 69961 - DNA, 851 bp, Oryza sativa
  Clone ID: PAT_MRT4530_7057C.1
ccggccgggatctccgccgcgctcgccgcgttcacactataaaacaccccctccccgcgccgccgccgccgcagcagccgccaccgccgccggaatccgagacctctcgccgtcccgccacgcgcgcgcgcgagcgagcaaagagagagagagaaatggccaccgctgccgccgcctcgctgcagtacgcgctgcacggcgccgcctccgcctccgccaagcccagatccgccgcgccaggcaggagcgtgcgcgtggtcgcggcgaggaggtcggtgcgggcgcgcggaggggcggtggtagcgcgcgccgcggttacagcgtgtgcggatgcgacggcggaatccaagtccggcggtcatgaggtcctgttgtttgaggcccttcgagaagcattgatagaagagatgaaagaagatcctacagtttgtgtatttggtgaagatgttggtcactatggaggttcatataaggtgaccaagggcttggctgagatgtttggagaccttcgggttcttgatacccctattgctgagaattctttcgctggcatgtcagttggagcagcaatgaaggggctaagtgcaattctggaaggcatgaacatcgtgctccttctccctgcttacgatcagatctgagcagatctgccaattgcttcattcttaatgacagtgttgagcatcatgatttgtggattcagaaccactgtcctttgttcgtcttgtcacgtagtgacctccattgtggcgtagacactgtattctatttccccaacactaaagttatacccttacccaaaaaaaaaaaaaaaaaaaattcttcctgcttaaaaaaaaaaaaaaaaaaaa

SEQ ID NO: 69962 - DNA, 462 bp, Oryza sativa
  Clone ID: PAT_MRT4530_70580C.1
ccaccaagagcggtgccttggaggaccgcgaggagggcgtggcggcggcagagagcggcgcggcgcgcggcggtggtgccggcgggcgggagcggccgcggacttgatggccggagggcgagctcgatccggtgccggcgggtggtgcgcatggatctgctgcctctacctccttccgtcgttgctggcgactccccagccctcctccaacgcggatccagcggcggcgccctcccccgcggcgacgacgacctcggggggcggcacctcaatgccgcggcggcgggggaggctctgccgccccgcgcggatcccgccatctcctcctcaccgccgcttcctcactgcccttccccctcctcaccgccgcagcggcgggtgtggctctgccgcctccggcggccccgccccatgcggatccggtgccaagggcggctggggcggccgatccggtggcggtga

SEQ ID NO: 69963 - DNA, 679 bp, Oryza sativa
  unsure (1)..(679): unsure at all n locations
  Clone ID: PAT_MRT4530_70581C.1
aattgtaatacgactcactatagggcgaaattgggtaccgggccccccctcgagtttttttttttttttttttagtactttatcaccagctattttgttttcaaaacatttcattattcattatttgttttgatcactatctcgttgcatgcaacacagcaacggtgtgatcctactagctatgaggcaagccagctaagcctagtactggccggcggcgaagatgctgcactgctggggctcaacccggcacatcgacggcagctgcgccgcgtactgcctcgccctggtcagcctcacgcgggtcatccccggctgctgctgctgctcgccgtagtagccctcctccgacgacccctcgccgttgttcccctgctccgacgacgaccctcgccgccgtagtactccgacgacgacgacgaccagccttgctccaaggggcatcggcatgctctcctcgtaactcctcaccatccggcggatggcggcgcaacggcaccccggtcacttctgcactgctggcacactgcttcccaggccaaccccccggcgggggaaatcggcggaactctccngcggtaactgcggtcaacactgccgcaccttcangggtgtctgcnctccgtggatgctntccttctcttcaatcctcactgcncgaaaggncatgcnctaacct

SEQ ID NO: 69964 - DNA, 504 bp, Oryza sativa
  Clone ID: PAT_MRT4530_70582C.1
atgattaaggaaactaatggttttagagggaagctagtgcatggaatcccatggtattatggaagtcacgggataattaaaacacccaaaaggtttaatctgtcccccacgctgtccacgcgatttcccctcctcccctgccgcttccgaacacgaaacctgagcagtacgccatcaacagcaaaacaaacggcacaccgccgtacgcaatacctcgccggcggcgctcacagccgcatcaactactcagagcaggagtgcgccatcgacagcaaggaactggcgcgcctccacatgcgataccttgccagtggtgcggaacgccaccgcatcaactactatgagcaagattcgccgtcgacagcaaggaaccagctcggtatcgcgcaccgccgcaacaactacaccaagcaggagtgtgctgtcagcagcagcagggggtcgagccaaggaaaggaagaagaggagacaaaatgttggtacttgatacttgatacttcgtaa

SEQ ID NO: 69965 - DNA, 817 bp, Oryza sativa
  Clone ID: PAT_MRT4530_70583C.1
aaaagggggtttttttcaaagggatttaatttgggaaagccaaggttttttccaatcccgacgtttttaaaacccggcccatgaaattaattttgggggccccaaaaaaaaagtttttcgttgcaagcacggggaagtaaactttggttcttttaaaacgcgccccccccttttttttttttttttttttttttttttttttttttttttttttttttttttttttttttttttttttttttttttttttttttttttttttaattttttttttttttttttttttttttttttttttttttttttttagtactttatcaccagctattttgttttcaaaacatttcattattcattatttgttttgatcactatctcgttgcatgcaacacagcaacggtgtgatcctactagctatgaggcaagccagctaagcctagtactggccggcggcgaagatgctgcactgctggggctcaacccggcacatcgacggcagctgcgccgcgtactgcctcgccctggtcagcctcacgcgggtcatccccggctgctgctgctgctcgccgtagtagccctcctccgacgacccctcgccgtagtacccctgctccgacgacgacccctcgccgccgtagtactccgacgacgacgacgaccagccttgctccaggggcatcggcatgctctcctcgtagctcctcaccatccgacggatggcggcgcagcggcactcgcggctcacgttctgaagctgctggcagaactgtatccgaaggcctagcgctcccgggcggtggaacattgaatgaaacct

SEQ ID NO: 69966 - DNA, 1486 bp, Oryza sativa
  Clone ID: PAT_MRT4530_70584C.1
gtcgtcttcttcgcggcggcgctcatggcggccatggtggccatctccggcgcgcacgtgagcgagtcggagatgaggttcagggacaggcagtgccagcgggaggtgcaggacagcccggctggacgcgtgccggcaggtgctcgaccggcagctcaccggccgggagaggttccagccgatgttccgtccgcccgggcgcgtctcggcctgcggatgcagtgtctgccagcagctgcaggacgtgagtccgcgagtgccgctgcagccgccatccgccggatggtgaggagctacgaggagagcatgccgatgcccctggagcaaggctggtcgtcgtcgtcgtcggagtactacggcggcgaggggtcgtcgtcggagcaggggtactacggcgaggggtcgtcggaggagggctactacggcgagcagcaacagcagccggggatgacccgcgtgaggctgaccagggcgaggcagtacgcggcgcagactgccgtcgatgtgccggccttgagccccagcagtgcagcatcttcgccgccggccagtactaggctagctggcttgcctcatagctagtaggatcacacccgttgctgtgttgcatgcaacgagatccattcctccaaacacaatttcaccaccttctccttcatcagaatgacggttgaaccagaaggagaaaacaggctcactgacaagaccttgctctaccatcttataccacacaggtactgcatctccaacggatatttcctgaaatccaagcccaagaatgccatcaaattttgcaaccatgaaagtaagacctggctccttggtagcttcaatgaattcctgatctttcacaaccagatcacctactgtaacactatcctcgctgaaaaacccagcaattgaaccagtgccatactgaatggcagctggttttccattcttctgataagtgctcgactgtccggacttgtagcgagagtggaagaagcacgcaatcgagaagtagcacttggccgacggcacccagaggttggagctgccagtgtcgaagatgacggtgaatttctgcggcggagtgccgacgccaatctccccgaagtactgcgcgttcatgtagttcttcagcgccacgatgtcgccctcacccccgccgccgccaagggagttggcgccgcggaggcccagccggcgcgccccttcctcgccggagagtcgcgcggcgacgcggctgttctcgtcgatcgggcgcttcttcagcgcgatccgcaccaaaccctccgccgccgaagcggggaggagggcttggagcagcacggccgcgaggagcaccaaggccacgctgcgggttcccatcctcatagctagtagggtccccccgttgctgtgttgcctgccccgagatagtgttccaacccaataatgaataattaaatgtttttaaaaaaaaaaaaaaaaaaaaaaaaaaaaaaaaaacaaaaccaccaac

SEQ ID NO: 69967 - DNA, 1473 bp, Oryza sativa
  Clone ID: PAT_MRT4530_70585C.1
atggacgacgacgacgacaagatgggcactcacgcacaggtgcagcagctgcccgacgagctgctcttggagatcctgctccgcctgccgccccgcgccatcgcgcgctgcctcgccgtctgctcggcctggagctccgccgtctccgccgcggccttccgccgcgcccacgccgaccgcccggccgccgtctgcaaggccaccgccacggcgatcgactgctgcgaccgcgacgccgtcgtcctcgacgcgttcctcggccgctggcaccgcggcaacgtccacaccacgccgcggtctccgcgcggcctcgtgttcccggcggccatggcccccgagcccgacaccccgtgggtactcgatacgctggtcgtcggctcctgggacggcgtgctctgcgtcgagcgaggtgctcctctgctccggggaagccgctgggacgccggcgtccatcactggcccaaatccggccggctccgggagtacgtgctctggaacccactcgccatgacccgcgccaccgtctctccgccgcccggccgcggcgctgtcatcggaggctacgcccacccggccaccatgcgcttccacctacttcacgccgccggcgaggccgcacgccgtccaggtagcctcggcctgttcgtcccgaccgtcttccgtgtccagcgagtcggagacggcgcctggcgcgaggttcccctccctctcctggaacaacaagacgatcacgcgcacgcgcagctgcagatgcacggcgctcgctccgtcgccctgcacggcaacctgcactggctggtgcagcggggtggatcggccggacccggacggctgcaggtgctcgtgttcgagccggcgcgcgagaggttccggctgatggaggcgccgccacggcgccatggcgaggaggacgacctggcaagatcgcggatcgtcgtcctgtccaacggcaagctctgcgccgtggccgtgcgcccggccaccagcacgatggagatgtgggtgctcgactcctcctcctccgacgcgccgcggagatggcggctcgacgcgtacagcctccggcgaaggaagtggacgagggtgtgcgccgcgcgccccaggagtggttccgtgggcgtggcgctgctgccgcaccgggagagcgttgctgatgatcagcccagcttcggcgaggcgtcccggctgctcgaccacaccatcgacatcgacgtcgatgaccatccgccggggtcgccgccgtcgccattggcggtccgccgttgtcacgcgcccgtcccacggccggatccgtcgtctgcgaccctgcagcagccggatccaccgttcccacgcccatcccgggcggggatttgtggcccgagcccctcgcaggtcgtcgtggtcactgccgtctccgtcgccgagatgctggccatggtcgtcgacgatgagctgaagccgccactgttgggaatagtcccacattactaa

SEQ ID NO: 69968 - DNA, 796 bp, Oryza sativa
  Clone ID: PAT_MRT4530_70586C.1
caggaattcggacgaggttttttttttttttagatatgtggatctgtgctttatatatgagtcaaagtgcatccccgggctgctgggtttttctttgcttgtgttgttgaggtcaaaacgacttatagtatagaaaggagagagtacaaccctaggagacaggtcaccacagtccacaagcatttaacagtagaacatcacacctaggacacgatcagcaatctttggaacattcagaaactcaggcaactcagaagacacttcattcctgatgcttgatccatcgccaaacttcccgagatagcttcgtcctcgggctgcagcaagatgagcatagtatactgggggaactatagaaacagcacgggtgcatcgtgcatacatgtaacataggttgtgcgtaagcaactgaagcccgtcagcagtgaaatgattttcatcgaagataactgtataatgcgtaggtctactgtttccctgagaagtatggctacacaaataaaaatcaaaacccgaaggatggcatatgtcttggtcaatcacagttccagagggaatctgtgcaacttgttcagtataattactgcaaagtgtgtgagggaaaatcctggtgtgatgccttttctggacaatcactaatgtgattggtggcagataatcctcttgtagagagaggcatgccttcctgatggcatctacttcatgaatgataacctggctgaattgactttcgcttattccatctctgtaaaagattatcctttcaggcttacgcctattcctctggtaaaagttc

SEQ ID NO: 69969 - DNA, 737 bp, Oryza sativa
  Clone ID: PAT_MRT4530_70587C.1
caacaaacaaaagaggaaaaaaaacatatacacttctagtgattgtctgattgatcatcaatggctagcaaggtcgtcttcttcgcggcggcgctcatggcggccatggtggccatctccggcgcgcagctgagcgagtcggagatgaggttcagggacaggcagtgccagcgggaggtgcaggacagcccgctggacgcgtgccggcaggtgctcgaccggcagctcaccggccgggagaggttccagccgatgttccgccgcccgggcgcgcttcggccttcggatgcagtgcttgccagcagcttcaaggacgtgagccgcgagtgccgctgcgccggcattccgccggatggtgaggagctacggaggagagcatgccgatgcccctggagcaaggctggtcgtcgtcgtcgtcggagtactacgccgcgtaggggtcgtcgtcgaagcaggggtactacggcgaggggtcgtcggaggagggctactacggcgagcagcagcagcagccggggatgacccgcgtgaggctgaccagggcgaggcagtacgcggcgcagctgccgtcgatgtgccgggttgagccccagcagtgcagcattttggccgccgggccagcactaggcttagctggcttggcctcatagctagtaggatcccaccgttgctggtgttgcatgccacgagatagtgatcacaacaaaccaatgaataatgaaatgttttgtgaccac

SEQ ID NO: 69970 - DNA, 171 bp, Oryza sativa
  Clone ID: PAT_MRT4530_70588C.1
cacgagcctgattttccaagtgaatgacttgcatagagtttgtgcgtgttattgattttgatcttcaaccagtgagagaaccaagaagatcctttttgcaataaccatgcctttcaagatcgtccaataagtttgtggctgcgtatcgtattactatcttaccgtggagtt

SEQ ID NO: 69971 - DNA, 699 bp, Oryza sativa
  unsure (1)..(699): unsure at all n locations
  Clone ID: PAT_MRT4530_70589C.1
ggaattgtaatacgactcactatagggcgaattgggtaccgggccccccctcgagtttttttttttttttttttttttgtccagaacgcacaaaatcatatatagtactttatcaccagctattttgttttcaaaacatttcattattcattatttgttttgatcactatctcgttgcatgcaacacagcaacggtgtgatcctactagctatgaggcaagccagctaagcctagtactggccggcggcgaagatgctgcactgctggggctcaacccggcacatcgacggcagctgcgccgcgtactgcctcgccctggtcagcctcacgcgggtcatccccggctgctgctgctgctcgccgtagtagccctcctccgacgacccctcgccgtagtacccctgctccgacgacgacccctcgccgccgtagtactccgacgacgacaacaaccagccttgctccaggggcatcggcatgctctcctcgtagctcctcaccatccggcggatggcggcgcagcggcatcccggctcacttcctgcagctgctggcacatgctcccaggcaacccccgggggggaaactcggatgaactcccccgccggtaactgcggtcaacactgccggccttcacgggttctgccnccctgggttgcccctaactcttcaatcccattgcccgaaagccatgccaa

SEQ ID NO: 69972 - DNA, 2694 bp, Oryza sativa
  Clone ID: PAT_MRT4530_7058C.1
atgatggtcgatggtggggctacagtgaatttgatgccttacactacattcaggaagccgggtagaaacgccgaagatctcatcaagacaaacatggtgctcaaggactttggcggcaatccatcggaaaccaagggagttttgaatgtggagctgacagtcggcaacaaaaccatccctacaacgttctttgtcattgataggaagggttcttacagcttgttgcttagaagggattggattcatgctaattattgtatcccttcaactatgcatcagtgcttgattcagtggcaaggcgacaagattgaaattgtgccagccgacaaccagttgaagatggagaacccaagctattattttgagggtgtcgtggagggttcaaacgtctacaccaaggacacagtagatgatctcgatgacaaacaaggacagggtttcatgtcggctgatgatttggaagaatttgatataggtccaggtggtcgaccaaggctgacatttatcagtaagaatttgtcttcggaattcagaaccaagttaatagagctgttgaaagaattcagagattgcttcgcttgggagtattatgaaatgcctggtctcagccgatcgattgttgaacatcggctacctattaaaccaggggttaggccacaccagcaacctctgagaagatgtaaagccgatatgcttgaacctgtcaaggctgagattaaacgattatatgatgttggttttattcgtccttgccgatatgctgagtgggtttctagcatagtccctgttatcaagaagaacggtaaggtaagggtgtgcatcgatttccgaaacatgaataaagctaccccaaaggatgaatatccaatgccagtagccgatcaactggttgatgctgcatcaggacacaagattttgagttttatggatggtaatgcacgatataatcagatctttttggccgaagaagatatccataagacagcttttaggtgtcctggtgcaatcggcttatttgagtgggttgtgatgactttcggcttgaagagtgctggagctacatatcaaagagccatgaattacatatatcatgatctaatcggctggttggttgaggtctacattgatgatgtggttgttaagtctaaagagatagaagaccacatagccgatttgaggaagagggggattgaggtgactcaaaggagtgttaatgcaatcaagaagattcaacctccggagaacaagacagaactgcaagagatgatcggcaagatcaattttgttagaaggtttatttctaatttatccggaaggttaaggcattatctattgtccagtgaatgcaatgtcatatgcaaagccgatgtggttaaatacatgttgtcggctccgattttgaaaggaagggttggaaagtggatattttccttaactgagtttgatcttcggtatgagtcgccgaaggcgattaaaggacaagctatagccgattttattgtagaacatcgtgatgattcaatcggctcggtcgagattatgccatggactttattctttgatggatcgggggcatgttttgagtttgcttatactatcaaaccttatgcaaccaataatcaagctgagtatgagacagtgctcaaagggttgcaattactcaaggaagttgaagccgatgctattgaaataatgggagattctctgctagtaatcagtcaattggcaggggaatatgagtgcaaaaatgatacattaatggtttataatgagaagtatttttggccgacaatgctggaagattgtttcaggtattacaaaggatgtcaagattgtcagaaatttggagcaattcagcaagcgccggcgtcggctataaatcctatcattaaaccatggccattcagaggttggggaattgatatgatcggcatgattaatcctccatcgagtaaaggacataagtttatattggtggcgaccgattatttcaccaaatcggtagaggcggttcctttgaagaaggttgattttggggatgcgatacagtttgttcaagagcatataatctaccgatttggtattcctcaaaccattacaactgatcagggttcaattttcgtgtccgatgagtttgttcaatttgccaatagtatgggaatcaaactgttaaattcttcaccatattatgcacaagctaatgggcaagctgaggcatctaacaaaagcttgatcaagttaattaagaggaagatttctgattatcctcggcagtggcatactcggctggccgaagcgttgtggtcttatcgaatggcttgtcatggatcaatccaggtccctcctcataaacttgtttatggccatgaggctgttctgccatgggaagtgagaatcggctccaggagaacggaattacaaaatgatttaacaaatgatgagtattataaccttatggccgatgagagggaagatttggttcaatcatggttacgagcccttgcaaaggttactagggataaggagcgaattgctcgacactataacaagaaagtggtgcccaaggatttttcggaaggtgaacttgtatggttgttgatttggccgattgtggagattatgggtaccccatacccacacggcatggttatccgactagtcataggggatagcttatatatatggaatatgtaa

SEQ ID NO: 69973 - DNA, 789 bp, Oryza sativa
  Clone ID: PAT_MRT4530_70590C.1
atggccacggcagctacgacgacgacgggcggcgatgtccagataccgattggacagcaggccaccgtcgccgccaccgccactgccacgagcgatgggatccgggatagccccggcacgtcgagccccttccgtggcggcggcggcagcaccacccccaccccgcagcggccggtgaaggccgggtcctcctcctctccaccaccgccgccgacgacggccatggacaagacgctgtccagtgtagcgaacctcgcgaagctcctgccgacgggcacggtgctggcgttccagtcgctgtcaccgtcgttcaccaaccgcggcgcgtgcctcacgtccaaccggtacctcaccgcggcgctcctctacctgtgcgtcctctcctgcatcttcttctccttcaccgacagcttcgtcggtggagacgggaagctctactacggcgtggcgacggccaagggtttcctcgtgttcaactacgacgctggcagcagcagcgacggcgacgacgacgaccagcggcggcggagggaggtgttcaaggacctccgcaggctgaggatacggtgggtggactacgtgcacgcggtgttcacggcgttggtcttcatgaccgtggcgttcagcagcaccgccgtgcagagctgctacttccccgaggccggcgacaacgtgaagcagctgctcaccaaccttcccctcggcgccggcttcctgtccaccaccgtcttcctcgtcttcccgaccacgcgcaaagggatcggatatggcggccagtccaccaattaa

SEQ ID NO: 69974 - DNA, 1067 bp, Oryza sativa
  Clone ID: PAT_MRT4530_70591C.1
ctatcgacgacatcggatcgggtcggtttctctcttgctgtcttctcgatcgatcgatggctcccacgatggctcccacggcggcggcggggctggcagcgcgcgacgcgtccggccacctctccccgctcaccatctcccgcaggagcactggagatgatgatgtggtgataaagattctttactgtgggatctgccactccgacctgcacagcatcaagaacgagtggaagaacgccacctacccacttgttcctgggcacgagatcgccggcgtggtgacggaggccggcaagaacgtgaccaagttcaagggcggcgacaaggtgggcgtcgggtgcatggtgaactcgtgccactcctgcgacagctgcaaccaggggttggagaaccactgcccaggcgtgatcttcacctacaactccgtcgacaaggacggcaccgtcacctacggcggctactcgagcatggtggtggtgcacgagcgcttcgtggtcaggttcccggaggccatgccgctggacaagggcgcgccgctgctctgcgccggcatcaccgtgtacagccccatgaagtaccacggcctgaacgtccccagcaagcacgtcggcgtgcttggcctcggcgggctcggccacgtcgcggtgaagttcgccaaggcgttcgggatgacggtgacggtgatcagctcgtcgccggggaagaggcaggaggcgctggagcggctcggcgccgacgcgttcgtcgtctccaagaatgccgacgagatgaatgccgcgacgggcaccatggacggcatcatcaacacggtgtctgccaacattccgatcgcgccgctgctgggtctgctgaagcccaacgggaagatgatcctcgtcggcctgccggagaagcccatggagatccctcccttcgctctggttgcttcgaagcacggcgtgacggcggagatcgaggtgatcggcgccgactacgtgaacacggccatggagcgcctcgccaaggccgacgtcaggtaccgcttcgtcatcgacatcggcaacaccctcaaggacgccatcgagtga

SEQ ID NO: 69975 - DNA, 298 bp, Oryza sativa
  Clone ID: PAT_MRT4530_70592C.1
ttactgaagagtgcagtccatcaacttgtggagatagttaaggtttttgctacaccatactccgtgaggaaatacttcacatgaacccgctctatacagagactaggttttcacaaataagatctcaccttaggcacaaggatttccacaagaggatgccttctgatgcactagacttcgcttcactccttttgcaatatttacacagtcttcgttgcactggttttgatgcatgtgcacatcctttctttgatggactgcaatagccccattgtcgcatttcaaacaggcgctcatt

SEQ ID NO: 69976 - DNA, 388 bp, Oryza sativa
  unsure (1)..(388): unsure at all n locations
  Clone ID: PAT_MRT4530_70593C.1
cctgcagtaccgtccgnattcccggttgtcctttctttctttcattttttttattgatgtcttttaccaatttttttttatttttaggaggacaaaacgggggcgccttttattgatgtagagacagacaaacccggcaaccagcaaagcaagcacacatttttttggccgatcgaaatacattccaaaccccgaacatattttggtgccgatcgaccgatggagggatcgctctagaggttgaacatgcccttgatggcgtcccggaccatggctctgaactcgaacacctcttccacgttctcccgggataacccgaattggggggttatgagcggtttcacgaacatcttgcctgtggggaggaactctatccaaagcggcctcg

SEQ ID NO: 69977 - DNA, 447 bp, Oryza sativa
  Clone ID: PAT_MRT4530_70594C.1
atgacccgtgtgcaaaggaaaaccccctcaaaacaccctggcccacctggaagtgggacccacggtgcagctgcctcccacagagaaatggggtccacatccacgggcccactccctgacagcgggccagcctgcctatctagatggagtcagaccgggcacgtggagaacaggggctctgctcgtagtggtcgcggcagcggcgcggcgaccaagagcgggcgggcgggcgttgactcgactcaacttcgggcggcggccagcgaccggtggcgcaacttcaattgggtggcggcctggagtgggcggtggcgcaacttcgggcagcagctgggagcgggtggcgggcgactcgggagcggcaccatccccatccttgcccgacgcctctgccgacgacgaggaggaggtggccgctccccgtgctgtcatccccacgacggctag

SEQ ID NO: 69978 - DNA, 208 bp, Oryza sativa
  Clone ID: PAT_MRT4530_70595C.1
gttaggtgcatttactcctctacaatacatgagctaccaagacggttataatgtggcggaatcctctgaagttggcactgcggataaagaataactaaataaataaataaataaattgcaagcaattgcgttgctgatatgtactagaaaagtttcttataatatcagttgagaatgctaaagacattcctcaagatggagtttctaa

SEQ ID NO: 69979 - DNA, 668 bp, Oryza sativa
  Clone ID: PAT_MRT4530_70596C.1
gagataaaataaggaccacagagggcacaaatggtggcgtgctgtcagaaaaggtataccttcattgtttatccaccccgatacatttcctttctattctttatttttcgttccgtgagtctagcaacaagattgttaggtactgaatagttgatattttggatatgttagtagcagcaatggttgtcgagggtaactgtcaattgctatgagaacttcacctctaatataataggagtgaaagtttcttatcatgtacgttagatcataatgtgcattgctttcctttgattgaaagctaagatgtctgaatgcatccactggaaactttggttatacgtgatgtgaagaaactggccaaatttggggcttgatgtagggtttgagaacgcaaatactcaagtgaaaatgacaaatcttattttcagaaacaaagcagccacgtgttcatcttcacttcgatcagaaaatgatctgttaaacgtgctctcattctgactcttggttttgtttaattataactttcttttcaatgtgcattctatctgttctgtttacctaacagttaggctgatatgctgtggaatatggatgttttttacctgaatcaaatggttgtgtcatacctgtaacttgtgaatcattttattttctattttttgcgttca

SEQ ID NO: 69980 - DNA, 429 bp, Oryza sativa
  Clone ID: PAT_MRT4530_70597C.1
atggtggatggaagggaaaaagcaaaaaggggaagggggaaaggagctttgctccttgccgtttttgggcgagctgagggaggagagagcgcgtgggagagagaggcgctgcctccgcatcttggacgcacgcgagctgtggcgcagaggtgggtgcggcggcagagtgggcgcgggcggctgcgcggcgcaggcgggccagggcgaacggcgaccgagggcggtcggccaccacgcgggagcgcgcgcgcggagcaagggcgcggcggaattcaaaggcggaggcaggaatcggtgccggaacatagggtggagtcaaggaactggttcaaggaagactcggatattttggaatcgagacaagtatttggcgaggattcaaaggaggcgattgaatttcggagacttgaattggaattggaatcttga

SEQ ID NO: 69981 - DNA, 507 bp, Oryza sativa
  Clone ID: PAT_MRT4530_70598C.1
ccgggctgcaggaattcggcacgagggctgaattataagatgctctttgtattcttttatgtatacttagaataagagagagagtaaggaaaaaagagttggaggagttccagaattgtcgctatctctctatttcttttataccttagcaattactttgctctaattgagagtatttcaattaagtaactaagatttatcttgtgtggtatacttcttagttagttcctatttagcttgctggtattgttatcggtgtttactgcgtatcccacagtacgttagaggttggtgtagaggtggcgacagctcccgagatcactgtgcaagcaagctagtgcctgaaggatagcgataggattaaagtttagttttctaaacgaccttgtaccacatcagaagaacgtatctatcgttttgcctgtatttatgttacctataaaaattcgataccttgaatatttccgagtgaaatgctacagtggtatatctgtgcgcttgcagatt

SEQ ID NO: 69982 - DNA, 1065 bp, Oryza sativa
  Clone ID: PAT_MRT4530_70599C.1
atggagtcaagaacaccaagaagttcagttgcaaggagcacctgtaatgttcctggactcgtattaggcttctccaagctctgcaaaatcacaaagatttgtgccgcgcctgaatttgctgacacgaagacagaatttggagattattgtggcggatatgatcagaggctaattatcacaagactgtttgaggaaatcggagctctcaagtcagcctacatcaagctgcagaaagcccatatcccttataatcctccaaagatagccttcgccgacgagatcatcacctccgagctcgactcggtcactgctcttcagagcttatgcagttggaatggcagcgtcgggtcactgatcaacgatcgatggtcgctggtgcaggaactggaagctgagacgaggaagaaggattcagacattatgctgttgagaagagagctggatgtcttggagctgttcaaggttgcatcgacatcggtgcatgatttcgcagagctgatctttagcttgatttcctcatctgatcatcattgcaccaacaatgcagacgaacattcaccatacaagaggtactcgctggaagcttacctgtcacgaacaatgcttgcagtacatgatggtgctgaagatgatgacgaactcgatcttgctcgcttcgatcggatcatgaggtgctgtgaccctcttgacgcgttgatggcgcatccaaactccagcttcgcgagattctgtcgaacaaagtatttagcggccgtgccgtcagagatggaggcagcgatgttcagaaacaatctggacgtgagggcgttcgtgtcgcgaggcgggcacctgaggacgtggttctacagggcgttcgcgacgatggcgaggtcggcgtgggcgctgcaggtggcggtgacggcgcaccggcgatgttgtggccgtggaagtgtgaggatgttgtacgcgaggagagggagcaggtacgcggcggagtacatggacagcgtcgtggccgccgccgccgccgatgctggtcgtggcggaggagatggagttgcgttcaccgtgacgccggggatgaag

SEQ ID NO: 69983 - DNA, 4293 bp, Oryza sativa
  Clone ID: PAT_MRT4530_7059C.1
atgcaacaacagtcacagggaacagctcagcaacgaccgtgggccaatgtgattgctgatgtaatgagggaacggtttgggcttaaaccaaaagagactggaagcttgtaccggcagccttacactgagtggtttgagagagttcctctccccaatcggttcaaagttccggacttctctaaattttcgagacaagatggtgtgtcaacttatgagcacattagccgatttttagctcagtgtggtgaagcatcggctgtggacgctctgagggttaggttgttccagttatctttatctggatcggcttttacttggttttcttctctgccgtatgggtcgatcaatagttgggccgatttggagaagcaattccacagctatttctacagtggggttcatgagatgaagttatctgacttgacggcgattaagcagcggcatgatgaacctgtgcacgagtatattcagagattcagggagatgaggaacaaatgctttagcttgagtttaactgacgctcagttagccgatttggcctttcagggtatgattgctccgattagggagaaattctcgtctgaagactttgatagcttgtcacatctgatacaaaaggtaaccttgcacgagcataggtctgcggaggctagaaaaagctctaagaaggttaatcatgtttgtccttacatgtatgggtcggatgacgatgaggatgattctgaaatagctgcagccaaatgggtgagaagtaaaaaggtcataccgtgccaatgggtaaagagttctggaaagaaagagaagtatgattttgatattactaaagctgacaagatttttgatctgctactccgagagaagcaaattcaactccctgttggtcatacgattccatcggctgaggaattaggcaaaaagagatattgcaaatggcataattctaggtcccattctactaacgattgcaaggtttttagacaacagattcaggtggacattgagggaggcaagattaagtttgatggttccaaaaagccgatgagggtcgatggtaacccatttcccgttaacatggtacacacagctgaccgaacagctgatacggggcgcatgagggattatcaagtaagttcagctagaattataaacaaatatcaaagaaaatacgacaagcaacaggaaaggcatcatgaagaagataatggtggctttgatccttattggggctgtgagttcttcaggttctgttggaatgaaggtatgagactaccatctatcgaggattgtcctggatgcagtgatgttgcagggggttcaagccgattgtacgatagaggcaatcgaccaaaacagacaagagtacctgttcatcaaagattgggcccagtaaaccaacgtggtgattcggaagatgatgaaaataggaagactcaatggtgtccttctgccgatgaggcaaagaggttggcaaaaggaaagagtattgtgacggcaccagttaacatggtttttaccttgccagcagaattcgggatcgatcaagccgatgtcgacgaggtggaagaggaatcggctaagttggttctatcaccagaacatgcggtgttcgagaagcctgaggggacagagaatcagcatcttaaaccattgtatataaatggctatgtcaatgggaagctgatgtctaaaatgatggttgatggtggggccgcggtaaatttgatgccttatgctacgttcaggaagttgggtagaaatgccgaggatctcatcaagacaaatatggtgctcaaggactttggtggcaatccatcggaaaccaaaggtgttctaaatgtggagctgacagtcggcagtaagactattcctaccacccagttgaagatggagaacccaagctattattttgagggtgtcgtggagggttcaaatgtctacactaaggatacggtagatgatctcgatgacaagcaaggtcaaggttttatgtcggccgatgatttggaagaaatagatatacgtccaggtgatcggccaaggccgacatttattagtaagaatttgtatccagaatttagaaccaagctgatagagctcttaaaagagtttagagattgcttcgcttgggagtattatgagatgcctggactcagccgatcaattgtagaacatcggctacctatcaaaccaggggttaggccgcaccagcagcctccgaggagatgcaaagccgatatgcttgaacctatcaaggctgagattaagcgtttatatgatgctggttttattcgtccttgccgatatgctgagtgggtttctagcatagttcctgtcatcaagaagaacggcaaggtgagggtatgcattgattttagagatctgaataaagctacaccgaaagatgaatatccaatgccagtagccgatcagctggttgatgctgcgtcagggaacaaaattttgagttttatggatggaaacgcagggtataatcaaagttttatggctgatgaagatatccataagacagattttagatgtcctggtgcaatcggcttatttgaatgggttgttatgactttcggcttgaagagtgctggagctacatatcaacgggccatgaattatatttatcatgatctaatcggctggctggttgaggtctatattgatgatatggttgttaaatctaaggaaataaaagaccacatagccgatttaagaaaagtttttgagaggaccaggaaatatggcttgaagatgaatccgataaagtgtgcttttggtgtatcggctagccagttcctgggatttcttgtccatgagaggggaattgagataactcaaagaagtatcaatgcgatcaaaaagattaagcccccgggaaacaagaccgaattgcaggagatgatcggcaagattaatattgttcgaaggttaaggcattatttactatccaatgaatgtactattatatgcaaggccgacgttgttagatacatgttatcggctccaatattgaaaggaagggttggaaattggatattttccttaactgagtttgatcttcggtatgagtcaccgaaggcgattaagggacaagctatagccgattttatcgtggaacatcgtgatgattcaatcggctcagttgaaatggtgccatggactttattctttgatggatcgggggcatgtttcaagtttgcttatactattaaaccttatgcgactaataatcaagctgagtatgaagcagtgcttaaagggttgcaattgctcaaggaagttgaagctgatgctattgaaatcatgggggattctttgctggtaatcagtcaattggcaggggactatgaatgcaagaatgatacattaatggtttataatgagaagtgccaagaactgatgaagaaatttcggctggttactttaaagcatgtatctcgagaacaaaatattgaagctaatgatttggcccaaggggcatcggggtataagccgatgatcaaagatgttaaggttgaaattgcagcaataacagccgatgattggagatatgatgtgcatcaatatttacataatccatctcaatcggcttctaggaaattaaaatataaggcgttgaagtacactctattggatgatgagctttattatcggatgattgatggagtgttacttaagtgtttgagtgccgatcaggctaaagttgcaatcggcgaagttcatgaaggaatttgtggcactcaccaatcggcccataagatgaattggttacttcggcgtgcagggtatttttggccgacaatgctagaggattgcttcagatattataaggggtgtcaagattgtcagaagtttgggacaattcaacgagtgccgacgtcggctatgaatcctattattaaaccgtggccattcagaggttggggaattgatatgatcggtatgataaacccaccatcaagtaaaaggcataagtttatattggtggcgactgattatttcaccaagtgggcggaggccattcctttgaagaaagttgattctagggatgcaattcaatttgttcaagaacatataatctaccgatttggtattcctcaaactattacatctgatcaaggttcaatcttcgtgtccgatgagtttgttcagtttgccgatagcgtgggtatcaaattgttgaattcttcaccatattatgcacaagctaatgggcaggccgaggcatctaacaagagcttgatcaaattaattaagcggaagatttctgattatcctcggtaa

SEQ ID NO: 69984 - DNA, 1237 bp, Oryza sativa
  unsure (1)..(1237): unsure at all n locations
  Clone ID: PAT_MRT4530_705C.1
caagcctctagggcgcaggctccggcgaacccaaccctagtccggtagcccccgacgccgccccaccgcgccgacgccgcgcatcctccccgcggccctcggaggcatctcctcgcccgtcgtccctcggcgcctcgccatcgccggcggtctgcctccgctgctcggcggctcgcccgacgcacccacgagtatcttccccttccctggcgtaaaagaaaatctcccgtctcgtctcctccgctctttgcgccgtctcgctgctgaacaggggaggggcggcgatctccatctgccgagcagagcaggagaggggatcctggtcatcatttgttgaaaaatggccacagaagatacttctcacatttctggtagttctgagtcaacaattccattgctagaacagcttgctgaagtatttggcaagctgaaatctcacacagaaacatccttgcaattgcaaaacggcatcaattgggaagatatcaaagcacatttcctgaaccttgagaagtcgtacaaaagtaagtgcgatgaacttgcagagaagcagaaggcattagaagaaaagaaagctgaatcctgtaggcttattgcagagaaggaagctaatgtttctgcaaaagagcgtgctttcctgaaccagtttcaggagctaagggatacagctgtctctgccctttcagaggtgcgacaaaaatataaggtggagcttgctggtatacttgatgccaatggaagcaaagataaaaaggtaagaacctcaaccaatgacatgaatgcgttgtgtgcttcagaggagaatacaactgctagtgggctgggtgaaccatctgaagcttcacctgttgatgttaagccacgtcctgtattgaagcaactatgtgagcagatggatacagcaggccttctgaaatttctttcagaaaattggaaaaaactttctagccttcgtgatgaactttctgctgcactaagatgtgctactgaccctgcacgctttgtgcttggttccttggagggtttcttcccatctgaccatactagttcacctgggaataaacagattattctccaaggccagcgtagaagctgcattattntgatggaagctataacacctgcactagctacgaaggagccaggtgacaaccacccttggagctctgaattagggagctggccaagcgattgcagaagagtggaagagtaagctagctgaggttgacctcgatgc

SEQ ID NO: 69985 - DNA, 724 bp, Oryza sativa
  Clone ID: PAT_MRT4530_70600C.1
ccagcatcggcggcggcggcggcggccacgacgctgtccatgtactccgccgcgtacctgctccctctcctcgcgtacaacatcctgacacttccacggccacaacatcgccggcgcgccgtcaccgccacccgcagcgcccacgccgacctcgccatcgtcgcgaacgccctgtagaaccacgtcctcggaacctcgcgaagctggagttggggtgctccatcaacgcgtccagagggtcacagcatctcatgattcgatcgaagcgagcaagatcgagttcgtcgtcgtcttcagcaccatcatgtactgcaagcattgtccgtgacaggtaagcttccagtgagtacctcttgtatggtgaatgttcgtctgcattgttgggacagcgatgatcaggtgaggaaatcaagctaaagatcagctctgcgaaatcatgcaccgatgtcgatgcaaccttgaacagctccaagactgcactaggcgtcgtcaattttttcaggacaatggagtaatccttatgatggttaactgatggtttgctgctactgatctgtttattcagtctcgaattcgcactcttcagaccatccagctctcttctcaacagcataatgtctgaatctttcttcctcgtctcggcctccagttcctgcaccagcgaccatcgatcattgataagtgacccaacgctgccattccaactgcataagctctgtagagc

SEQ ID NO: 69986 - DNA, 1522 bp, Oryza sativa
  Clone ID: PAT_MRT4530_70601C.1
ggagagagagagaactagtctcgagttttttttttttttttttttttttttttatactacaatatacaacatgttcgacattcttttttcagtacaactgcatggccaaaattaaagcgaactctagtacagcacaatccatctgctatctgaatttgggatcagtttcatcagaaatagtgtcatgttgatcgtgacagaggagcactctgcacgccaccatggtctcacccaccttcatccccggcgtcacggtgaatgcaactccatctccttcgccacgaccagcatcggcggcggcggcggcggccacgacgctgtccatgtactccgccgcgtacctgctccctctcctcgcgtacaacatcctgacacttccacggccacaacatcgccggcgcgccgtcaccgccacccgcagcgcccacgccgacctcgccatcgtcgcgaacgccctgtagaaccacgtcctcgggtgcccgcctcgcgacacgaacgccctcacgtccagattatttctgaacatagctgcctccatctctgacgacacggccgctaagtactttgttcgacagaacctcgcgaagctggagttggggtgctccatcaacgcgtccagagggtcacagcatctcatgattcgatcgaagcgagcaagatcgagttcgtcgtcgtcttcagcaccatcatgtactgcaagcattgtccgtgacaggtaagcttccagtgagtacctcttgtatggtgaatgttcgtctgcattgttgggacagcgatgatcaggtgaggaaatcaagctaaagatcagctctgcgaaatcatgcaccgatgtcgatgcaaccttgaacagctccaagactgcactaggcgtcgtcaattttttcaggacaatggagtaatccttatgatggttaactgatggtttgctgctactgatctgtttattcagtctcgaattcgcactcttcagaccatccagctctcttctcaacagcataatgtctgaatctttcttcctcgtctcggcctccagttcctgcaccagcgaccatcgatcattgataagtgacccaacgctgccattccaactgcataagctctgtagagcagtgaccgagtcgagctcgtaggtgatgatctcgtcggcgaaggcaatctttggacgattataagggatatgagctttctgcagcttgatgtaggttgacttgagagctccgatttcctcaaacagtcttgtgataactagcctctgatcatatccgccacaataatctccaaattctgtcttcgtgtcagcaaattcaggcgcggcacaaatctttgtgattttgcagagtttggagaagcctaatacgagtccaggaacattacaggtgctccttgcaactgaacttcttggtgttcttgactccattccggctgagagggaggctgggactgaccagtgaaatgctgaattgaattggtgcagagtgaccaagaggatagcctggcctcgtgccgaattcctgcagcccgg

SEQ ID NO: 69987 - DNA, 1709 bp, Oryza sativa
  Clone ID: PAT_MRT4530_70602C.1
atgctacccaccgacttcgacatcaaggtgttgattgagcggcacgaagccctgacggacgacgtgcaggagatgctgcagcatcaacgccggcgacaccagaagacggcgagcggcggccgggagcggatagccaccgtcgaccacctcaggcgcctctgcatggaccactacttccaagacgaggtcgacgacgccatggacgcctgcctgctcgaggagctcgcccatggcggcgacctgcttgacgccaccctcgccttccgcctcatgagagaagctggccaccatgtctcagcagatgaggttcttggaagattcacagatgataatggcgaattcaggctcgattacagaaaggacatcagagggttactcagcctgcaagacatatcacacatgaacattggacaagaagcctcactctgcaaggcaaaggagttctcaaccaggaaccttgaatctgccatcaactacctcgagccaaatcttgcaagatatgtgaggcagtcgctggatcatccctaccatgtcagcctgaatcagtacaaggccaggcaccatctcagctacctccagaccttgcctatccggtgcactgccatggaggagctcgcacttgcagacttccagctcaacaagctactccatcagatggagatgcaggagatcaaaagatggtggatggacctgggattggctcaagaaataccagttgccagggaccaggttcagaaatggtttgtgtggatgatgacagccatccagggtgcctccttgtcaagatgcagaattgaactcacaaagatcgtctcctttgtctatattgtggatgatatttttgatctggttggcacacgtgaggagctctcctgcttcactcaggcaatcagaatgtgggaccttgcagctgctgattccttacctagctgcatgagatcatgcttcagggctctacacacagttacaaatgacatcgcagatatggtcgagagagaacatggagtaaaccctatcaatcatctgaagaaagcttgggcaatgctgtttgatggattcatgacagagacaaaatggttgtctgctggccaggttcctgactcagaggaatacctaagaaatggagttgtcacctcaggagtgccacttgtatttgtacacctgctgttcatgctagggcatgatgtgagccaaaatgcagcagagtttgttgatcacatccctcctgtcatctcctgcccagcaaaaatcttgagactctgggatgacctgggcagtgccaaggatgaggcacaagaaggattggacggatcgtacaaggagctatacctcaaggagaacccggggctcgccgctggcgaggcggaggagcacgtgcggcggctgatcgcgggcgagtgggaggagctcaaccgggagtgcttctccgctagccccagtagatcgtcgccggcgacgaccttccccgccggcttcacgcaggcggcgctcaacgccgccaggatggtcggcgtcatgtatggctacgacggcgagcggcggctccccgtcctcgacgactacgtcaggatgctgctcttctgaattcgatcgattgattcgacctgaattttaatttcatccatgtatgaacctcatcatcgtccatgcataatggcgtgtagagattaattgtggattaggtctttgtaaataggattatagttagt

SEQ ID NO: 69988 - DNA, 381 bp, Oryza sativa
  Clone ID: PAT_MRT4530_70603C.1
atggtggatggcagcagacttgaggaggacagtgggatgtctcctttgacgttgaccaggcaaccccctctctctgtggacgtcctcccctcctctgtggggagctccattggaggatggagaaaggaggtcgatggacagcggggtggaggtagcccagcagcccagctcagcgttgcgagggagtggcagcgggtagagggcgatggcagcggggtgaagtggaagtcttgcggcggcaggactggaagtcggtcggcggtggggcgttggaccggtgcggtggaggccacacgctaccgatgtttggctggaggtaacagagttggcgggcgacggaccacagcgacggggcgaagagggtctcaggcgaaagcctag

SEQ ID NO: 69989 - DNA, 624 bp, Oryza sativa
  Clone ID: PAT_MRT4530_70604C.1
atggccgcggacgccgccaccgccctcttgctgcggtgcgtggtgatcaccacgctcctgctgccgcgcgcgatcgcggcctacgtctacggcgacagcggcttcggcatcccccgcaatagtaccgagcgcttcctctacctacagaaccaggcccgcgccgacgtcggcgtcgcgccgctcgcgtgggacggcacggtggccgcgtacgcggagaagtacgccgccgcgaggaaaggtgactgtgatctcaagcactccggcggaccatacggggagaacatattctggggcagcgcgggcgccaactggacggccaccgacgcggtggcctcgtgggcctcggagaagcagtggtacaactgcagcgacgactcgtgcgacgctcccggtgggcgagggtgcacccactacaagcagatggtgtgggcgaagacgaccaaggtcgggtgcgcgtccgtgagctgcgacgcgaaccgcggcacgttcatggtgtgcgagtacgatccaccaggcaacgtgccgggtgtccaggcgtacgccggatgcggacacttcaatcaaacaggtcgcttcacagctctagatccacaaccaataaacgacagtacacggtacacctag

SEQ ID NO: 69990 - DNA, 1167 bp, Oryza sativa
  Clone ID: PAT_MRT4530_70605C.1
atggcacaggcaccagatctgcggccatgtatgacgacggacctcctcgctctccccgtcgtgctccctgtcggcttgtcttctttcgtgctctgcgaggacggcgcctcgggcgccagcgacgagaccgtcgccccgtgctgctcgccgctgccgttcgaacgtcgtcatccatggtcgcggagtcctgccgccgcaagacttccacttcaccccgctgccatcgccctctacccgctgccactccctcgcaacgctgagctgggctgctgggctacctccaccccgctgtccatcgacctcctttctgaatccggcaaaggaagcccggaaatggacgatcctcgttgccgaatccggacaaggagagccaggaggtcggccacaccgctttggtggcctaagccatcccttgccgtcaagccactacctccatcctccaatggagctccccacagaggaggggaggacgtccacagagagagggggttgcctggtcaacgtcaaaggagacatcccactgtcctcctcaagtctgctgccatccaccatggccagacgacgacgagggtctacctctgctcctggccatctccggctgccctcagctgctgcggaggctgccgcggcgacggcggcacctcgcgagatgctaggaccaccggtcgccgccgctgctggccgcacctccagcctctgctcttgccggtcggccacgcctcctgccgcttctgcctccggcccgacgcgcctcaaccgccactactgccaaccggccacgccgacgccggccacccgctgtcgccgcccttgccaccgcgagcgagccctgttgttgccgacgccgtcgccgccactgccttgaggttgccccgcccgatctggccgctagggggccagatccgcctccgaaggggccggatccgcctccggcgcagccggatccggcccgccgtcactatcccgcagccagacgcaggtctggtggccttcaccgccgttgccctgggtggctcctctggccgcccccgccggcgggaagcaaagagccccgccgccgccgtccttgcggccgcgcagctttgccggtggccgctcaagcggcggcgaggcggaggaggaaggtgggggagagggggcagccggagctcatcgcctcccgagtag

SEQ ID NO: 69991 - DNA, 1542 bp, Oryza sativa
  Clone ID: PAT_MRT4530_70606C.1
atggtgtctgatgagtggaaaaatagtgagtggagggaagaagaggaccatgcgttcacatatgattgtttgacaaacagaaggtggtggagggacatggaattggtgttgacagctgtcaaaccaatctatattgtacttcgctttgctgatcaacaaagaaatgcaacgatttctggatttcttccaaagatgatttcagtcttaggtgacatacgtgctaatttatgtcaaaagcaaaatcttcgtgatagggtactacaagtagtcaacaagaggcttcgttatcttctcaacgaaactcttattactgcagctgctgcacttgatccgagagtgctatatacgtcgaacatgggaaggcaacgcaattcaagatttgctgtaacactagccctcaagaagattgcaagatcgtcgttggaggcctctaatgcaattgaacaatttaacttcatcgcaaagagagggttgtttggaggagatgaggctcggcggtcagcacttaatggtcgaatgagtgcagctgagtggtgggattcatatggaggagagcacaaagaactacaaaatcttgcacgccgccttgtttcacaatgcctgtcctccagtggctgtgagcggaactggagcacgtttgctttggtgcataccaaagtgagaaatcggctgggatacgagaagatccataagctggtctacgtgcactacaacttgaagttgcgcattcagcatttccaaaatgacatgcaacttcttgatggtaacccaatcatggattggttgtgcaactctaggagtgaatctgtgcccattcttgatgaatttgatgacaatgaacctgaattgtcgagcccaagaaaagcacgtttggaagatgttgaagaagatagcgcagaagattatgtgtcagattctccacgaggtagcccgacttatgctgaatcgggggatagtagttcaagtgatggtgaagctaatgatgatgtcgatgctgttgttgatgttggtagtgaggaggatcatggtgaacctactgctaggggagcacctgttggtgagcaaccagccccactccacccaaaatcaacaaggaaaaggaaagtttctgtcaaggttcttttagacaaaacttctaaaaaaaaaagtgatctaagcctccaaggactatggatagatgtactggaccagaatttgagcatatgcccttcctctattttgcccattggttcttatgcttatataaatctatattgtcagctctccacatgtttctggatcactaacaagaacccaggaagatgtccaatagcatctcagaaaactgacaagatctcacgaactaacacgagaaaatatggtctttatgcactgacttcgggtgttcagcgagcagggcgttgcagtcttgctgagctaccaggtctacttcagtatgaggaagcagtcaaccaacaacgtcggcagcaagcacatgctggaaatgagactgttaatcttattaaatcaaaaaaaatagttcatgttatgccatttatttag

SEQ ID NO: 69992 - DNA, 453 bp, Oryza sativa
  Clone ID: PAT_MRT4530_70607C.1
atgcccccagaggagaggaggggacgggctcaccggccggcgacgtacaaggaggccatggtggcgaacatggcgagcatcatggcggacatcggggaacttgccgccgacgccgccccgcgccgcgggcccccctcttggatctgcatctcgcgggatctcgtcccccccaccccacccacccggatccctcctcctcctcctaacccgcgcgtcgcgtggcctccgggcgagcgagggcttcacggcctcgccatggacgcctccggcgccgccgagatccccgcgctgccttccagaagcctccgccctccgccaccgactggattccagaagattctagaaggggttggcggtggcggtggaaggggagagagaaaagccgcaactttaaaggtcaatgctagaaataaactacgacgaatcaaaatcaactctgaaattaagatttaa

SEQ ID NO: 69993 - DNA, 728 bp, Oryza sativa
  Clone ID: PAT_MRT4530_70608C.1
ccaacaaacaaaagaggaaaaaaaacatatacacttctagtgattgtctgattgatcatcaatggctagcaaggtcgtcttcttcgcggcggcgctcatggcggccatggtggccatctccggcgcgcagctgagcgagtcggcagatgaggttcagggacaggcagtgccagcgggaggtgcaggacagccccgctggacgcgtgccggcaggtgctcgaccggcagctcaccggccgggagaggttccagccgatgttccgccgcccgggcgcgcttcggcctgcggatgcagtgctgccagcagctgcaggacgtgagccgcgagtgccgctgcgccgccatccgccggatggtgaggagctacgaggagagcatgccgatgcccctggagcaaggctggtcgtcgtcgtcgtcggagtactacggcggcgaggggtcgtcgtcggagcaggggtactacggcgaggggtcgtcggaggagggctactacggcgagcagcagcagcagccggggatgacccgcgtgaggctgaccagggcgaggcagtacgcggcgcagctgccgtcgatgtgccgggttgagccccagcagtgcagcatcttcgccgccggccagcactaggcttagctggcgtgcctcatagctagtaggatcacgccgttgctggggtgcatgcgccgagatacgtgatcagcggccgaccatgaataatgaaatgttttgg

SEQ ID NO: 69994 - DNA, 1900 bp, Oryza sativa
  Clone ID: PAT_MRT4530_70609C.1
tttttctcttttattgtgggacggagagagtaagagttacttaggtgaaaagacttcagctgaagaaaccaccacattagatttagctgaagaaaccaccacacttttaaggcttaaccacgtgatcacagctgcaataatccggtggctctcttcacatcaaccatgggataattaaccttcggactgactagcaattcagtcacaaaacacagtgcacatgttatcagaagttcacatatcagtacgagaattcgaacagagactggtccgagatattcttgccaagctaaaatagacgggcgccatctcaggccttggaaaacataaacatgttatgtagcatgcatatatacacacatcgccggataaatacgctagttaaaagctacggtcttcttctctcggcgtatgcgtccacctcgtcattaggaacgtgacaacaacacgtttaggccgacttcgcgaagccaaccctcatcttgccgtagtcgaacacggtatggtaggcacccatgaaaacgtcacccaggatccagagaggaccacggggaggagggatgtccatggctgtgaatccactgatgcactgggcagcagctccttcaccaaccttcagaatatactcttctggcttcagtgcaaactttttgcctccaatggtgaatgaaatctcaggcatggatgcaaggctgccacagtccacagatgattctcccattggacttgggagcttgtcacagagctgattaatgtagttcaggatgagatcctgagtcttgttctgtgcaagttggttctgcatccatacaacagccatctcacaggcattgcacatgggaccgctttggagagcgagtcggagatgaggttcagggacaggcagtgccagcgggaggtgcaggacagcccgctggacgcgtgccggcaggtgctcgaccggcagctcaccggccgggagaggttccagccgatgttccgccgcccggggcgcgctcggcctgcggatgcagtgctgccagcagctgcaggacgtgagccgcgagtgccgctgcgccgccatccgccggatggtgaggagctacgaggagagcatgccgatgcccctggagcaaggctggtcgtcgtcgtcgtcggagtactacggcggcgaggggtcgtcgtcggagcaggggtactacggcgaggggtcgtcggaggagggctactacggcgagcagcagcagcagccggggatgacccgcgtgaggctgaccagggcgaggcagtacgcggcgcagctgccgtcgatgtgccgggttgagccccagcagtgcagcatcttcgccgccggccagtactaggcttagctggcttgcctcatagctagtaggatcacaccgttgctgtgttgcatgcaacgagatagtgatcaaaacaaataatgaataatgaaatgttttgaaaacaaaatagctggtgataaaggccagtgtcgaagatgacgtgaatttctgcggcggagtgccgacgccaatctccccgaagtactgcgcgttcatgtagttcttcagcgccacgatgtcgccctcacccccgccgccgccaagggagttggcgccgcggaggcccagccggcgcgccccttcctcgccggagagtcgcgcggcgacgcggctgttctcgtcgatcgggcgcttcttcagcgcgatccgcaccaaaccctccgccgccgaagcggggaggagggcttggagcagcacggccgcgaggagcaccaaggccacgctgcgggttcccatggctgcgatcggaaaacgggaggagcagcagcagcaacagcaacaaccgacgggacgcgtaggaccctgtccggtactatatatgattttgtgcgttctggccaaaacaaacccagaac

SEQ ID NO: 69995 - DNA, 1966 bp, Oryza sativa
  Clone ID: PAT_MRT4530_7060C.1
tctgaactcaaatcaattccctcacgaaatccccaaaaatccccaaatcctcacgcggccactcgattggatcatggcggccaacgatcggctctaccctccgatcgacccgtacgccctggagccaccgcagttcggcgacgacgcggcttgcggaggcggtggcggtggcggcgaggttagggttcgtgacccgtcggcggtgatgtgggacgaggagcccgaggcgtccccctcctccccggaggagccggtgactgagggaacccacacatttgagcaagggccaaaggttcatcttgctgaaaataacgtggtaggcagtgctggtgttggtgatgtctatgaatacagcagggaaatgaccaccatgcaggagttagtagaaaacacttactatgattgtgctcttcgtgatcaaactggcatgtgggtacctccatcggttccaccgatgacaaagcatgaccacgaggagtggcaaaagggctttggtgctaatggtgggtacttcgctgaagaagatttgtgggatatagatgaagaaaacaaggagatgacaatgtgggatgtgcttgctgcgatggtttctgcgggaaaagataaagtattgtctgttgtatcatatgatttcggaaggcaaggcatgtctctgatttcacatttgcttcttgaagaggcttgtaaggataaggctgatacacttgaagatgctagtgttggtctcgaacatgcactccttgaggcagaaccaacagtctggctgcctgacagtgctgctccttcttgcatgctttgtggagctcgttttcatccaataatttgctcccgccatcattgtcgtttctgtggtggactattctgtggtggttgctcaaagggtagaagcttgatgcctccaaaattcagcacttcagaacctcaaagggtttgtgatgtttgtggagtacgtcttgagtgtattcagccttatttgatgaataagatcagccgtgcttgtcagattccaacaaatgatttgacagacctgagcaccttgaggtcgtggttaaacttaccatgggcacgcacgatggaatatgagatatacaaggctgtaaattctatatatggatattttaaggttggaagtttgaaaccggagaagtcaatccctgattcgattcttagacaagcaaaaggacttgctataattactgtggtaaatgttggaatgatggtcacatacaaaattggtactggattggttgttgctcgaagggcggatggttcctggtcacctccttctgccatctctacttatggtgttggatatggagttcaggctggaggtgagttagccgactacatcattgttctgaggaatactgatgccatcagaactttcagtggaaatgcacacctgtcagttggggctggcattagtgcttctgctggtcatcttgggcgagtggcagaggctgatttccgtgctggtgatggtggttatgcagcctgttacacatacagttgcagcaaagttaaaagaaagccagcagccaccgggttggtcagctcgagcgctgatgccgatgaacgcagcagacagcgcaaagaggagagccacgccgcctggagctccccgacgccgaccttgaagcctcgtcgagctccaccatggaagcagatcgagcgatggcgagctcgccatgcatgcggtgtggttgcgctactgccactggtgctgggtgtagcccgagtccgggtggaagaagaccgtcacgtagccggcgaggacgatggtgttgaatgccgaccgcgtgtatgagtccctgtgccggcgtccatagtgaaaccgttccaccgtcaagcgtgcatcaccgacggagacaagctgctcgcggcgcgcttcgtcatcttggcgatcatcactggcggcaacgagctgctcgccggctacgtgatttgcagatccggagattcccat

SEQ ID NO: 69996 - DNA, 238 bp, Oryza sativa
  Clone ID: PAT_MRT4530_70610C.1
acgcgtacttggcgggggcggacaccacatcggagaggcaccacgagagcgcgtgcatgctctcctcgctctagctcaccgccaccaccacgcgccgcggcgatcctccttctactcctgcggtgacgctctacatggctggcgaagtagttaactctctggactcttatgtggtttcaattgaaggctactatctatggggacaatctgacactgcgtatggctaatgctgaataga

SEQ ID NO: 69997 - DNA, 766 bp, Oryza sativa
  Clone ID: PAT_MRT4530_70611C.1
gtggaatctcctcccgtcccatctcctctccaccggcgatgcagcagatgaggtccgccgccgccgccccctgctccctcgccgccatgctcctccgccgcttcgcctacacctcctactcctcctcctgtgggcccatccgccgtcacgccgccgttgccctctcctccaccaccaccaccaccaccaggttcgccgcctggtcccctcctcctccttcgggcggcgccaggagcagggggttcgctgcctgggcgtcggcgcccgggccggcggggtccacggattcccccgccatgcaggcgctggagaccaagatcaaggagcagctggaggcggacacggtcaccgtcgtcgacacatctggcgacggccgccatgtctgcatagatgtagtttccaaggtattcgaagggaagtctgccgtaaatcggcagagaatggtttacaaggctatatgggaggagctccaaagcaccgtgcatgctgtggaccaaatgacgaccaagacgccttctgaggctgctgccaaccagtagcaagcatctgcttgagataaatttggagtgccacagtgggaactgttgtactgggacctgaccattgccgagagggatcacgattctttatatgtacacaactgaatggttaatattttttttttgatacgattggcatggcttcaagcgttcagaaatatattctatggtagtcttaggatttacctttcagatttccagggcaggaaaaaaaaaaaaaaaaaaaa

SEQ ID NO: 69998 - DNA, 464 bp, Oryza sativa
  Clone ID: PAT_MRT4530_70612C.1
cccggcctcgacccaccgcagtccgagcactttgtctacctgagggccgcgacaaaagattggggggggattcttaaaatgacggggctcctggacccccacctgtccatggatagctgcaccatcgatggctacacggtccccgtcggggtgcaggccctgatcaactcctgggccatcggcagggacacgcgctactggggcgacgacgctgaggagttcgtccctgagaggctcatggatggcggcagcgcccttcatgtcagctctcaaggggagtgacttccagttcctgccattcggctctggtcgaaagatgggcgccggggtgaatctcccgatggtcaccggagaactaatgctggcgaacctcgggcatccgtttgactgggatctaccaccggggcaagaggggcgcgacactgaagggtcgcaggtgttccggctaggattccccccgaaaa

SEQ ID NO: 69999 - DNA, 837 bp, Oryza sativa
  Clone ID: PAT_MRT4530_70613C.1
atgacttatttgcccttagacttgaaaggaagggttggagatggcagcagcggcggacgcaacgacggcgatgaccatcgacttcctccgtacgcgcgcctcctctccaagcgctccgtctcccacttcgcctaccaccgggggctcgctgtctccacgctcctcgtcgcctcgctcgccgccaggggcctctctttgccaccgaccatctccatcgtggccgtcgggagcgaggtcctcgagtccggggacgccccctcgcggccgtcggccgccaccgtcgaacctgcgcccagccgccgcacagcgccggtcgccggcctcgccacgccaccccgcccttcctggagcacggacgaggacgccaccgccgggaaaggggtggactgggaagaggagccgctggggtttgaggtgtcgacgacgccgatacccgagctgccggacccggagatgacgactggccgtcccccgctagtgtcgtccccccgccgccgcgtcgaaccgcctccacggccacgtcggggtgcacgacggccttctcttccaccggcgccgacgtctccgccgagtcgagccagcgacaccgtcggctgcctccccatccagcgcccgaccgcctcctgcctagcgctccatcgacggtgctccccggtcgtcccccgacccatgccactgcaatcagacaccgcccgcgtcggcgcaccggccgtctccaccgcgccatgcaccaggcgccgccgtgcccggccgtcgccgcttatgtcccgacgacaacagagacacggtggttgcgacgactgtggtacaaaacttgaccagaacgtgaaactctaa

SEQ ID NO: 70000 - DNA, 177 bp, Oryza sativa
  Clone ID: PAT_MRT4530_70614C.1
atgtcaaatccaacggtggctggctcgaatgctcgatcagtactgcttcatcagttttctccttttcctttcggcgatttattgcgggtacggatgaatcgatctagtgggaatgagaaaaatttggaggaattttgctggattattggaggaaccgaaggaatttcaccagaattt

SEQ ID NO: 70001 - DNA, 207 bp, Oryza sativa
  Clone ID: PAT_MRT4530_70615C.1
ggactaaaatttatcttcacacaaatataagaacagcacaggcgacacagtgttatgcaaagacgggtacaagtaggcttgcagggagctaatatactattgattacaagactcacattgtgatgcttggagaggctgcttgctgggtgtaagggcaatgcgaacaccagttcagacatcatacgatgacggtagactactgagaag

SEQ ID NO: 70002 - DNA, 2913 bp, Oryza sativa
  Clone ID: PAT_MRT4530_70616C.1
atgggggattacaaacttggaatggatcctgctgggctgtcacatcctgctgggctgtcacaattcattgtctgggagggctgcaacaggcagaccaagctgcaatgtagcagtgacgagttctttgagattcctaatttggatggatgcagcttgtggtatggtgatcttatgaacttgcaggatggttatgatgttcatggtgcaggaactctatgccttcgtctggcagcgtcagaagtagaatctggaagaaactcaggctgctgcatccaaggggaagaaaagatacttatctacgagtacatgccaaataaaagcttggatttcttcctctttggtgtgttctcttttcctttcttaattggttacatggctcctgagtatgccatgcaaggcattttctcggttaagtctgatgtgtttagctttggggtgttgcttttggagatcgtcagcggaatgagaaatgcaggatcccaccgacgtgggcgctctcttaacctccttggtcatgcctgggagttatggagggaaggcagatggtttgatctcgttgatccatcaacacgtgatgcatatcctgagcatagggtactgagatgtgttcatgttggcctgatgtgcgtccaagagaacgctgttgatcgtcccactatgagcgatgtcatctcaatgcttactagcgaaagcatcaccttacctgatcctaggcagcctgctttcctctccattgtgcttccagccgaaatggatgcccatgatggatccttttctcaaaatgcaatgacaattactgatctggaggatgggcagaccattgtgtctgcaaatgagacattcactctcggcttctttagccctggaacttctacatatcgaggcagctcgttcacagtagcttatggatcaggagcaaaagataccgaagcaactatactggattctggcaaccttgtcttgaggagtgtcagtaaccggtcgaggctgagatggcagagctttgactacccaactgatacatggctccaaggaatgaatcttggatttgttggtgcacaaaaccagttgctcacttcatggaggagctcagatgacccagcaataggagactattcttttgggatggatccaaatgagaagggtgatttttttatctgggagaggggcaatggcaactcaaactccttgaacgaatggactttgttttacaccagtggcttgtgcttgggagctggccagagggaagctgcaaagcatatagtccatgtggagcttttggcatctgtgccggaaatcaagactggcaaaaccgttgcaaatgcccaaaaggatttaatccaggagatggggttggatggtctagtggagataccaggagaggatgataagtgcagcttgtggtatggaaatattatgaacttgagggagggggagagtggtgatgcggtaggaactttctatcttcgtctggctgcctcagagttggaatcaagagatgcaacatgtaaattttcgcttgaaaataaacttggagaggggggatttggtcctgtctacaaggatgtatgcaacgcttgtttccgtgagcttgaagatcagctggttgcgtgctttccagagaccgtgcgaacaagcagcaaagcatgcaggccatcccggtttctggtgttctggcaaggcatgggaactatggaaagaaggaaggagagtcccatcaatcgacctaccatgaccgagataatttcagcgcttgataatgaaagcaccaccctgcctgaaccgaagcagcctgccttcgtctccgctgggatttggactgaagctggcaacaagtgtcgcgatggtgtcaaaaccccgcctgctggctcgtgcaaccttcaaacgagagttacaaaaccagagattaaaggactcttcgctcacgggcaggcattacggcaacccaatcttggagagaacgaccccaccatagttggcaagattccgggcaagcgaccagaatgtgatcgatgctttcgtcgtgttgatcacagagcacacaacgataaggatgcggcaaccctcgagatcacagacgacttgagaggaagggttggagatggcagcagcggcggacgcaacgacagcgatgaccatcgacttcctccgcgcgcgcgcctcctctccgagcgctccgtctcccacttcgcctaccaccaggggctcgctgcctccacgctcctcgtcgcctcgctcgccgccagggggtgggacctgcgccgccacatggtcgtcggcgccccggcgttcgccctcctcttcgccgcctccctcgccggcgtggccaacggcgacatcccctcgctcgccgccgaccccgccgccgccgcatcccctcgctcgccgccgacatctctcctggcctctctctgtggcgctctctctagcctctctctgccgccgaccatctccatcgtcaccgtcgggagcgaggtcctcgagtccggggacgccccctcgcggccgtcggccgccgccgtcgaacctgcgcccagccgccgcacagcaccggtcgccggcctcgccgcgcctccccacccttcctgcgcttgtaggagcgcggacgaggacgccaccgccgaggaagggatggactgggaaggggagccgctggggttcgaggtgtcgacgacgccgatacccgagctgccggacccggagacgacgactggtcgtcccccgccagtgccgtccccccgccgccgcgtcgacgacggcaccgccctgctcaccgccgcgtcgaaccgcctccacggccacgtcggggtgcacgacggcattctcttccaccggcgccgacgtctccgccgagtcgagccagcgacgccgccagctgcctccccatccggcgcccgaccgcctcctgcctag

SEQ ID NO: 70003 - DNA, 344 bp, Oryza sativa
  Clone ID: PAT_MRT4530_70617C.1
cttcgggggaacaaaagggatatatatttagggatattgctcccacagggcatgaatcatgaatttgaccttggcgaacagtttgctaatgggcccatcagcacatacatatgtaactttttagaaaacccaagaaggtttttttgggaggcatacaaaaaaaaattgagggggattaatcgcaatgggcatgccctttacccgttagaaaagggttaacatacatgcatgccaaattttttagctttatggaccacttttaattgatgaccacctcattgtcggcgttaaatctctccatggggcttagaatccttggaactgagggggcggaagtaaagccc

SEQ ID NO: 70004 - DNA, 2807 bp, Oryza sativa
  Clone ID: PAT_MRT4530_70618C.1
ccacgcgtccgaaaaccctaacccctcctcgatccaagcagctcgacgggctcggcggcgcgcctctcgcccggcgggtctttgtccgaaaaaggcatgaccttggccttctaattggaaaggtgtgaagcaattaagtatggcttcaagggcggtcatcagaagaaggaagtatcttttggatcatgttaacgcacctaccctctcattgtcccccttctctaccttccaacatggaagatctggttctgaggatgaatcaagaatcggacagcgatttcttgagcaaagctctggggattccaaatgggagcaagggcagtatggtgtgaaattgataaagggagatctactagcccttggtaatgggcttctgcggcgcccagcccatgggatttctctacctgcttatggaattggaaggaaggaatttgggttgcctatgggtgctagacatttgctgcagtcagtccgcacagcctcaactgcaacagctgggcaacctaagttggatattgaagatgaacagagtgaggatcagaaacagaacaaaaggaaaaaggaggcatccccagaagaatgtgatcaggctgtggaaggcctaagcagtgcaaaagctaaagccaaagctaagcaggtacaagaatctgtaaaggctggccaatcaattgtacgaaaattctgggcgaggcttctgggtattggtcctgctctccgagctgttgcttcgatgagcagagctgattgggctgcaaagctgaagcactggaaggatgaatttgtgtcaacgctgcagcattactggttagggacaaagctactctgggcagatgtgaggatttcgtcaagattactggtgaaacttgctggtggaaagaacctttcaagaagagagagacaacaactgacccgtacaacagcagatatcttcaggctggtaccttttgctgtgttcatcattgttccattcatggagttcttacttccagtgttcctcaagttatttccaaatatgcttccctcaactttccaagacaagatgaaagaagaggaagcgttgaaaaggaaactgaaagcaagaatggagtatgccaagtttttgcaagatactgcaaaagaaatggcaaaggaagttcaaacatcacgtagtggagaaataaaacaaacagccgaagatcttgatgaatttttgaacaaggttaggagaggtgaacatgtctcaaatgatgaaatcttgaacttcgcgaagctgtttaatgatgagctgactttggataacatgagcaggttaccattcttaatatacttaccacgcttggtaaacatgtgcaaatatatgggtattcgacctttcggtactgaccactacttgaggttcatgcttcgcaaaaaactgcaagacattaagaatgacgataagatgattcaagctgagggtgttgagtctctctctgaagaggaacttcggcaagcctgtcgtgaacgtggtcacctaggtttgctgtcaacagaagaaatgcgaaaacagctccgagattggttggatctctcacttaatcatgctgtgccatcctctcttctaatactttcaagagcttttaccgtatctgggaaaatgaagcccgaggaggctgttgtagcaaccttatcttctctaccagatgaagttgtggatacagttgggaccgtattgccatctgaagattcggtttctgagaggaggagaaaactggaattccttgagatgcaggaagaacttatcaaggaggaagagaagaagaaagagaaagaagaaaaagcgaaacaagagaaagaagaaaaggccaaactcaaagaaccaaaggctgctgaagaagatttggctttgaaggaaatgactggtcctactgctagggaagaagaagaactgagagaagcaaaacagcacgataaggaaaagctctgtaattttagtcgagcactggctgtactggcatccgcatcgtctgttagcaaggagcgtcaagagttcctcagccttgtcaacaaagagattgaactgtataactctatgcttgaaaaggagggtacagaaggtgaagaggaagctaagaaagcttacatggctgctagagaagagtcggacaaggctgctgaggttgatgaagaagaaaaggtctcatcggcgctgattgagaaggttgatgctatgctccagaaattagaaaaggagattgatgacgtggatgcacaaattggaaaccgatggcaaattcttgatagggatcttgatggcaaggtgactcctgaggaggtagcgtcagcagcagcttatctgaaggatacaataggaaaggaaggcgtccaagagcttgtcagcaacctctctaaagacaaagatgggaagatccgtgtggaagacattgtgaagctggcatcacaaacagatgaaaacaatgaagatgaggaagaaggacggcagtagatggaaatgcgtctggaagctttttggcctgttgagattgataccgtatcatttcagtcgaggcgaaacctttctagtatctcagctacttcatggctgtgtcgtgtgtaaatcaaaagcgacgcggccattttttgtgcatctcttctctgagcagagtagcaaaaaatgatcagctcgcccgtgactttgccagggaagcttgctgtaaagatgtggactttcatatagttaggctcagcgctctagatcggcaggtaaattgcaaccgaaatttcaactggttgctgtggaagtggaaatacgcattggctggatttggatgctaaaaaaccaaacccag

SEQ ID NO: 70005 - DNA, 294 bp, Oryza sativa
  Clone ID: PAT_MRT4530_70619C.1
atggaggcttgcaacatcggaggggatccccattcccccgtcgaaagcagagcgcctcccaccttgatggaagaggcagtcaacggcaacgaccttgcatggctgttccaggaggccgtcctcaacctcaagcgcaacgccaatgaggtcctagctaggcttctccttgccattcatcatcgacacctctgcgcccatcgctattctgcagcgctcgccgtctttggccacatagggaattgtcgtcaaggcgatagtggcggcttggtgtcctcttcatcctcaagggcttga

SEQ ID NO: 70006 - DNA, 5718 bp, Oryza sativa
  Clone ID: PAT_MRT4530_7061C.1
atggatcaaatcaattggcacgctcatacattcgaagacgagctttggaccttcactggagttaagcagatctcccaggcctcgtgttttctgttaacacgcttttggcacgcccagtgggaccgattagaagtcagcaagcaattcttcctgatggccgagaagccaccactgtcgccatcctcggctagcccaagcactgttaaagaaaagatccagaagttggggttgactgacgtcaatgaaggaaacgttgtgcccatcgatccagagaaattcacacctgagcagaagaaggattttgaagcaatgttgcagcaagctcgggatcagttcttgaactcattcatgcagacccgcaagggaacattggttcagaagtataaagtaaaggtagttgccgatgatcctgggaccagttcttccaaaagtgaagacgggaaacaagctccagatggctcggtgttgacgaaaaaatcaaacacaccggcctgggagatctgcttagctccagtgcaggaagtcaaggtgacaactctcaaggggtccgtggagttcgaggtgatagagtgcatggagttcaagccatctattcaggcagttccccccgtcgcaccatcagctcagccgacggcgccggcatcaactcccttacctgctccgtcagcattggcaccaggccagctggtgaaccctcagttgttaatgagagagcagccacagcatagtgggaaggttgtgaatcggtcgacgcaagatcaggttgctgccatgtttctgccacctcaacctgctgttgatccaatacagcagcagccgattcaacagacactcccgattcagcaggggggcaacttgaattatcaatatcagcctccttccccgcaagaccaatatcaaccagggggactggctcaacctcagtttgcgtctcagtacggtcagttcgagcccatgcaacaacagtcacagggagcagctcagcaacgaccgtgggccgacgtgattgctgatgtaatgaggaaacagtttgggcttaaaccaaaagagactggaagcttgtatcggcagccttaccctgagtggtttgagagagttcctctccccaatcggttcaaagttccgaacttctccaaattttcgggacaagatggtgtgtcaacctatgagcacattagccgatttttagctcagtgcggtgaagcatcggctgtggacgctctgagggttaggttgttccggttatctttgtctggatcggcttttacttggttttcttctttgccgtatgggtcgatcaatagttgggccgatttggagaagcaattccacagctatttctacagtggggttcatgagatgaagttatctgacttgacggcgattaagcagcggcatgatgaacctgtgcacgagaatattcagagattcagggagatgaggaacaagtgcttcagcttgagtttaactgacgctcagttagccgatctggcctttcagggtatgattgctccgattagggagaaattctcgtctgaagactttgatagcttgtcacatctgatacaaaaggtaaccttgcacgagcataggtctgcggaggctaggaaaagctctaagaaggttaatcatgtttgtccttacatgtatgggtcggatgacgatgaggatgactttgagatagctgcagccgaatgggtgaggagtaaaaaggtcataccgtgccaatgggtaaagagttctggaaaggaagagaagtatgattttaatattactaaagctgacaagatttttgatctgctactccgagagaagcaaattcaactccctgctggtcatacgattccatcggctgaggaattaggcaaaaagagatattgcaaatggcataattctgggtcccattctactaacgattgcaaggtgtttagacaacagattcaggtggccattgaaggaggcaagattaagtttgatgattccaaaaagccgatgagggtcgatggtaacccatttcccgttaacatggtacacacagctggccgaacagctgatacggggcgcatgaggggttatctagtaagttcggctagaattataaacaaatatcaaaggaaatacgacaagaaacaggaaaggcaccatgaagaagataatggtggctttgatcctcattgggttgttatttcttcgggttctgttggaatgaagacaagagtgcctattcatcagagattgggcccggtaaaccaacgtggtgactcggaaggtgacgaaaataagaagactcaatggtgtcctcctgatatttttacgaagaatcagaaaagaagggttcaaagattgaggagtagggaacgcttccaggaggtcgagcaagaaattaatcatcggctgaagaaagcaaaaccgaggcaggagtggcgtgttaaaaatcaggctcctgtagccgacgatgttgcagctgatgaggcaaagtggttggcaaaaggaaagagtgttgtgacaacaccagttaacatggtttttaccttgccagccgaattcggcatcgatcaagccgatgtcgacgaggtggaagaggaattagctaagttggttctatcaccagaacaggcggtgttcaaaaagcctgaggggacagagaatcggcatcttaaaccattgtatataaatggctatgtcaatgggaagttgggtagaaatgccgatgatctcatcaagacaaatatggtgctcaaggactttggtggcaatccatcggaaaccaaaggtgttctaaatgtggagctgacagtcggcagtaagactattcctaccacgttttttgtcatcgatggtaagggttcttacagcttgttgcttggaagggattggattcatgccaattgttgtattccttcaactatgcatcaatgcttgattcagtggcaaggcgacaaaatagatatcgtaccagccgacagccagttgaagatggagaacccaagctattattttgagggcgtcgtggagagttcaagtgtttacactaaggatacggtagatgatctcgatagcaagcaagaacatcggctacctatcaagccaggggttaggccgcaccagcagcctccgaggagatgcaaagctgatatgcttgaacctgtcaaagctgagattaagcgtttatatgatgctggttttattcgtccttgccgatatgttgagtgggtttctagcatagttcatgtcatcaagaagaacggcaaggtgagggtatgcattgattttagagatctgaataaagctacaccgaaagatgaatatccaatgccagtagccgatcagctggttgatgctgcgtcagggaacaaaattttgagttttatggatggaaacgcagggtataatcaaatttttatggctgaagaagatatccatgagacagcttttagatgtcttagtgcaatcggtttatttgaatgggttgttatgactttcggcttgaagagtgctggagctacatttcaacgggacatgaattatatttatcatgatctaatcagctggctggttgaggtctatattgatgatgtggttgttaaatctaaggaaataaaagaccacatagtcgatttaagaaaagttttcgagaggaccaggaaatatggcttgaagatgaatccgacaaagtgtgcctttggtgtatcggctggccagttcttgggatttcttgtccatgagaggggaattgagataactcagagaagtatcaatgcgatcaaaaagattaagcccctggaaaacaagaccgaattgcaggagatgatcggcaagattaattttgtacgaaggtttatttctaatttgtccggaaaattagaaccttttacaccattgttgagattgaaggccgatcagcagtttacttggggggcagagcagcaaaaggctttggataatattaaaggatacctgagttcccctcctgttttgattcctccacagaaagggataccttttagattgtatctgtcggccggtgagaagtcaatcggctcagtcttgattcaggagttggatgaaaaagaacgagttgtattttatctcagtcgtcggctcttggatgcagagactcgatattctcctgtggagaagttatgcttatgtttatatttttcatgcacgaggttaaggcattatttactgtccaatgaatgtactattatatgcaaggccgacgttgttagatacatgttaacggctccaatattgaaaggaagggttggaaagtggatattttccttaactgagtttgatcttcggtatgagtcaccgaaggcgattaagggacaagctatagccgattttattgtggaacatcatgatgattcaatcggctcggttgaaatggtgccatggactttattctttgatggatcggtgtgtactcatggttgtggtatcgacctagttataatttcccctaggggggcatgtttcgagtttgcttatactattaaaccttatgcgactaataatcaagctgagtatgaagcagtgcttaaagggttgcgattgctcaaggaagttaaagccgatgctattgaaatcatgggagattttttgctggtaatcagtcaattggcaggggagtatgaatgtaagaatacgttaatagtttataatgagaagtgtcaagaactgatgaaggaatttcggctggttactttaaagcatgtatctcgagaacaaaatattgaagctaatgatttggcccaaggggcatcggggtataagccgatgatcaaagatgttaaggttgaaattgcagcaataacagccgatgattggagattgtcagaagtttggggcaattcaacgagcgccggcgtcggctatgaatcctttatgaatccttcaacgagcgccggcgttggctatgaatccttcaacgagcgccggcgccggcgtcggccatttagaggttggggaattgatatgatcggtatgataaacccaccatcaagtaaagggcataagtttatattggtggcgactgattatttcaccaagtgggtggaggccattcctttgaagaaagttgattctggggatgcaattcaatttgttcaagaacatataatctaccaatttggtattccgcaaactattacaactgatcaaggttcaatcttcgtgtccgatgagtttgttcagtttgccgatagcgtgggtatcaaattgttgaattcttcaccatattatgcacaagctaatgggcaggccaaggcatctaacaagagcttgatcaaattaattaagcggaagatttctgattatcctcggcaatggcatacccggttggccgaagcattgtggtcttatcggatggcttgtcatggatcaattcaagttcctccttataagcttgtttatggacatgaggctgttttgccatgggaagttagaatcggctctagaaggatagaattgcaagacggtttgacagccgatgagtattataaccttatggccgatgagagggaggacttggttcaatcgcgtttacaagcccttgctaaggttaacaaagataaggaacgagttgctaggcattataacaagaaagtagtgcctaaggattttttggaaggtgaacttgtatggaagttgattttgccgattggaactcgggataacaagttcggcaagtggtcaccgaattgggaatga

SEQ ID NO: 70007 - DNA, 282 bp, Oryza sativa
  Clone ID: PAT_MRT4530_70620C.1
atggtgggctcggccatgtcggcggctgggttggctgcggaggcgggtgatgggactggggatggcggcgctggtggtgggctagtggcggcgtctggcgtggaagatgaagccacttgcgctgatcgcttcatcctcggttgcatgcgccgtgcccgcgatcaccgcgcgttctgcgtccatgcgtgcgcccgcacgttctgctgcccggcgcacatctctggctcggtgtctcctggtgtaggtcttcccccacatgacactatcttaatttattattag

SEQ ID NO: 70008 - DNA, 172 bp, Oryza sativa
  Clone ID: PAT_MRT4530_70621C.1
tctaaagttggagccctttgaaatggattatactgttgcaaacactaccattgttgacaatgtctgcaatattgcggcttgatcaaaaacagagggatattggtgttaacaagaaaagagcgatgatttctgattcttgtatacttttaagatatatacggagtaatttcat

SEQ ID NO: 70009 - DNA, 474 bp, Oryza sativa
  Clone ID: PAT_MRT4530_70622C.1
atggacggaccggaaaaaacaaacaggaaacttgaagatggtgacattgtaaatgtcgacgtaactgtatattacaaaggagttcatggtgatttgaacgagacatattttgttggaaatgttgatgaagcttccaagcagcttgtccgttgtacctatgagtgcttggataaagctattgcaataggtgattccttcagtttcagtctagtgttagtagcaatctaccttgctttatgccttggttatgtttctcttcagttattatttctaaactccaaacatatgattgctcatttatctgaagtttttgttacatttattggaacatcaaggcaagtatctgcacaggaccacaggtatacataccaaatatcaaatatgagtattcgtcataaaatagaagaattaaggcctaactggatcctggcgtcctgcaatgacagcacacatgggaaaatttatcaaacctag

SEQ ID NO: 70010 - DNA, 528 bp, Oryza sativa
  Clone ID: PAT_MRT4530_70623C.1
actagtggatccccgggctgcaggtcttcctccatccgatcaccctccttacagtactgacgatctgttggaccgtactacaagctgattcttatggctttctcgatttggctacttcttcagacagtgcttgggcatgctttgtgaattgttccagaccaatacaagatactactagtccatggtacaggcccgtctcttgcctgcctaccaacaattcttgggtttatctcaacgagttttatggctgtacaattggagagcttcaaccttcttgtcgatacttgtccatgattccctttgatactcaacatatatcagtctcacagctacaaaatgcaagttatactgatatcattggattcatagggaaggggtcccgtgttcgattcccaatggatcatagttccctcaatcatcatatcagcaccaaggaatgcctcaacaattcagtaaggtacttcaacgagcatataaccggcgcaagcattccgaatatagcccgtgctatttttggagcgaactgta

SEQ ID NO: 70011 - DNA, 516 bp, Oryza sativa
  Clone ID: PAT_MRT4530_70624C.1
atgtggaccaagaaggccatgctcgccgccgtcgtggtggtcgtggccaagtgcagggagctctgggaaggggtgctcacggcgggctccggctgcggctgcgtgtcgcgttccgccgccgccgccgacgacgacgacggctactacttcggccggagctacgagttctcgtgctccgccaccccggtcgccttcgctccggcgaaagggcggcggcgccggcggcgctgcctgctgctgccaccctgcgtgggagccaagcaggcgagggagatgctgcgggaggcggcgatgatgtccccggcgccgcctgtcggtgccggcggcggtcgacgctcgccgccggagcggtcgccgcagtggtggagggagcaggagatcgacggcctcgcggaggagttcatcagccggttctacgagcagctgaggtcgcaggtggcggatgaggagcggcggcgggcgccggagtgcaagagcagggcgtcgtcgtcgccgccgtccccgtctccgccatag

SEQ ID NO: 70012 - DNA, 339 bp, Oryza sativa
  Clone ID: PAT_MRT4530_70625C.1
atgaacagagtacagcaacggcagcagtatgaggatgaggaagcacggcttgatgataaaaggccttgtttcctgcagcaacaagtgaagacaatcccagcgcatgcgcgcccgcagcgaagggcaacaacgccgcgcggcggcggcggcggcggcagcggcgccacgcaacggcggcggctgaatcgtaggctcgcagcaactaacaccgaatcacacgatggatctgagagagaagacagagtggaggttgctcggcggcgcgtcgccggcggcaagccggcgcgccgacctgtggactaccaagaatcggcggctagggttcagaccatgctctga

SEQ ID NO: 70013 - DNA, 171 bp, Oryza sativa
  Clone ID: PAT_MRT4530_70626C.1
caggatgcatctgtatggtgacggtgagcggattcgtggaggcgtgcatggtgctgaggaaggggctttcctccgggtagaagtccgagctgggcgcatacgcgctggacagagctgctagtcacgcctttcgagtcacgcggcagctatgataggtggcccccggctggc

SEQ ID NO: 70014 - DNA, 1953 bp, Oryza sativa
  Clone ID: PAT_MRT4530_70627C.1
atgctagctggatctgatgaccatcgtgctggtccgaggagaggaagaggccattgtcgccgccgtgtcggggagaagatgaggcggatgccaccacgcgacgcaagggagaggaagaggcagccgcacatggattttgttgtcccgagcttgtggtggccggaaatgatcgtcctcgagttcgtgctagctgaatctagtggccgccacgcaaggctgaggagaggaagaggcctgcttgaggatcggaatgatggaaaaagcctctcagttggtagccaaacaaacacacgaaagaatgttaatggcgacatcaccaaaaacagcacaatgtcaagcacactgcccccgcccatccgtccagacaaaattgtgttttcgtctttgtggtttggtgggcctttcgatgaggcatggctgagaggaggagagggcttggtgtcggcgatggcttacaatctagccctttccacgtgggccagagccaaggcttatttaatactgggctatagcatcgagtccattaggtccctctatttgtcgcccagtccgactttcgtccctcggtcgcaaaaccgggtcctcgtccaacgtggcattgacgtggcaaatgaatcccggaaaaataataaaaaaacgtgggacccacatgtcagctacacaaaaaattataagaaaagaatggcgagcggcggcgcagagggtgggcggtgggtgcagcggccgggcgacaaggggcagcttgcggcggcgcagagggggggcggtgggatgagcggcgcgtggtgcccggcttgcgccgccaaccctctcccgccggcagccgcgcaccgccgtttctctctcgccctcccgccggtcgccgacccaaacgcactgccgctcctctccctccctcccgttggccggcgcgcgctgccgctcctctcgcgtcggagtgtgggacgggggccagtggcggcggagacccgagagcggcgacggtggcgtgcgggcgagggccggagcggtggcggcggagatcgagaccgccgtggaaggttggccgtcggaaggaagaaaacgggccatcagaacggtcgcgtcctcgccaccctcggccccgcgaccgcactatcctccactgtgctccacgccctctctgccggccacgatgcacccgcctccgctgttctcccgccgcgcccacgaacgtgtaagggccgcctacgtctcgccaccgcgactcgcgtcggcatcccctcgaagatggcggcatctggtggtggcttcttctgcacctgcggcggcggcggcgttgaaggcgggaggagtggcgcaggcgggggaggcggcgccgccgccgatggacgcggtcggcgtgccgagccggccgacaacgacgtgaccacacgcgtgttgggaggcatctgcatgcacacggcttggagctcgtcgccatactgcgtgtccatagtgtcgttcaccgtggggtataatatccgctgcgagaaggaggagcagcgcgtgcccgtcgaggcggccggagcggacggcgtagctgatcgcctgcgggcggcggcggcgcccgagctgagcttcaccgccgcgaagacgaaggagaccacaacggtggcggtgggagccgccgccgctcgccgcagtctccgccagccgccgcgacacccggaacatctctcgggttttgaggggagctcggccgccgacgacatctcgatgccggccgtcgggtggtgcggatggtggtggtgcgagaggaacggcgagcggcgcgacatggactctagcctaccgctgccgccgccgcttaaactcccgctggccgccattgcttcagccctcgcccgccgccgctcgctccccgcggacggccgtcaataccgccacatcagcgccacgtcagcgaaaccgccctccaaaaccgccgagggagtcaaattgcaccggtttcaa

SEQ ID NO: 70015 - DNA, 4227 bp, Oryza sativa
  Clone ID: PAT_MRT4530_70628C.1
atgggttcaaatctaaaagaaattctagataatgtttcctaccctgaaattttcttgtctttccctaatgctaaggagaagaagaggattgagtcaaaagaaaaagctattttggagttttatcaacaatttgcttgtgtaggtggggacctggtattttcggaatccttatgtgaggaattacaaaagaaattttttcaacaaaaatgtgaattaggaaggattggtcgacgaaatatgaatcgaagactgaatcttgatatacctcagaacagcaccttcttgttaccgcgagatgtattggccgctacggatcatttgattggaatgaaatttgaaacgggtatacttgacgatgacgatatgaatcacttgaaaaataaacgtattcgttcggttgcggatctgttacaagatcaattcggactggctcttggtcgtttacaacatgcggttcaaaaaactatccgtagagtattcatacgtcaatcaaaaccgactccacaaactttggtaactccaacttcaacctcgattttattaataactacttacgagaccttctttggtacatatcccttatctcaagtttttgatcaaaccaatccattgacacaaacggttcattggcgaaaagtgagttgtttgggtcctggaggattgacggggagaactgcaagttttcggagccgagatatccatccgagtcactatgggcgtatttgtccaattgacacgtccgaaggaatcaacgttggacttactggatctttagctattcatgtgagaattgatcattggtggggatccgtagagagtccattttatgaaatatctgagaaagcaaagaaaaaaaaagagagacaggtggtttatttatcaccaaatagagatgagtattatatgatagcagcaggaaattctttgtccttgaatcggggtattcaggaagaacaggttgttccagctagataccgtcaagaattcctgactattgcatgggaacagattcatgttagaagtatttttcctttccaatatttttctattgggggttctctcattccttttattgagcataatgatgcgaatcgagctttaatgagttctaatatgcagcgccaagcagttccgctttctcggtccgagaagtgcattgttggaactggattggaacgccaaacagctctagattcgagggtttctgttatagccgaacgcgagggaaagatcatttctactaatagtcacaagatccttttatcaagtagtgggaagactataagtattcctttagttacccatcggcgctctaacaaaaatacttgtatgcaccaaaaacctcgggttccgcggggtaaatccatcaaaaaaggacaaattttagcggagggggctgctacggttggtggggaacttgctttaggaaaaaacgtattagtagcttatatgccatgggaaggttacaattttgaagacgcagtattaattagcgaacgtttggtatatgaggatatttatacttcttttcacatccgaaaatatgaaattcagacggatacaacaagccaaggctccgctgaaaaaatcactaaagaaataccacatctagaaaaacatttactccgcaatttggacagaaatggagttgtgaagttggggtcctgggtagaaacaggcgatattttagtaggtaaattaacgcctcagatagcgagcgaatcgtcctatatcgcggaagctggattattacgggccatatttggtcttgaggtatccacttcaaaagaaacttctctcaaactaccgataggtggaagaggacgcgttatcgatgtgaaatggatccagagggatcccctcgacataatggttcgtgtatatattttacaaaaacgcgaaatcaaagttggggataaagtagccggaagacacgggaataaggggatcatttccaaaattttgcctaggcaagatatgccctatttgcaagatggaacgcctgttgatatggttttcaatcccttaggagtaccctcccgaatgaatgtgggacaaatctttgaaagctcgctcggattagcaggggatctgctaaagaaacattatagaatagcaccctttgatgagagatatgagcaagagacttcaagaaaacttgtgttttcagaattatatgaagccagtaaacaaacaaaaaatccgtgggtatttgaacccgagtacccgggaaaaagcagaatatttgatggaagaacaggagaccccttcgaacatcctgttctaatagggaagtcctatatcttaaaattaattcatcaagttgatgagaaaatccacggacgctctactgggccctattcacttgttacacaacaacccgttagaggaagagccaagcaagggggacaacgaataggagaaatggaagtttgggctttagaaggatttggtgttgctcatattttacaagagatacttacttataaatctgatcatcttatagctcgccaagaaatacttaacgctacgatctggggaaaacgagtacctaatcacgaggatcctccagaatcttttcgagtgcttgttcgagaactacgatctttggctctagaactgaaccatttccttgtatctcagaagaacttccagagagttatccgtcggaacaacaatcttgcctatctattaaaaagaagtgaattagcgccagcagatttagtaatgtgccaggaaaaattggtacaagaagccgtggatacacttcttgatagtgggtcccgcgggcaaccaacgagggatggtcacaataaagtatacaaatcactttcagatgtaattgaagactttgatggggatcaaatggctgttcatctacctttatccttggaagctcaggcggaagctcgtttacttatgttttctcatatgaatctcctatctcccgctattggggatcctatttgcgtaccaacccaagacatgcttatcggactttatgtattaacgattggaaaccgtcgaggagctagaggaaatgcatcgcaggtacaccaattagtaggtatgcgaggattaatggcggatcctcaaggacaaatgattgatttacctattcaaagcaatttacgcgagggactttctttgacagaatatataatttcctgctacggagcccgcaaaggggttgtagatactgctgtacgaacggcggatgctggatatcttacatgtagacttgttgaagtagttcaacatattattgtgcgtagaagagattgtggtactatccaagctatttctagtcaggatattctacatagtgtgactattccttcaaaaagcttgattctagtgcaaaatgatcaatatgtagaatccgaacaagtaattgcggagattcgtgccggaacgtccgctttgcattttaaagaaaaggatcaagatcaaatgaatacttattccttttctgttgacggaagaaatactatagttgcttattttgacgacccacgatacaaaaaagataaaaagggttcaggaattgttaaatttagatataggaccctagaggacgaatataggactcgagagaaagactcagagaacgaatacgggagcccagaaaacgaatataggacccgagaggaagaatgtaaaaccctagaagacgaatataggactcgagaggaggagtatgaaaccctagaagatgaatatgggatcccagagaacgaatatgaaaccctagaagatgaatatggaatcctagaggacgaatataggactcgagaggaggaatccgaggacgaatatgggagtccagagaacaaatataggccccgagaggataaatatggcactttagaggaagactcagaggtcgaacatgggactttagaggaagactcagaggaagactcagaggacgaatatgggaacccgggggaagattccgtcttaaaaaagggggttttgattgagcatcgaggaacaaaagaatttagtctaaaataccaaaaagaagtagatcggttttttttcattctccaagaactgcatatcttgccgagatcctcatccctaaagttaaattggcactttctccctcatgattcttgggaagagacatcagcaaaaattcaccttggacaatttatttgcgaaaatgagcaactgttcatggtcattatggagaaatcctttacaaaggggataggttag

SEQ ID NO: 70016 - DNA, 1542 bp, Oryza sativa
  Clone ID: PAT_MRT4530_70629C.1
gacaataacagcttgccttctgttacttaattatcacaggggccatggtacaaatgctttcgattcagatatgccattttcctatatggggcctagtccttccaagttttttctcatttctttttgttccaagtatgaagtaacttttttgtatggctttacatcattattaaaaggttcaagtatccttaaatggaagacgaatgaaaatgaaagatagctcaagtatccttataaggaagacaaataaaagcgaaagacaagtatatatcctagagtacgagtctacgcctttggcatccagccatttatagtaagacttggcagaaacaatctggatttgaagctttcacctaacattaagaatcattttgtctttctcaagcgctgctttcatttgttgtcaaccttcatttcatgactgtcatcttggggattatgtactgcggttgaagcctctaccggaggtgcagttcctcctgaggcttctgactttgagtcatcagctcctttggaaatgtctctctctgtgtccagctgcacagcttgttctgtgctttccggtggttccataaaagtttgttgcttgctatttgtagcattaggctgctctttgggacccaaagattcctttatagcatccattactggaacattaagcagatgcctttcccctgatgactcttcagtgtgctttgaagattcagagactgtttgaatctcattgacagttttccctccagcgacttccttgcatgatgccaatacaggttgacctgatttaataggtaccacagcagataacggttgtggattcacatgttcagtaccctgctcggagaaaatccttgattcagcattactgggtgaaactgagataggtactgctgcaacaaccccagaacccatgtgaggtcttggaacggaagggaccgtgtgcttagtgaaggatttctctacaggcctcctcatctgtagaggctttgcaaatgtaacatccttcaaggggactggaatatgaccagaagcttgtctgtaaacagtaaatggcctctttcgaacttgacttggtcgaagcatagggagatctggggcaagatcatcttttggtgttattgggcggaggttattttcatcttgaatccaacctttgagaacctgattggcttgcaaaggagcactagtataaatggaggcttggctgagagaagtcttaaccagattgacagaatctctaggtccactggatctattagctgggccttgctttgtaggcaaagcctgaattgtgcctatattagggccaaagctaccacctgatgtatggttgatctgtatcccatcctgtcggatgtttgagctatcttgtgtgctgtgaagaggtgggacgctctgaatgtgctgcacactatatggtaattcatgcatgccgtactcatacttccgtggacgaccacgcttacgcttagcaccagagcttaatgtctgctccatgggtagtggttcattatgtgcaacagctttattctcttcagatgtcat

SEQ ID NO: 70017 - DNA, 4490 bp, Oryza sativa
  unsure (1)..(4490): unsure at all n locations
  Clone ID: PAT_MRT4530_7062C.1
ttacaggatcaaatcaactggcacgctaacatacctgaaggcaagctttggacctgcactggagttaagcagatctcccaggccacgtgttttctgtcaacacgcttttggcacgcccggtgggacctgtaagaagtcagacgtcagttcttcctcatggccgagaaacaaccaccaccatctagcccaggttccgttaatggcaaggtgttgggattgactgacatcattgaagaaaacgtcatgccgattgatccagagaagttcacgcctgagcagaaggaagagtttgaagcaacgttgcagcatgcatgggatcagttcctgaactcattcatgcagacccgcaaggggacacttgtttagaagtataaaataaaagtggttcctgatagtcctgggaccggttcttctaaagatggagaagtgaaacaagctcctggcggctcagctcagccgagttctaaaggtgttaccgacggctctccgagcgatcaaggcgacaattctcaaggagttcatggcgttcaaggtgatggtgctcataacttccaagatcgggttgattatgctgtgcatcatgctttgatcatcaggcaatagccgggttgatcatcagtccagggtattagtcaataccttgtcaaacatgatgaagacaatagccgatggttcgatagctgagcatcaggctgctggcccagttggtgtcttcccaaattatcgatctttgatcaccgatgtttagccatctgttcaagcagttccctctattgcacccacaactcagccgacggcgccagcgtcgagtcctttacctgctacactagctatgacgccgggacagccggtgaaccctcggttgttaacaagggaatagccacagcatggcgggcaggctgcgaatcggctaactcaagatcaagttgctgccatgtttctgccacctccacctgttgtcgatccagtacagcaacagccgattcagcaggcacccccaatccagccggttgtacaaccaatccaacaatacctggtggtcagcctgtacagcagtttgtaaatcaggtcatcccagagcatttggttcaccatgcacagccggatggcacgatgtaatgagagaacagtttgggcttaatccaaaagagactggaagcttgtatcgacagccttatcctgagtggtttgaaagagtccctcttcccaatcggtttaaagttccagatttctccaagttttcgggacaagacggcgtgtcgacttatgagcacatcagccgattccttgctcagtgtggtgaagcatcggctatagacgctctaaaagttaggttattccggttatctctgtctggatcagcttttacttggttttcctccttgccatatgggtcgatcaatagttgggccgatttggagaagcaattccacagctatttctacagtgaggtttatgagatgaagttgtccgacttgacggcgattaagtagtggcatgatgaacccgtgcacgagtatattcagaggttcagggagatgaggaacaaatgctttagcttgagtttgactgatgctcagttagccgatttggccttccagggtatgattcctcctatcagggagaaattctcgtccgaagactttgatagcttatcgcatctgatacagaaggtaaccttgcatgagcataggtcggggaagtcaggaaaagctttaagaaagttaatcatgtttgtccatacatgtatgggtcggatgacgaagaagatgattctgaaatagctgcagccgaatgggtgaggagcaagaaggtcataccatgccaatgggtaaaaagtcctggaaaagaggaaaagtatgactttgacattaccaaagctgacaagatctttgatttactactccaagaaaagcaaattcagcttcctgctggtcatacaatcccatcgcctgaggaattaggcaagaagggatattgcaaatggcattattctggatctcattctactaacgattgcaaggtttttagacagcaaattcaggttgccattgaggggggcaagattaggtttgatgattccaaaaagctgacgaaggtcgatagtaagctggtcaagcagccgatggggtccgtgcaaagggttttcaagtaaattcggctaagattatcaacaaatatcagagaaagtatgacaagcagcaggagaagcattacaaaaaatacgatgatgggatgaggttgctatctatcgaaaattgccctaggtgcagtgaaatcatcgagagctcgagccggccatatagtaggggcaatcggccgaggcaggcgagactttctgttcatcaaagactgggttcggtgaatcaggatcgtggccaagaagatgaggcaatcaggaagaatcaatggtgtccttctggtattttcacaaaaaatcagaagagaagggaaacaaaaacaagacaggagtggcatgttaagaatctggttcctgtagctgatgatgctgcagccgatgaggcgaagaggttggcaaaaggaaagagtgttgtagcggcaccaattaacatggtctttacattgccagctgaattcgggatagatcaggccgatgtcgatgaagtggaagaggaatcggctaagttgnnnnnnnnnnnnnnnnnnnnnnnnnnngataaacacgaggggacagagaatcggcatcttaaaccattgtatataaacggctatgtcaatgggaagccgatgtctaagatgatggtcgatggtggggtcgcggtaaatttgatgccttatgctacgttcaggaagttgggtaggaacgccgaggatctcatcaagacaaatatggtgctcaaagactttggtggtaatccatcggaaaccaaaggtgttctgaatgtggagctaacagtcggcagtaagactattcctaccacgttttttgtcatcgatgggaagggttcgtacagcttgttgcttggaagggattgaattcacgccaattgttgcattccttcgactatgaatcaatgcttgattcaatggcaaggcgacaagatagagattgtgccagccgatagccaattgaagatggagaacccaagctattactttaagggcgtcgtggagggttcaaatgtctacgccaaagatacggtagatgatctcgatgacaagcaaggtcaaggtttcatgtcggccgatgagttggaagaaatagacataggtccagagtttagaaccaagctgatagagttcttaaaagagtttagagattgcttcgcttgggagtattatgagatgcctggactcagccgatcgattgtcgaacatcggctacctatcaagccaggggttagaccacgccagcaacctccgagaagatgtaaagccaatatgctcgaacctgttaaagctgagatcaaacgattgtatgatgctggttttattcgtccctgccgatatgctgaatgggtttctaggatagttccagttattaaaaagaatgatctgaataaagctacaccaaaggacgaatatccaatgccagtagccgatcaattggtcgatgctgcgtcggggaacaaaattttgagttttatggatgggaacgcaggatataatcagatctttatggctggggaggatatccataagacagcttttggatgccctggtgcaaccggcatgtttgaatgggtcgtcatgactttcggcttgaagagtgctggagcaacgtatcaaatggccatgaattatatatatcatgatttaatcggctggttggttgaagtttatattgacgatgtggttgtcaaatctaaagaagtggaggaccacatagccgatttaaggaaagttttcgagagaaccagaaaatatggcttgaatatgaatccgacaaaatctacttttggtgtgtcggctggccagtttttggaatatcttgttcatgaaagggggatctaggtaattcaaaggagcgttaatgcgaacaagaagattcagcccccggaaaataagacagagctaaaagagatgatcggcaagataaattttgttaaaaggtttatttctcatttgtttggaaggttggaaccttttacacctttattgaagttgaaagccgatcagcaatttacttggggggcagagcagcaaaaggctttggataatattaaggagtatctcagctctcctcctgttttgattcctccacagaaaggaataccgtttaggttatatttatcggctggtgagaagtcaatcggctcggttttgattcaagagttggaagggaaggaacaagttgtattttatcttagtcgacggctcttggatgctgagactcggtattcccctgtggaaaagttatgcttgtgcctgtatttttcgtgtataaggttgaggcattatctattatctaatgagtgcactcttatatgcaaagccgacgtagtcaggtatatgctatcggctccaat

SEQ ID NO: 70018 - DNA, 471 bp, Oryza sativa
  Clone ID: PAT_MRT4530_70630C.1
atggggtatatccgctgcgagaaggaggagcagcgcgagcgcgtcgaggcggccggagcggacggtgtagctgatcgcctgcgggcggcggcggcgcccgggctgagctccaccacggtgaagatggaggagaccacagcggcggcggcgggaggcacacgcggcggggccgccgctccacacctgcgcctccgccgctcgggactccgtgcagccgcagccgctcgccgcagtctccgccagccgccgcgacacccgcagaatctctcgggttctgaggggagctcggccgccgacgacatctcgatgtcggccgtcgggtggtgcgggtggtggtggcagcggcacgacatggactccagcctacctccgccgccgccacttcagctcccgccgtccgccgctgcttcagcccccgcccgccgccgctcgctccccgcggacggctgtaggggagagggagagaaatag

SEQ ID NO: 70019 - DNA, 467 bp, Oryza sativa
  Clone ID: PAT_MRT4530_70631C.1
cgcgtccaccgccgccgaagggagaagagagcgcggagggagcgccgatgccgatgccgcccgcggtggccatgcaccgcgcgacggatccaccctgggacgaagtcgtcgccggatacgccgctgttgagaaggcaccagtcgccatcgagccgacggggagagggagagggatcagatccgcggcggccgccagaggccgccaccgccagccagatccatcgccgccggatgctaggttgggagggagacgagagaggaggagggaccgccgccggccaccgctccccaccgcgacgccgccgacactgcagccgccgccaccacccccgcagcctcccgcggctatcgccgccccgccgccaccaccggtagatctgccacgggagggaccgccgccgacccgcccccaccctcggatcccccgccgctttagaggatccaagcttacgacgcgtgcatgcgac

SEQ ID NO: 70020 - DNA, 1318 bp, Oryza sativa
  Clone ID: PAT_MRT4530_70632C.1
ttgtgatctgatgactctccagtgtgctttgaagattcagagactgtttgaatctcattgcaagttttccctccagcgacttccttgcatgatgccaatacaggttgacctgatttaataggtaccacagcagataacggttgtggattcacatgttcagtaccctgctcggagaaaatccttgattcagcattactgggtgaaactgagataggtactgctgcaacaaccccagaacccatgtgaggtcttggaacggaagggaccgtgtgcttagtgaaggatttctctacaggcctcctcatctgtagaggctttgcaaatgtaacatcctccaaggggactggaataggaccagaagcttgtctgtaaacagtagatggcctctttcgaacttgacttggtcgaagcatagggagatctggggcaagatcatcttttggtgttattgggcggaggttattttcatctggaatccaacctttgagaacctgattgtccttcactttcaccgtaatcagagaaaacccaggaaatttcttcgacatcttaccaacaaaatacttgccaacaatatcatctttgactgaattaccttgcaaaggagcactagtataaatggaggcttggctgagagaagtcttaaccagattgacagaatctctaggtccactggatctattagctgggccttgctttgtaggcaaagcctgaattgtgcctatattagggccaaagctaccacctgatgtatggttgatctgtatcccatcctgtcggatgtttgagctatcttgtgtgctgtgaagaggtgggacgctctgaatgtgctgcacactatatggtaattcatgcatgccgtactcatacttccgtggacgaccacgcttacgcttagcaccagagcttaatgtctgctccatgggtagtggttcattatgtgcaacagctttattctcttcagatgtcatctttggcaatttgctttaactttttgcagctgaacctaggaacgatgataatgccccgtaaaagtgtattcaccaccttcaattacttgatgagtttttctcccctccaatccgatccgaccccgatacgatcgccgttcccgcgcgcgcgaggaggccgcgcaccaagggtgatagttgatacggccactaaggggggtgaggcaatccgcgccgtgtctccggcgcccgttcggcttctcccccgcggcgcgaggagaggagaggtggcgcgccgaggcggcggaggagagctcgccggggcaccaccggcggagacacggaggaggaggaggaggagagatggg

SEQ ID NO: 70021 - DNA, 2613 bp, Oryza sativa
  Clone ID: PAT_MRT4530_70633C.1
atgggttcaaatctaaaagaaattctagataatgtttcctaccctgaaattttcttgtctttccctaatgctaaggagaagaagaggattgagtcaaaagaaaaagctattttggagttttatcaacaatttgcttgtgtaggcggggacctggtattttcggaatccttatgtgaggaattacaaaagaaattttttcaacaaaaatgtgaattaggaaggattggtcgacgaaatatgaatcgaagactgaatcttgatatacctcagaacagcaccttcttgttaccgcgagatgtattggccgctacggatcatttgattggaatgaaatttgaaacgggtatacttgacgatgacgatatgaatcacttgaaaaataaacgtattcgttcggttgcggatctgttacaagatcaattcggactggctcttggtcgtttacaacatgcggttcaaaaaactatccgtagagtattgatacgtcaatcaaaaccgactccacaaactttggtaactccaacttcaacctcgattttattaataactacttacgagaccttctttggtacatatcccttatctcaagtttttgatcaaaccaatccattgacacaaacggttcatgggcgaaaagtgagttgtttgggtcctggaggattgacggggagaactgcaagttttcggagccgagatatccatccgagtcactatgggcgtatttgtccaattgacacgtccgaaggaatcaacgttggacttactggatctttagctattcatgcgagaattgatcattggtggggatccgtagagagtccattttatgaaatatctgagaaagcaaagaaaaaaaaagagagacaggtggtttatttatcaccaaatagagatgagtattatatgatagcagcaggaaattctttgtccttgaatcggtgtattcaggaagaacaggttgttccagctagataccgtcaagaattcctgactattgcatgggaacagattcatgttagaagtatttttcctttccaatatttttctattgggggttctctcattccttttattgagcataatgatgcgaatcgagctttaatgagttctaatatgcagcgccaagcagattcgagggtttctgttatagccgaacgcgagggaaagatcatttctactaatagtcacaagatccttttatcaagtagtgggaagactataagtattcctttagttacccatcggcgctctaacaaaaatacttgtatgcaccaaaaacctcgggttccgcggggtaaatccattaaaaaaggagaaattttagcggagggggctgctacggttggtggggaacttgctttaggaaaaaacgtattagtagcttatatgccatgggaaggttacaatttggaagacgcagtattaattagcgaacgtttggtatatgaggatatttatacttcttttcacatccgaaaatatgaaattcagacggatacgacaagccaaggctccgctgaaaaaatcactaaagaaataccacatctagaagaacatttactccgcaatttggacagaaatggagttgtgaagttggggtcctgggtagaaacaggcgatattttagtaggtaaattaacgcctcagatagcgagcgaatcgtcctatatcgcggaagctggattattacgggccatatttggtcttgaggtatccacttcaaaagaaacttctctcaaactaccgataggtggaagagggcgcgttatcgatgtgaaatggatccagagggatcccctcggcataatggttcgtgtatatattttacaaaaacgcgaaatcaaagttggggataaagtagccggaagacacgggaataaggggatcatttcaaaaattttgcctaggcaagatatgccctatttgcaagatggaacgcctgttgatatggttttcaatcccttaggagtaccctcccgaatgaatgtgggacaaatatttgaaagctcgctcggattagcaggggatctgctaaagaaacattatagaatagcaccctttgatgagagatatgagcaagaggcttcaagaaaacttgtgttttcagaattatatgaagccagtaaacaaacaaaaaatccgtgggtatttgaacccgagtacccgggaaaaagcagaatatttgatggaagaacaggagaccccttcgaacagcctgttctaatagggaagtcctatatcttaaaattaattcatcaagttgatgagaaaatccacggacgctctactgggccctattcacttgttacacaacaacccgttagaggaagagccaagcaagggggacaacgaataggagaaatggaagtttgggctttagaaggatttggtgttgctcatattttacaagagatacttacttataaatctgatcatcttatagctcgccaagaaatacttaacgctacgatctggggaaaacgagtacctaatcacgaggatcctccagaatcttttcgagtgcttgttcgagaactacgatctttggctctagaactgaaccatttccttgtatctcagaagaacttccaggttaatagggaagaagtttga

SEQ ID NO: 70022 - DNA, 1071 bp, Oryza sativa
  Clone ID: PAT_MRT4530_70634C.1
atggacgcggtcggcgtgctgagccagccgacaacgacgcaaccacacgcgagttgggaggcatctgcgttgagcattctcctgctggttgccgaggcaatcggcaaggggcgacagatgaggactggctggactgcggctagcaagcacaagcggtgcacccacgccgtctcctccgcatccggcgggcacacggcccggagctcgtcgccgtactgcgcgtcttcgttcaccatggggtatatctgctgcgagaaggaggagcagcgcgagcgcgtcgaggcggtcggagcggacggtgtagctgatcgcctgcgggcggcggcggtgcccgggctgagctccaccacggcgaagatggaggagaccacagcggcggcggcgggaggcacacgcggcgggcaaggttatgaaaacccacgagaagcaactggacgaattgtatgtgccaattgccatttagcgaataagcctgtggatattgaagttccccaagcagtgcttcccgatactgtatttgaagcagttcttcgaattccttatgatatgcaactgaaacaagttcttgctaatgggaaaaagggagggttgaatgtgggtgctgttcttattttgcccgagggattcgaattagcgccgcccgaccgtatttctcctgagttgaaagaaaagataggaaatctctcttttcagagttatcgtcccaataaaaaaaatattcttgtgataggccctgttcccggtgtagtaagaaaaatactgcgtaaagaaaaggggggatatgaaatatccatagtcgatgcatcggatggacgccaagtgattgatcttatacctcccggtccagaacttcttgtttcagagggggaatcgatcaagcttgatcaaccattaacaagtaatcctaatgtgggagggtttggtcagggggatgcagaaatagtgcttcaggatccattacgcgttcaaggccttttgttcttcttcgcatccgttattttggcacaagtttttttggttctcaaaaagaaacagtttgaaaaggttcaattgtacgaaatgaatttctag

SEQ ID NO: 70023 - DNA, 335 bp, Oryza sativa
  unsure (1)..(335): unsure at all n locations
  Clone ID: PAT_MRT4530_70635C.1
ggcgctggaggccagcgacaggcngtgcacagggcagtgtacaggcaagggcgctgtacccagggctacgcncggctgcgctgtctggtggacaaggcacaccaggcagccaagcttacaacagcagcacaggcagcagcacaggccaggaaatacctcctccctggcagctctttcgaccccagacacagtccagcantgcatccacagctcgtgtaacctgtccaccacgcgtcgggttgtgtattgtgtacatgctgatagtagtatgtctgtatgtatgtatgtgatgtgagtacgtgaccatgttgtgtacataagttcgtgtcaaaaaa

SEQ ID NO: 70024 - DNA, 3335 bp, Oryza sativa
  Clone ID: PAT_MRT4530_70636C.1
tcaaacttcttccctattaacctggaagttcttctgagatacaaggaaatggttcagttctagagccaaagatcgtagttctcgaacaagcactcgaaaagattctggaggatccttgtgattaggtactcgttttccccagatcgtagcgttaagtatttcttggcgagctataagatgatcagatttataagtaagtatctcttgtaaaatatgagcaacaccaaatccttctaaagcccaaacttccatttctcctattcgttgtcccccttgcttggctcttcctctaacgggttgttgtgtaacaagtgaatagggcccaatagagcgtccgtggattttctcatcaacttgatgaattaattttaagatataggacttccctattagaacaggctgttcgaaggggtctcctgttcttccatcaaatattctgctttttcccgggtactcgggttcaaatacccacggattttttgtttgtttactggcttcatataattctgaaaacacaagttttcttgaagcctcttgctcatatctctcatcaaagggtgctattctataatgtttctttagcagatcccctgctaatccgagcgagctttcaaatatttgtcccacattcattcgggagggtactcctaagggattgaaaaccatatcaacaggcgttccatcttgcaaatagggcatatcttgcctaggcaaaattttggaaatgatccccttattcccgtgtcttccggctactttatccccaactttgatttcgcgtttttgtaaaatatatacacaaaccattatgtcgaggggatccctctggatccattttacatcgataacgcgtcctcttccacctatcggtagtttgagagaagtttcttttgaagtggatacctcaagaccaaatatggcccgtaataatccagcttccgcgatataggacgattcgctcgctatctgaggcgttaatttacctactaaaatatcgcctgtttctacccaggaccccaacttcacaactccatttctgtccaaattgcggagtaaatgttcttctagatgtggtatttctttagtgattttttcagcggagccttggcttgttgtatccgtctgaatttcatattttcggatgtgaaaagaagtataaatatcctcatataccaaacgttcgctaattaatactgcgtcttcaaaattgtaaccttcccatggcatataagctactaatacgttttttcctaaagcaagttccccaccaaccgtagcagccccctccgctaaaatttgtccttttttaatggatttaccccgcggaacccgaggtttttggtgcatacaagtatttttgttagagcgccgatgggtaactaaaggaatacttatagtcttcccactacttgataaaaggatcttgtgactattagtagaaatgatctttccctcgcgttcggctataacagaaaccctcgaatctagagctgtttggcgttccaatccagttccaacaatgcacttctcggaccgagaaagcggaactgcttggcgctgcatattagaactcattaaagctcgattcgcatcattatgctcaataaaaggaatgagagaacccccaatagaaaaatattggaaaggaaaaatacttctaacatgaatctgttcccatgcaatagtcaggaattcttgacggtatctagctggaacaacctgttcttcctgaataccccggttcaaggacaaagaatttcctgctgctatcatataatactcatctctatttggtgataaataaaccacctgtctctctttttttttctttgctttctcagatatttcataaaaaggactctctacggatccccaccaatgatcaattctcgcatgaatagctaaagatccagtaagtccaacgttgattccttcggacgtgtcaattggacaaatacgcccatagtgactcggatggatatctcggctccgaaaacttgcagttctccccgtcaatcctccaggacccaaacaactcacttttcgcccatgaaccgtttgtgtcaatggattggtttgatcaaaaacttgagataagggatatgtaccaaagaaggtctcgtaagtagttattaataaaatcgaggttgaagttggagttaccaaagtttgtggagtcggttttgattgacgtatgaatactctacggatagttttttgaaccgcatgttgtaaacgaccaagagccagtccgaattgatcttgtaacagatccacaaccgaacgaatacgtttatttttcaagtgattcatatcgtcatcgtcaagtatacccgtttcaaatttcattccaatcaaatgatccgtagcggccaatacatctcgcggtaacaagaaggtgctgttctgaggtatatcaagattcagtcttcgattcatatttcgtcgaccaatccttcctaattcacatttttgttgaaaaaatttcttttgtaattcctcacataaggattccgaaaataccaggtccccgcctacacaagcaaattgttgataaaactccaaaatagctttttcttttgactcaatcctcttcttctccttagcattagggaaagacaagaaaatttcagggtaggaaacattatctagaatttcttttagatttgaacccatagctgatgatagaactagaacagatatcttttgttttctactcacgcgagcccatatcctttcttttttatcaattgctaattccgatcttcctccccaatctaatattatagtcccggtgtagatagaaattcctttatggtctaattccgagcggtagtaaataccaggacttagcaatatttgattgatcacaattcggtatattccatttattataaaggttcctaaggaattcctatcaattataggaatgtttccaatagaaatggtttgcttttgcacatcgaaaccaaaaattaatcgcgcggatacgtataattcggaagaataggtgagtgattcatacacagcatccctttcttttatcgaaggttctagcaattgatatcctttcgcaaataattgaaatgaaattccgtgatctggatctttaattgttggaaacttctcaagttcttctgccaagccttgattaatgaacctacaaaatccctcgaattggatctgactaaatccgggtattgtggacattccctcatttccattccggagcatcttaatcttaagtttcctgtttatcgaagaaaaattccattatcagctcactcttcatcaatccctacagatcgatctagcaattatggaaaatatattct

SEQ ID NO: 70025 - DNA, 1083 bp, Oryza sativa
  Clone ID: PAT_MRT4530_70637C.1
atggcggccagcgggagtttaagcggcggcggcagcggtaggctagagtccatgtcgcgccgctcgccgttcctctcgcaccaccaccatccgcaccacccgacggccggcatcgagatgtcgtcggcggccgagctcccctcaaaacccgagagatgttccgggtgtcgcggcggctggcggagactgcggcgagcggcggcggctgcacggagtcccgagcggcggaggcgcaggtgtggagcggcagccggcgagcggcgcggcggagacgcggatgtggcgacggcgacctgcaggtcgagcagggcgcggccgagctcgccgtaccccgccgcgtgtacctcccaccgccaccgttgtggtctccttcgtcttcgcggcggtgaagctcagctcgggcgccgccgccgcccgcaggcgatcagctacgccgtccgctccggccgcctcgacgggcacgcgctgctcctccttctcgcagcggatattataccccacggtgaacgacactatggacacgcagtatggcgacgagctccaagccgtgtgcctgccggacgcggaggagacggcgtgggcgcacctggaccacggctcgccgggaaggtgctggctattcaacttggatcactgggcgctgatcagcgaagcggcgacgaggcagatggtcgaggacaacgcggtgaaccagtcagccctttgcttgttggcttgccgcttgacgttagtacacacatgcagatgcctcccaacacgcgtgtggtcacgtcgttgtcggccggctcggcacgccgaccgcgtccatcggcggcggcgccgcctcccccgcctgcgccactcctcccgccttcaacgccgccgccgccgcaggtgcagaagaagccaccaccagatgccgccatcttcgaggggatgccgacgcgagtcgcggtggcgagacgtaggcggcccttacacgttcgtgggcgcggcgggagaacagcggaggcgggtgcatcgtggccggcagagagggcgtggagcacagtggaggatagtgcggtcgcggggccgagggtggcgaggacgcgaccgttctga

SEQ ID NO: 70026 - DNA, 288 bp, Oryza sativa
  Clone ID: PAT_MRT4530_70638C.1
cacgcacacaagcgcgtgtcctctatagattgcgcccccttttttttttttttttggtttttttacaataaaaccaagttaacttttgtgtaaaaatggagcaatggatcatgcaaagctaacattagtttattattgggacccaagatttttactccaaaaaaaacttccaattggaaccctcttattgagtaccttcacaaatatgtgaccctgcaggtcactttggagaggtttccattcttaacttttttcaaaaactgttagtaaccaaaaaaattttaaaaa

SEQ ID NO: 70027 - DNA, 497 bp, Oryza sativa
  Clone ID: PAT_MRT4530_70639C.1
gggccaaatcctcaaaatgatggtgagggagttctacaaggtttaccaccatcgccaccaccattatatcctatccattccgaggatgaagctgaagaaacgccctcagctatggacatcagtgagccaagtcaggagcttgaagtagcaaggggaacccggatgtttcatattaatgacctaaatgttcccccaatttggattgaaactccagaagaagaagatgatccagaagaacaagtgttcgagatgcaagaacatatttctatgtatgctgatgattaaggagatgatgaagatccttacccatgctctgcccctaatactgctgcatcttctgcacctcatcttgaattttttttacacttcgcacttgcatcgttattcactaaccccgcggaaggtagtggtgagtgatttgatgattaggagttgtagatagtgtgttaatagttagaggtcatataaataaataaacttgctagtataggttagca

SEQ ID NO: 70028 - DNA, 676 bp, Oryza sativa
  unsure (1)..(676): unsure at all n locations
  Clone ID: PAT_MRT4530_7063C.1
caggtccaagaagntgcttgagcttgnatcccggttatgggttagctggacttgctattgcagccagcacagatgctgatgaggtcgttatttctgatggaaatccacaagtagttggatatattcagcagaatatatccatcaatacagaaacttttggtcaaacaaaagttaaatctatggtacttcactngggatgctgggcaggcttcagaaattattagttccttcgatattattgttgcaagtgactgcacatttttcaagcaattccatcagagccttgcacgggttgtcaaatccttgttgaagcattcagaaacctcacaggccattttcctgagcccaaagagaggcgattcactcagcaaattcctagaagtaattaaaaagaatggtttgtcttgtgagttgatagagaagtatgatcccactgtatgggatatgcacaaaaaatatgtatcggatgataacagatcctggcccctccacgaggaagagcactgctaccctctattggttagaattaatagtcacagcaaatagttacctccagacatttcgtttgatctatgatgggttcatttgtgatgtaaaagctttagctagtctatgttgtaatttatacattacaatagaagtgggttatcggttgatattaaaaaaaaaaaaaaaa

SEQ ID NO: 70029 - DNA, 2942 bp, Oryza sativa
  Clone ID: PAT_MRT4530_70640C.1
ctgcaggtgaatttcttatcattcaatgagcatcttgtatttcatagaaattgggggttatatagtccttacgtaagggccagcctatccaactttcaggcattaggatacgtttaaggcgtggatgattatcataagagattcccaccatatcaaaagattcgcgttcttgaaaatcggcacttctccaaatccagaagacagatgggattctaggattatccttttgggcaaagacttttatgcatacttcttctgggttatctataccatactgtattctcgtaagatgatacacgctagctaaagatccaccgggtgcaacgtcataagcacattgggaacgtaaataattgtaaccatatacatataaaatgacagcaatggaatcccaatcctctgcttttatttgcaaagtctctattcctcgatgatcgaagcccaaagatctatgaaccacctcatgtttgactagccaattagataaccaaccctgctgcattatcttgatctctcctcctttgtataaatatttcgcagttcgaatgcaagtttgaaatattgccctgctctttctttttcggcacaaagagctcctcctaattcactaatttgtaggaagatactggacttttggatttgaaaaaagtttcagaagatatgtctaaagtagatggtgattgatagagcaattcttgctcataagttccagtattagtactgcgccgaacataaagcttgtggctggtagtaaaacatcgatttttcttttgagatagagttcgatcctcaactatttctcgcgatatcttcttacgaagttttgttagggcatctataacagcctctggtttaggtgggcaacccggcaagtagacgtccacaggaattaacttatcaactctccgaacagtactataggaatccgtactgaacattccaccagtaatagtacaagctcccatagcaaaaaaggagaagtcattccaatcctcaattctcctttcgagattcggcgatagtgaatcaattgaacgcgcttcgaagatttgttctacttttggaagaccttgcgttatgtcactagatctcgctttttcgtatataaacgtaactaacctatcccctttgtaaaggatttctccataatgaccatgaacagttgctcctgtagtggctgcaaataaggtttagctgctcttatataataaagaaatctatatttacaatgaaaatttgacctgatttttttatgtgcgatttaaatagacatacattttttgcaaataaattgtccaaggtgattttttgctgatgtctcttcccaagaatcatgagggagaaagtgccaatttaactttagggatgaggatctcggcaagatatgcagttcttggagaatgaaaaaaaaccgatctacttctttttggtattttagactaaattcttttgttcctcgatgctcaatcaaaacccccttttttaagacggaatcttcctccgggttcccatattcgtcctctgagtcttcctctgagtcttcctctaaagtcccatgttcgtcctctgagtcttcctctaaagtgccatatttatcctctcggggcctatatttgttctctggactcccatattcgtcctcggattcctcctctcgagtcctatattcgtcctctaggattccatattcatcttctagggtttcatattcgttctctgggatcccatattcatcttctagggtttcatactcctcctctcgagtcctatattcgtcttctagggttttacattcttcctctcgggtcctatattcgttttctgggctcccgtattcgttctctgagtctttctctcgagtcctatattcgtcctctagggtcctatatctaaatttaacaattcctgaacccttttttagcttttcaaactgtttctttttgagaaccaaaaaaacttgtgccaaaataacggatgcgaagaagaacaaaaggccttgaacgcgtaatggatcctgaagcactatttctgcatccccctgaccaaaccctcccacattaggattacttgttaatggttgatcaagcttgatcgattccccctcgggaacagggcctatcacaagaatattttttttattgggacgataactctgaaaagagagatttcctatcttttctttcaactcaggagaaatacggtcgggcggcgctaattcgaatccctcgggcaaaataagaacagcacccacattcaaccctccctttttcccattagcaagaacttgtttcagttgcatatcataaggaattcgaagaactgcttcaaatacagtatcgggaagcactgcttggggaacttcaatatccacaggcttattcgctaaatggcaattggcacatacaattcgtccagttgcttctcgtgggttttcataaccttgcttgagcaggtagaaatagaaaaaaagaattttgctaaaatggaaaaaggctttctttcgcttgtgcttgctagccgcagtccagccagtcctcatctgtcgccccttgccgattgcctcggcaaccagcaggagaatgctcaacgcagatgcctcccaactcgcgtgtggttgcgtcgttgtcggctggctcagcacgccgaccgcgtccatcggcggcggcggcgcctcccccgcccgcgccgctcctcccgccttcaacgccgccgccgtcgcaagtgcaggagaagccgccgccggatgctgccatcttcgaggggatgccgacgcgagtcgcggtggcgagacgcaagcggcccttacgcgttcgtgggcgcggcgggagaacggcggaggcggcgccatgtcaacgccacgtggacagaagaccgagtcaatactgccacgtaagcaccacatcaacaccacgtggacagaagaccgagccaatactgccaca

SEQ ID NO: 70030 - DNA, 471 bp, Oryza sativa
  unsure (1)..(471): unsure at all n locations
  Clone ID: PAT_MRT4530_70641C.1
ggagaatggaggccaagagcatgtttgacactgatcgatgacctgatgagttttaccttggatttggaagattcaaagaagggattattgcatccaaattaaggattcttgggaagctttagtttttcatctatcatcttagggccagagttaaaaaaacccacgcgtccgcggacgcgtgggctgcactgtaggagattatgcatgcacccttttgattagagtgtgtctgatgatctgatccggtttagccatgcacaagaattaggcagagaaaaaaagagagacaaggaatgtgtgtgtgatcttttgaaaaagcagaaaaagaaaagtgatgcatgtgtctttctcttatgatctttgctttgagcctaattgcatatgtaatgtcgcaattattacatcnaaaganaaaaaancaaaaaaagaagcttactgtataatgaactttaatgaaaagaataaaaantg

SEQ ID NO: 70031 - DNA, 879 bp, Oryza sativa
  Clone ID: PAT_MRT4530_70642C.1
atggtgaacgaagacgcgcagtatggcgacgagctccgggccgtgtgcccgccggacgcggaggagacggcgtgggtgcacctagaccacggcacgccgggggagctcgacagccagtgctacgtacaggaacgtgctcgccgggaagccgcagtccagccagtcctcatctgtcgccccttgccgattgcctcagcaaccagcaggagaatgctcgacgcagatgcctcccaactcgcgtgtggtcgcgtcgttgtcggccggctcagcacgccgaccgcgtccatcggcggcggcggcgcctcccccgctcgcgccgctcctcccgccttcaacgcagccgccgtcgcaggtgcaggagaagccaccgccggatgccgccatcttcgaggggatgccgacgcgagtcgcggtggcgagacgcaagcggcccttacgcgttcgtgggcgcggcgggagaacggcggaagcgggtgcgtcgtggccggcaaagagggcgtggagcatagtggtggatagtacagtcacggggctgagggtggcgaggacgcggccattctcgtggcccgttttcttccttccgacggccaaccttccacggcagtctcgatatccgccgccgccgctccggccctcgcccgcacgccgctgtcgccgctccagtgccactcccaggtctccgccgccgacgagaccgtatgactcgggccgtcgagcgcgagtttggccgcaatcctctcgctgtggctcggcacttccccatggccgcgatggcaggcgacggaggcgggtccagtgggagcaacgcagggggcaggccggcagaggcctagagcagctggcaagaaaggcgcgtagagcaacgttcaagtccgccat

SEQ ID NO: 70032 - DNA, 448 bp, Oryza sativa
  Clone ID: PAT_MRT4530_70643C.1
gagaggcatcataacagctgtatatcccgggacatgtcacacaatagactagcatactgcatgaaacattgaatgttataaagcgaatccttgctagtcatatgcaggacctaacagatgtagcatgagaatggcaggatgatccatgacatatggatatcattcagtccacgctctccttggatacgctccggaggccactgtcgtcgtcatcaattacgtcgtcaacatactatgcagaacaaaccttccacaggaacacgatgcttgcggaacgcattgcgtgacactctcagtgaaatggactgagtcactggcagatttaaaatgtgtatctgcgcttgctattgtgagggtatacacgactgacaagcttggcgacttagacgatataacaagtccagtcctattaaacgatccggaggtagggtacgtgaagaggatggcg

SEQ ID NO: 70033 - DNA, 630 bp, Oryza sativa
  Clone ID: PAT_MRT4530_70644C.1
atgattaggggagagcggagagcaaacaagcagcgcaaaccggagtggtggtgccgtggtggaggcgggggcgcgcggggaccggcccgacaccgccgcgacaccacatgcacgagccgcgtccaccgcgcgcagcagcagctgcatatatgcaggcggctggccggggcgacggcgacggccggcaccatccacatcgcgatcgatatatctcgtcgctcggttacgagggtgcatggctacgctagtagttccggccggagcctaaaaaagggcaggcacatcgctttcgggccctgtcacgtaccctgtctccaaaagagttggaatatcctgatgacggtgcatatcgcgtttttcccttcccccagatccagcgcgcgcatctctccgccggtgccgcccctgtgcgccacccctccgccggcgtcctctcggccaggggcgcccctctgccgttgtgttttgttgccaagacgccgtcgaccaccgccgttgtcttttgccgccagcgccgcccctctgcgccacccctccgtcgtcgtcttctgctaccagggccgcccctccgccgtcgtcttttcacttttgttgccgaagccgccattgactgctgccgataggacctgc

SEQ ID NO: 70034 - DNA, 249 bp, Oryza sativa
  Clone ID: PAT_MRT4530_70645C.1
gaataggttcccatcataggaataagcttatgttttatgtttaaaaaaacaattctacatgtgtaaagctttgtgatcttataagcaactagagaggtgaaagcacatggtaaacctgggctcttattgatacttttaacattatgtacttattctaactgtattgtaagtcgctcttaaaatggacacatgaatcggttactctgaattattgtgtggaagatttcaagaatttggatgcagatgctc

SEQ ID NO: 70035 - DNA, 1338 bp, Oryza sativa
  Clone ID: PAT_MRT4530_70646C.1
atggaaatccccaatcagatcagcggcggcggcggcggcggatcggttgttatagaaatcccggccgccacggagatcgccggagtggataccgcgccggcaaaggtatgtgacgatgatccccgtgctcaacccctccgcgaccgcgagtgggtgtcgcagctgcccccggaccaccccctacgctacacctgcggccttccgaacggggtcttcctctccatgtccttcgtcaccatcatctacgccgtgattgctccatggatgctgtggcgcgttgctaccgatcatgtgtccctcatgtggacatcgtcgatcctcgcgtgttcctacggcgcactgtggactatagccttgtccgaacggctagcaggtgccttcttggctatcatcttccgcgtctcctatgttgccttggtggccttcgcgtccacgcacctgattggtaccgccaatgggatctcgatcgtgtatctcgacacgttctacgttgctgggatgctcgggtacgccgtcgcggagtatcgtctccgtcgtggtaccgagcaatgccctagcgccatcttagccgccaaacctcctccattggaggaccaagagcgaggcgacgaggaggccgggctctactacatgggcttcttgtttggttcggtatccctctgtttggtggggaggatggcgtggctgcttctctacccctgcggcggcaagtgtctcatctcttacgtcatcgaggagctctcgtttgaggcatcaatgctgatctacatatgggttatctttgtttcccttactcagttggaaggggctctggtctgttacaacactctgttctgcaagatgccaatttgttttggtgcatggttcgttcttggcgtgcttcttggcgtacctgtgagtggtgctattgagatgctaatcttttggattggcactatggctctggctggattctttggatactgtctcgcggttcacgcatattgcaaaagttgcaattacggagccctcaccaagaacggcaacaacagcaggcaaagctcaacagatttgggtttggcgctgcaagctggaagaagtaggcgcatcaacagcataatcctttcagttttgggatacaagatgcgagtgctcagtcacgaaatgctcttggccaatcaaagtatgcagtggataacgctggtgaaagctccaaaccaaattcgtccgcacgaacagaaaatgacaatgtatcttgcatccagcatttgtttcttcagaaaatgtacaatgcctataccattcagtgtcacaaaatgtttcttcagaccacacaaagtatgggattgccacgattaa

SEQ ID NO: 70036 - DNA, 228 bp, Oryza sativa
  Clone ID: PAT_MRT4530_70647C.1
atggaggatgaaggcaatacagtttggacttcagaattttcagtcagtggagtggtacagaagaagcgattgaaacgtgatctttggtcgtgtgcatttgctgttaacaaggacatgaaggagggggcgaacagatcattggccaagacggcgaacggcggcggcggcggcctggaggccggttggctccttggcgatcttttctctacctcccttctcatctactaa

SEQ ID NO: 70037 - DNA, 2842 bp, Oryza sativa
  unsure (1)..(2842): unsure at all n locations
  Clone ID: PAT_MRT4530_70648C.1
gggctgcaggaattcggcacgaggcaagtacaagtaggcaatcttggcatctcagtgagatcgattccttggagataaattcggcaacttttatggaggtggtggagagcgtgtgctttccctcctttgcagccatgagagcataaagtctccagctttcttgccttctttgtttttttttttccctcctattggcattcattcaagggtgatgggagccttttttgtggggagaaaaagcaatgctcctcgggggcttcttcgcgcgcttccccttctccggctcctccttcctcgccggtcctcgccgccgccgccgcgcatcgccggtgcaagctccattgtcaagggcggtataggttggtgaggaggggagctagagcttgatggtggcggccatggagaagcggagggaaatccgggagcttcgcgaccggatggaccggacgctggcgctgcccgacctcgccgacgaggagttgctgagatctctcgtgaagaggcagattcttgcgtcgtcgctgtccgccggcaacgatgaaggcaatattgacctgattgctgaagcaaggtctaaagagatctcgaattttcttgaaatgctaaatacttcggggaatgaacgatcttcgaagattcatgaggcatcacataaagaatggaaggtgaagcaagacacggaccaattacgagttatgtatcgcgagggaccagaggggaccccatttcacaccctccttgctgaaggctttgctgatggaccaattgatgtttgtacatgtgtttcatgggaatcgtctctgtacaaaaaatggtttccacaatacaaccttccaacttttaaagttgctcagtcaggctgtttgaagaaggttcgggttggtgaagaaatttctttggtcagttggattttctctttgatggatgttgtgactaacatctgcatccactatttggaagaaagggtgaaggttccatggccagtttcggagagagaagctcttcttcactacttcgaattagagtatcttaaagaagatcttgtcattgtaatcatgaaaactatatcggatacggacaatataaatatagagacacatggatttagtagggatggaattcctgaagctggtgacaccgttcggatagatgtagtcggaggctttgttttgcaaaggattacaaaggagaaaagcttttcagttaatttttcattattaagccatgttattcctgtacttattgttattaaatcacgtttgaactttaagaaagatataattgcagtcagtactgtggcaaattgtgatgaggattacaagaaagctttgagagaaccactctatgttagaatccgtgagcaccggggttctactgacatcgcaaatgtcactccagtggaggaaagggcaacagaagccctccctgacaatcccactttgcagaatgttctcgcggttactaatatcacctcgaacagtgagatagtcgaagaggagagtgaacagaaggcattattcaagctggatcatcatgcaataggcccttcaaaccctccggctgagcaagagcaacatgttgaaaataagccttacattagtcctgaggtagagcaggctttgaacatattggacaaagctattgcaattatccgaggcaacaatgctggaagtgccagtgtggtccaaaagtttatcggttacgatgtaactttagatggcagtaccactgactctagaaattcacacaatattccaaatgaacatcctgctacattgccacctcgagattcaagagagacccagcacacttattcattgtccaatgagaatgttaatcatagggagaaagatgctcttgacagtgactcgcaacgatacacaacagcttctaccgtaacaaaaactatgtccatgacaaggaggagcacgacacgggtgcacggagaagagagccttgacaccaatggcttacatcagaacggtttccacaaggacaaagagtctaaacgaacaaggaaaaggaagacaaacagttggctctgctgcttaacccctagcaccacaggatgatgagaggcccattcagtttgctgagttaaccattgaattttgaatgcactacacaaagcagtcttaatttataaaaaaattgatagtttgcgaaatacacggggaatcgaacgacaacccaggtggcaccttgtgatagttaccaagagcagatccagtccttgataagttgtatagtagctgttgtattgttgtaacataattcccgatgatgtttctcgataatgcagatgctgggaattgtacttcatcatctaaaatgtgcaatgttgttttcatgagaattctgttatggccttatggggggttctaggtaggtacaatcctcatgaccaaacacatgatcagcttgttggtgctgatatcagtgaatgaaggaattgctatatagtaccttatcagattttaatgacatgaacatcaccagattttcgaagtttcagtcatccttcagagattcttctgagcaacagcaacagtttgagtatggtcccagaccaagttgttgaatttcttatgtcggcagatcagtttgtctgctatttgttgaatttgatgtcggcaggtcagcttgtctgctatagagttcagttttgtttggtatggatttagcgtcttgtcgcgacacgagtgctctctctccctcgtgccggtttccccctgtcgattgatgttttgactagagtatttgaggtgacttngaccttaacttttcatctctaaattaagatatagtaataaagatactataaagtatttctgataaaaaa

SEQ ID NO: 70038 - DNA, 959 bp, Oryza sativa
  Clone ID: PAT_MRT4530_70649C.1
ttttcatgagaattctgttatggccttatggggggttctaggtaggtacaatcctcatgaccaaacacatgatcagcttgttggtgctgatatcagtgaatgaaggaattgctatcagattttaatgacatgaacctcaccagattttcgaagtttcagtcatccttcagagattcttctgagcaacagcaacagtttgagtatggtcccagaccaagttgttgaatttcttatgtcggcagatcagtttgtctgctatttgttgaatttgatgtcggcaggtcagcttgtctgctatagagttcagttttgtttggtatggatttagcgtcttgtagatgcaagattgaacatagtgataatttgatgttttaccttttcgattgatgttttgactagagtatttgaggtgactttgaccattaacttttcatctctaaattaagatatagtaataaagatactataaagtatttctgataccagatttatctaggggtgaagtaaagaaaaagtatgatacatataaaccttgttttaaatgacactattttagcaaaagcatgtatatatatagatgtatatatatatatatatgtatatatatatatgtgtatatatatatgtatgtatatatatatgtatgtatgtatatatatatgtatgtatatatatatgtatgtatatatatgtatatatatatatatgtatgtatgtatatatatatatatgtatatatatatatatatgtgtgtgtgtatatatgtatatatatatatatatatatatgtatgtatgtatatatatatatgtatatatatatatatgtgtgtgtgtatatatatatatatgtgtgtgtatatataaggatactctgttcgctcctttgcaccagccgtctacaactgtgtccctgaggttcgagcatttcaaacgtcgcaaaacgatcgttgaggcac

SEQ ID NO: 70039 - DNA, 719 bp, Oryza sativa
  Clone ID: PAT_MRT4530_7064C.1
atgggccgtcggcccatttcccctcccctttctgcccagcaagtggcccagccgccgccccgcgccccctcctctctccgggacaccgacaggtggggcccacctgtcgggcccgcccccaaccttcggccggcgccgcccgcgcacgtcacccactccccgcactcgccctgcactcccctgcaaccgccgccccactttcccgcccgcgcccacgttcgagatggctaggattcaaaaacaaatcccaccactctccctctctctccacctcccccacttcgccggccactccctgcctctctcggccacgtccgacctccccagacctatataaagcaccaccgcttcctcctccacttttttccctctttcgtcatccactcccgagctctccttcgccctagcaccgtgcaccacccgccgccgccgctttagccaccttcggccgccgatcgtcgccgctagagccgtcgccgagcctcaccgtcgccgtcgtcgggttcgcaagcccgcgggccacgccgtccaccccttccccatccaattccgccgtaggagtccgctttccaccgcgcgccggtgagctcgccatggccgcggccttcggccggcgattttgcccgcctcgctctccctcactaatctctctcggttgtttccctaggttgccccggagcccgtccaactgtcgctgtcgttttccatcactcgccgtc

SEQ ID NO: 70040 - DNA, 325 bp, Oryza sativa
  Clone ID: PAT_MRT4530_70650C.1
gttcgcagtcgccatccggttgctcaccgtcgccgttcgtcgtcgtctcctcccgcgccggccgaaccccggtgagaactccctccccttctcttcctctcgcgcgcgccgctgctccccgcatgcgcgtcgccacgatgcgccgtcgcccgcgtcaccggccgccgccatcttctcgccggtcgccgccgccgctcgcctaaccggtcggccggcttgcagccgagctgagcccggccagtgccacctcttccccatgagccgccgcccggtgggccccgcctgccagtaccccctccctctctctctctccttgagtcactga

SEQ ID NO: 70041 - DNA, 330 bp, Oryza sativa
  Clone ID: PAT_MRT4530_70651C.1
atggagctggcaagaagagaccccaacagcagacggactagtggtggcagccgacaagggggtcagcggaggctagggccagaggcagtcgttctccatgcactggcagtaggaggtccccgagccattgccgtcatgtccgactaccgcaaatgccgcagggctgcagccagtcgccttgccggcgtggtgaccaaatcagcggtaaaagctgtggcagaagaggatcgacgggagaagaagaggagttcgccgtggaccagtgctgctgctgtctcctcctacgaacgggctcaccggccactgccactcccttggaagaggagatga

SEQ ID NO: 70042 - DNA, 236 bp, Oryza sativa
  unsure (1)..(236): unsure at all n locations
  Clone ID: PAT_MRT4530_70652C.1
ccttagatagatttcttttccttgcctngtncggtgtgngtgntaacnaatcccctttgttcatgntgactgttttgtattatngcagttctnttgaaaccaatgtgtagctttcctcgatgcatgcaaaaatggngaaaagantncgcaaggggtagttttctcttgtaaaaaaaaaaaaaaaaaaaaaaaaaaaaaanaaaaaaaaaaaaaaaaaaaaaaaaaaaaaaaaaaaa

SEQ ID NO: 70043 - DNA, 2763 bp, Oryza sativa
  Clone ID: PAT_MRT4530_70653C.1
atggatgaaagaaaaacggacagatacagatggagaagagctgatgcgatgtcaatggcgaggcagcctgcaggatgcatggacagaatcaacttggtttccattccatacagtgttctcaacagggaaatccaccgagaggcatccacgccggcgactcaccccacccgcgttgccggccatcagatccgtcgtcgacgcatcgccgtgcaccggatccgcgcggagatggaccccaacggcttcgatttcttctcccaagatcccatttcgtccgccgccggcaacatttggtcgtcgcagccgtcggcgtccggcccttcccacggatccgttccccgcgccggcgtggacacgctggacctcaacacccaggcggcgtcgggccaggagttccctcacctccacgagtacggtgccttcctccagggtggcggcgaggaaggagctggccgcggccgaggctccggtctccctcccatccgtgcaccacgctctctgggagtgagggctggtcgagggggcgccgggccatctcgtgctgcaccgcgtgcccgccagctcaacttcggcgcggtaggtggccgtgctggacacggtggaaatggtgggtcgtcgtcgggcatcggcggcggcggccctgggcgaggcagctcctcatcaggggcaacgggtcgccgtcggcagcgcgccatggcaaccaaccgtggccgcgaccgcggacgtgggggccgcggttggcgtgtgccgaggagtgtcggcacccaggaagcacccatcggcgattacgtcgaccttgacgaagaaggtgcatgggacgatgaggtggaggaattaggcagcttcggcggccctccggtgagcattgctgaccgagctaactggactgataggaataatagtattttgttagcattgtgcatagagcaagtaagagcaggccactacaatggtagccaaatgaattctgatggctataatgctatagccgagggctaccatgccaaaactggtttgatgcacagtcgtctgcagctaaagaatcaaattgggattctcaagagcacgtactccttctggcgttacttgcaaacgcacacgggcttaggaagaaaacctgatggaacagtcgatgctgattctgatttctggagtagtcacatagagggcaaaccttacctgaagaaggtgcttaaaggacttccagcaaacttggatcagcttgaggagatgttcagtggcagtactgtcgatggtagcactgcttttgctgccggtgatgatttcggtgaggcacaagaaggggctgaagatgagtgggcagaagaaacagaggagttcctgcaaactcctcagagtacaagtagccagaagagcaagaggtccctcgacagcactaccagcacatgtagcactccagtgaagaaaagcaaaagccccatggttaagtatgtgaaggacatatccatgtcattcaaggaggccatgcaaatcaacagccaggaattgaggaagcgtactattgagaagcaggctgcttcagtgagaaattgtatgaagatggccttcgagtgtggaattgagcaaaccactgagaatatttttgcaatgtccaagatgtttgagaatccctaccaaagggagttcttcgttggactaccaaaccatgagcttaggttcaactacttcagcaaatggagcagggataacaacctgatggatgtggagcaacatggtgatggagagatggccgaagaggaagaggtttttgatgaaggaagcacatcgtcaagtgatgatgagattatttccatgtgccgcaagaatatgaacatggctcaaactatggttgctcaacttgtccctatccttggtatgtactccgagcactactttgtcaaactaccaaaaagagtggctcttgaatcaggtatccaatgggtccagaggactttaacccgagaaaattcatgctataacatgtttagggttgagaggcaactgtttaataggctgcacaatattttggttgagtcttatgggttgcagtccacaacaaaaatgtcatctgtagaagctctagccatttttttgtggattgttggtgcaccacagtcaattagacaggctgatgaccgtttggttagatctttggagacaattagccggacatttaacaaagttttgcgttgtctccttaggttagcacctaacataattagaccaagggaccctgaattttctgagttgcaccctaacttagaaaacccagatttttggccatacttcaacgactgtataggagcaatagatgggacacatgtgaagcttgtggtgccaaagacgaagagaatacaatacttgaataggtacaatgaaacctcacagaatgtattggctgtttgtgattttgacatgaggtttacctttgtgctatcgggatggcctggttcagcacatgatatgagagtgttcaaagatgcaacgacaactcatgctcacaaatttccacatccaccacaagggaagtactatgtggttgatgcggggtacccaaaccgcccgggctacctttcaccgtatagatgcactaggtatcatgtggagcaatggaaaaacgggcccccgccacaagtcgagagagcaaaattagggatagggaatttgctaggtgtgatgcggatgcagattattttccaatgcctacatcacctcactctgactggccagaagatgaacctcttgttgaggatagcaacatga

SEQ ID NO: 70044 - DNA, 766 bp, Oryza sativa
  unsure (1)..(766): unsure at all n locations
  Clone ID: PAT_MRT4530_70654C.1
tgctgatgatctggttcttggccttgttcgtgtcccagcgctcgcaggagtcggctcggccgggcttcccgccgctgcttgacgacgacgacgctgggctgccgggttctttgcgctcgcaggcggcggcgcggctggcgctcccggtgctggagcttgacgacgacgacgagctggtgggtttcttgtgcgtgtcccacctgtcggcggcgtcggcgcggccgggcttgggcgcgttggaggccaccgacgtggcgaagttggcggggaggatgacgaggcacggcgtcgggagcagcggcagcatcttgctcctcggcggggtcgggagcagcacagggagagccgccatggccgacatcgacttgaagtgaagtgatcgatcaaccggagatgacgacgacgacgacgagagcgcgaggaggatcgaaccgcggggaatgagatgatgatgatgatgatgatgagctggtgcggcctctcgactcctgcttatgtagccgcccatgaatccgatcccatttcacctctccattgatttccaagcaaaatcggctccatctccgaatcggtctcgatcgatcttccgtctgggattaattcggagtcggactaagaacggatttgtggtagtatatactttctgctacaacttctcattntgattntctacttactattactacagatgttaattactctaattaattcacctgatttgcaaactaatcgattcatcttctaatcctcccatctttgctactca

SEQ ID NO: 70045 - DNA, 698 bp, Oryza sativa
  Clone ID: PAT_MRT4530_70655C.1
cggacgcgtgggcggacgcgtgggcgcaaacaggaccagtactttaatttcaccttgcaaattcagttgaattcggctcgttcaggttcagtcgtttgatcatcatggccagtatggccaagtcgctcttgtgcatctcgctcgtcgccatcctgctcctcgtcgagactactgctccacatggacaagcttacgccatcgattgcggggcgaagtgcgggtaccggtgcagcaagtcggggcggccgaagatgtgcctgagagcatgcggcacctgctgccagcgctgcggctgcgtgccgccgggcacctccggcaacgagaacgtctgcccctgctacgccaacatgaccacccacaacggccgccacaagtgcccttgatcatctcgaccaatatatcaccgctcgatcaccgcgccgccgctttgctatccaaccgaccggtgatgatacatggcggcaaccttgtgatgatcctagctagctagatgtgctacctacttcgtgcctgcatgcatgtagcttgcatatgcatgctagctttgctatatcgcgtatttgctacttggaatatgtatgatgtgtgtgcatatatatgtggcgtgtcgtgatcgatcgatcgatcgaccgtgtacgagcaaataagtaatataatgaagtatttgcttttatgattaaaaaaaaaaaaaaaaaaaa

SEQ ID NO: 70046 - DNA, 387 bp, Oryza sativa
  Clone ID: PAT_MRT4530_70656C.1
atgctgccggtgtccgccgtctcctccggcgccggcgccggcggcggcaaggcggcgctcggggagctggacatctcggcgctgccggtgttcgtgcacgtcgccggctgcgaggcggcggcggcggtggagtgcgcggtgtgcctgggggaggtgagggacggggagaggggccgcctcctgccacggtgcggccaccggttccacgtcgagtgcatcgaccggtggttccgggcgaactcgacgtgcccgttctgccgcgccgccgtcgtcgccggcgagccgggcggcgcggcggcggcggcgggggacaagggcgacgcggtggcggtggcggtggtgggtgtcccggatgttgtggtgcatgtgcaagtggaagaaggctga

SEQ ID NO: 70047 - DNA, 3015 bp, Oryza sativa
  Clone ID: PAT_MRT4530_70657C.1
ctccagtcccctcgcgaaaccctaactgtctccccctcctcctcctcctcctcctcggggtagatcttcgcgcgggctctcccgctggggcggcaccgcgcgcgccccgccgtgatggcgtcggacggcgcgcagatggaggtggagcggcggcttcgcgacatcggcgcccgcttcacctcgctcccggacgccgacgacgagctgctcagattaatcgaggaggcagaaacctggttggccagggttgaccagtcgccgccggagagcatgcacaaggctctccggccaacaatgagtgctctgattaagaaggagttactggatcacagtgtccctgacataaagcttgctgttgcctcctgtttaacggaggttaccaggatcactgccccggaggccccctatgacgatgatgtcatgaaggatgtatttaccagagttgttgaggcctttgagaagttggatgatatggaaagcccctcctatgcaaggagggttgcgatgcttgaaaccgttgcgaaggtccggagctgtgtcttgatgctagatcttgactgcgacgatctgatacgggacatgtttcaccacttcttcagaaccatatccaatactcatcaagagaatgtcatcacctcgatggaaactgtgatgaagtttgtaattgatgagagcgaagatgtccagcaagatatgccatcctgcctgcttcaagatctagcatcttaccttctgaagaaccttaaaaaggaagaaaaagaaactcttccagcatctttcgaacttgcagagaaggtaattaataagtgttatgagaagttaaagccagtgtttactcctttacttcggggcactcccttggatgagtacagcgaagttgttacatcattgttcgaagatgctttagatgctggagtagccgacaattctgatgcccctggaaaggatatggtggctgatgggaaattatctcataagattgtttcagatgagtcagctcaggaatcatcaaaattagagcaagatgccaattgccctggaaaagacggtactcctccaaacaatacttccacttcggcggttagcaatggttgtgctttaatagacagggtcaagtctccaagtggaccatcctcttctgataagaaggctgaactgccttctgatgacaatcaggcaaaagacactgatgatttgatatccggtgctaaagaaataccagaaccaatcaccacagagcctgaaaagccatctgatcacaatttaaagaaaagccataaacttgatacttccactgattctgaagtggttgatcattctaaggctgttaacaacaacgaggatattttagtctctagggagttatccccagagactgatgatggggataataagctgccaccagagactgggaatagagctgctgatgacaaatcgaaacatgttgataacacacctgctggcaagggaaagcggggccggcctcctgcatcaaagtcgcatgagaagaagaatgttggaaaaggcaaagtatcaggtttagagtctaaaaaagctgacgcagttagtgattctggtggaagggctacaaggcgactagctaaagatgatgatatcaagtcttcattcaaaaagactggtgaaggggaatcttcgaagaagaagcagaaggaaaatttgaaacagcaggaagatactccacccgatgaagacactgatgaggatctcagtttaaaggatatcgtatctcccaagtcttcggccaaaacaggtaaaaacaaaggccaggcaggtgacagtgggggctcaaaaaggaaacgtgcacaggaagctgaagagactccccagcccaagaagaacaaaattcttaaaggaaatcttgttggctcaagaatcaaagtgtggtggcctgatgacagaaagttctataaaggtgttgttgagtcatttgatgttgcttcaaaaaagcacaaggttgtttatgatgatggagatgttgaacgcctacaccttaagaatgaaaaatgggaattcattgatgaggggcgagacaacaatcctgacgcatcgtctgatatgccgcacggcagaaggggtagagttagcttgggtgagcaaacaaaggaaggaaaaatagaaacacccagcagtgggaaacatcgtggcactgatgtcgctgatcctcccaagaaaagaggacgccctaaaggtgtgcgctccagcaatagttcacaaaatgatgacagtcctttgaaggggaaaagtgcagaaaacgatgatgaagatatatccaagacacctaaaagtggcagtgccctcaagaatgaaggtggaagatcatctcgatccactggcaagacaaaggatggcctgctaaagggaagcaacaaggatgagactggtaacactaaaagcgcaagcaaatcaaaaaatgatggtggcagcaaacacaaggattcaaaagatgaagctaaatccagcggatcaaatccaaaaggtgcaagcactcccaaagctgctgatggatccaagacaaatggtctttcgaccaaaagaaagcaaaaggagaaagaaggcgagtcatctgaagaggaagagcatgtgtctgctaaaatttctactggaaagaagcgcagaaggaaggctcataactaatttgctctggccttgtgcagttcttccaaggggtacttatgaggcatgcagtctgaaggtttttggcatgagcagcctagcaatttatatggcttccatcccttggctggttgcctgccaagtcttgccctaatcgaccgtcacgaaacagctggtagttgtagcagttgcagtggtagttgtaatgtaggtgttacttttgttccttgtggtcagctgtgagcctctagcaaatatggtttcttgcttgctgtcgttcaacccttattagattgtattttctgctggagctatttgagacgtcaattttgcagcaagcatgaatggagagaaatgtcgtagttcatatcaaaaaaaaaa

SEQ ID NO: 70048 - DNA, 159 bp, Oryza sativa
  Clone ID: PAT_MRT4530_70659C.1
atggcgttgagtggtccgagcggtggcgacggcatcaagtgggcttcgcatgtggaggatctgacactgaatatgcagttcctcacacttaggttgaacgccatggaggctcattgtgaacaccctaagagcaaggacgagagaggatttgaaaaataa

SEQ ID NO: 70049 - DNA, 166 bp, Oryza sativa
  unsure (1)..(166): unsure at all n locations
  Clone ID: PAT_MRT4530_7065C.1
cccacgcgtncgggcttaacagggggaggggcggggatctccatccatcccgggagccgaacaggggaggggaggggatcctggaaaatgccttaaccttattaaaataaagggtccaaagaagggagatgccgcccatggaaatgggaagccctctggccaaaag

SEQ ID NO: 70050 - DNA, 127 bp, Oryza sativa
  Clone ID: PAT_MRT4530_70660C.1
cgacactatatgaagatgctgtcgacgtcgtgatgcacgtcgcgacgtgaagcgttggactcctagtagtatggcgggccgctcctgtgactttgctttgtggtagtatgtaggtggttggtttgtt

SEQ ID NO: 70051 - DNA, 373 bp, Oryza sativa
  Clone ID: PAT_MRT4530_70661C.1
aaaacaaaaaaatagggggtttaattttttttttaaaaaggaggggaacatttttccttttttaaccattacataagcttaagcaataacagataacaaatcctcctcctcctttggggaaaattttaaaacacaatccccttataagttcttatttttaggaaagtagcgtgcatgggcataaatggcaggggggggcaggttaaaaataaaaatgctgggcaggggggaaacaaaacaccatattgggacagagcaaaagcctccgaaagggagtttttaggcaaaaggcttttcccacttgaggggcttaaccacctcccaggagaagtttgggtcgccctttccaaagggaccaaaagccgcccttttg

SEQ ID NO: 70052 - DNA, 322 bp, Oryza sativa
  Clone ID: PAT_MRT4530_70662C.1
cccacgcgttcgaaaaaaaaatataaaaaaaaaaggaataaacaaatagactcacttagctaattaaaaaataggagcatgtcgagaaaagcgacggcaacgtgaaactgtgctgacatgagcttgttcgtgaagaaaggtaccagctgtggcgttcgcgtagtcgaagcttagaagagccacttggaggaggttgtcgtttgttaggtgaacagcaaatgcaattgcggcgcctgctgttcctgcacccactgcgggaaaggccgggggagtcccgaagtaaccgagcactcgccgcctgcgagttacctactttggttag

SEQ ID NO: 70053 - DNA, 364 bp, Oryza sativa
  Clone ID: PAT_MRT4530_70663C.1
aggcttgaggtactattacccgatttaaattattttgctttcatactaacaaacagtttaggataggcatacatcatatcaccttatttttaatattcatagcatagttgaactgccatgccaagcatgtatgtagagcaaaagtgtaatacagtattaagaagttaattttgcagcttgcggttctggggaagatacatcacccgaatctcccgatgctcctgggagcgtgtgtggagagggggtgcctggtgttctagtacatggagaatggtagtctgtaggaccggttgtggtgcgaaagtcggcctgtggtgctgccgtggcgtgaccggttgcaaattgtctggtaggttgtttttgc

SEQ ID NO: 70054 - DNA, 448 bp, Oryza sativa
  Clone ID: PAT_MRT4530_70664C.1
acagagaacaaactattatatattgcaaaatgaaaattatctccatagattacagatgaatactacatttttaaatcaaaggatagagactgaattgaaatgatcaaatacagtacattaaagacatgtatcaaacatctgttaatttttgccacataatttgcatacaaaccgttctgataaatgtaaaatttccatcaagaaatttctgccacgagttcatctgtaatgaatgtacttatctgcatccacatctccagcattacgcgatatgctatctatcatgagagattgatgatcttagagcatgcaaaagtaataaagtgaggtagcacatcagtccactgctctttcaaattcaatcttcggatgatccctaagagttctgcttaatttgatcaatgcagcagggcctaatcttaaagctcccgaagacattagcataagg

SEQ ID NO: 70055 - DNA, 510 bp, Oryza sativa
  Clone ID: PAT_MRT4530_70665C.1
atggcagtagcggtggggaaggccgacacgggcgaggtggtggtcgccggatccctcgacggcgactctctctcccggggccccctcccttgttctctctgggcgaggtggtggccggcgcagaggccgggtgaggtggtggtggcaacgtggaggacgggcgatgtggtggtggtggtggagaaggccgacatgggcaaggtggtggccggcgacccaaagtcagcgaggggtgtgcggcagtcggccgacgggaggaataacacggcggcagttgtccctctcggatccgcttggcggcgggaggagcttggtggtggcgggtgggcggcggggatccatcgtggggcggtgggagttgaagccggcgaggggcatgtggccggcggaggaacaaggcggcagcagcggctgtcccctcctacatccatgcggatccgacggtggcgggaggagctcaacggtggcgggaggagcacggcgggggcggcgggtggccaacgggtgtga

SEQ ID NO: 70056 - DNA, 1380 bp, Oryza sativa
  unsure (1)..(1380): unsure at all n locations
  Clone ID: PAT_MRT4530_70666C.1
cccattcttcggacatcggccatntgccggtgtcgctcggccctgtactggtctttccggatgggttncgggngtttttggtnnngnttggggtgccccgtctacgccatgaacccagactgccagtcacgcgtggcttgtggtacgtcacgtacctgcatcacactcaccagggcgatcccacacataacgactccagcgagtgggactggttgcgccggggcgctcgccacccgtggaccgcgactacggcttccttaaccgagtgtttcacaacatcacggacacgcacgtcctgcaccacctcttccctgccatcccgcactaccacgcggtggaggcgaccaaggcgatccgccccgtccttggcgagtactaccagttcgatcccacacccgtcgttaaggcgatatggcgcgaggctaaggagtgcatctacatccagtccgaggaccacaagggcatcttctggtacagcaacaagttctagttcctgcagcaacgtcagcgggcgtataggaagggctgacagaataagccgtgtcggtcttgcctcatcgcttcatctaaacccataatctacttgaagtcttgaattaattgtaaactcaaatgatattctccaataaaaaagaaaaatgcctctctagaaaaaaaaaaaaaaacgtcgctcggctgctgctcctcgtcgtgcagctcaccgtcgggtggccgatgtatttggtgttcaacacctggggtcgccagtacccaaggttcgccagccacttcgatccctctgggcccatctacaaggggcgggagcgcgtcttcatcgccatctcggacatcggcatgctggccgtgtcgctcgcgctgtacaggcttgcggagggttacgggttttggtgggtggtgcgcgtctacggcgtgccgctgcttgtcgtcaacgcgtggcttgtggtcgtcacgtacctgcatcacactcaccgggcgatcccacactacgactccagcgagtgggactggttgcgcggggcgctcgccaccgtggaccgcgactacagcttccttaaccgagtgtttcacaacatcacggacacacacgtcgtgcaccacctgttccctaccatcccgcactaccacgctgtggaggcgaccaaggcgatccgccctatcctcggcgagtactaccagttcgatcccacacccatcgtcaaggcgatatggcgcgaggctaaggagtgcatctacatccagtccgaggaccacaagggcgtcttctggtcgtctattcctcctgctctcatctcctacgctctggcaacacctctccaagaccccactgacccatcgccgcctcgcccaacacccgcgcgccgttcggcgacttatggctaa

SEQ ID NO: 70057 - DNA, 381 bp, Oryza sativa
  Clone ID: PAT_MRT4530_70667C.1
ggcttattcaatgtttgatagttgcagtgaagatgaagataacatgtctgttcctgtttctttggctaagaaagaaaacactaaagatgttgacgaaacaaaatacccaaatagtgagttaaatgatgacaccacgaaaaagagtaatggtgccaagaaaagaaaaggtgatgccatcagtcaggatcatgcacctttgatggatctaacaaatgcagatgaaccattggtttcaaaagagggcagaacaaaaaagaaatcgaagaaaaagggaggaaaacagttagaggtaggagatggaaaacattccaacaagataagaacattagaagatggattgatagtaaaagatctgtcaacaggaaacctagatgcagaaat

SEQ ID NO: 70058 - DNA, 154 bp, Oryza sativa
  Clone ID: PAT_MRT4530_70668C.1
ataatgttttccattgaaatgatttcgtttgtttgatgtgtcaagtgtgcgagtgtacctgtaacatagttgtagcagcaggatatagggggaaaaaggtgagtgaattacatatttacagtttgtgtcatcttctattaaaaaaaaaaaaaaa

SEQ ID NO: 70059 - DNA, 228 bp, Oryza sativa
  Clone ID: PAT_MRT4530_70669C.1
atgacgtattcactgttcaccggcgaggacgagtttccagcggtctccaggagaaacgaagatgaggccggggatgaggaggtctcttcgatgccgaggaaggtggtggcgtgtggttcggtgctgctcccgtcgacggggaggattggggagtggaacggtgccgggataggagaacgacgccggtggggcgtcggccatcaatggcggtggttcaccggagattaa

SEQ ID NO: 70060 - DNA, 5625 bp, Oryza sativa
  Clone ID: PAT_MRT4530_7066C.1
atgccaatcgatccagagaaattcacgcctgagcagaagcaggagtttgaagcgacgctgcagcaagcacgagatcagttcctgaactcgttcatgcaaacccgcaaggggacacttgttcagaagtataaaataaaattggttgctgataatcttgggaccggttcttctaaatatggagaggtgaaaaaagctccagaaggctcggctcagccgagcaacaaaggtgctactgatggttctctaggaaatcaaggcgacaaccctcaaggggtccatggagtacaaggtgatagagtgcatggagctcaaggtggtggtgctcaagggccgcaaggaggaaatcttaatcagagtaacgagctagcacaagattttttcaataacttccaagatcgggttgattacgctgtgcatcatgctctgatcaatcagtccggggtattagtcaatacattgtcaaacatgatgaagacaatagccgatggttcgatagtcgagcatcaggctacaggcccagtttacttgcaaggaggtgtcttcccgaattatcgatctttgatcaccgatgttcagccatctgttcaagcggttcgctccgttgcacccacaattcagccgacggcgccagcatcaactcccctgcctgtgcagcagcagccgattcagcagacaccaccaatccagccagttgtacagccaatccaacaacaggtcgtacaaccagctcagcaaacaccaccaaggcagcagcctctgcaaccaattcagcaaacgccaccaaggcagcagcttcagccgatccaacagactctggtgagacagcagatcattcagccaattcagcacccggggtcggcaaatgcatcggccgggtttgcaccacctggtgggcaacttgcgcagcaatttgtaaaccaagtcgtcctagaacatttggttcaccatgcacagccggacggcatagtgatgcctcagatggttcctgagcacttgtttaaggttccaaatttctccaaatttttagggcaagagggcgtgtcaacttatgagcacatcagccgattccttgctcagtgtggtgaagcatcggctatagacactctgaaagttaggttgtttcggttatctctatctggatcagcttttacttggttttcctctttcccatatgggtcaatcaacagctgggccgatttggaaaagcaattccacagctacttctacagtggggttcatgagatgaagttgtctgacttgacagcgattaagcagtggcatgatgaacccgtgcacaagtatattcagaggttcagagagatgaggaacaagtgctttagcttgagtttgaccgatgctcagttagccgatttggccttccaggctgacaagatttttgatttgctactccgagaaaagcagattcagtttcctgctggtcatatgatcctatctgctgaggaattaggcaagaagagatattgcaaatggcataattctgggtctcattctactaatgattgtaaggtttttagacagcaaatacaggttgccattgaagggggaaagattaggtttgatgattccaagaagccgatgaaggtcgatgggaatccttttcctgttaatatggtgcatacagttggtcaagcagccgatagggcccgtgcaaagggttttcaagtaaattcggctaagattatcaacaagtatcaaaggaagtatgataagcaggaggagaggcattatgaagaatacgacgatggttttgatcctcattgggattgcgagttcttcagattctgctggaatgaagggatgaggttgccatctatcgaaaactgccttggatgcagtgatatcatcgagagctcaaaccgatcacgtaatagggataatcggctgagacaggcaagactccctgttcgtcaaagattgggtccgatgaatcaagatcgtggccaagaggatgaggtgatcaggaagaatcaatggtgtccttctggtattttcacggagaatcagaaaaggagggtccagagattgaggagcagggagcgttttcaggaggttgaagaggaaatcaaccatcgactgaggaaaccaaaaccaagacaggagtggcatgtcaagaatcaggttcctgtagccgatgatgctgcagccgatgaggtgaagaggttggcaaaagggaagagtgttatagcggcaccaattaacatggtctttacattgccagctgaattcgggatcgatcaggccgatgtcgatgaattggaagaggaatcggctaagttggtcctgtcaccagaacatgcagtattcgagaaacccgaggggacagagaatcggcatcttaagccattgtatataaatggctacgtcaatgggaagccgatgtctaagatgatggtcgatggtggggccgcggtgaatttgatgccttatgccacattcagaaagctgggtaggaatgccgaggatctcatcaaaacaaatatggtgctcaaagactttggtggtaatccatcagagaccaagagtgttctaaatgtggagctgacagtcagcagcaagactattcctaccacgttttttgtcatcgatgggaagggttcgtacagcttgttgcttggaagggattggattcacgccaactgttgcatcccttcgactatgcatcaatgcttgattcaatggcaaggcgacaagatagagattgtgccagccgacagccaatcgaagatggagaacccaagctattactttgagagcgtcgtggagggttcgaatgtctatgctaaggatacagtagatgatctcgatgacaagcaaggtcagggttttatgtcggccgatgatttggaagaaatagacataggtccaggcgatcggccaaggccgacatttattagcaaaaatttgtctccagagtttagaaccaagctgatagagctcttaaaagagtttagagattgcttcgcttgggaatactatgagatgcccgaactcagccgatcgattgttgaacatcggctacctatcaagccaggggttagaccacgccagcaacctccgaggagatgtaaagccgatatgctcgagcctgttaaagccgagattaaacgattgtatgatgctggtttcattcgtccctgccgatatgccgaatgggtctctagcatagttccagttattaaaaagaatggcaaggtcagggtatgcattgattttcgagatctaaataaagctacaccaaaggacgaatatccaatgccagtagccgatcagctggttgatgtcgcatcagggaacaaaattttgagttttatggatgggaacgcaggatataatcagatctttatggctgaggaagatatccataagacagcttttagatgtcccggtgcaatcggcttgtttgaatgggtcgtcatgactttcggcttgaagagtgctggagcaacatatcaaagggccatgaattatatatatcatgatttaatcagctggttggttgaagtctatattgacgatgtggttgttaaatctaaagaagtagaggaccacatagccgatttaaggaaggtttttgagagaaccagaaaatatggcttgaagatgaatccgacaaaatgtgcttttggtgtgtcggctggccagtttttgggatttattgttcatgaaagtgggatcgagaaaggaataccgtttaggttatatttatcggctggtgagaagtcaatcggctcagttttgattcaagaattggaagggaaggtgcgagttgtgttttatctcactcgacggctcttggatgctgagactccatattctcctgtggagaagttatgcttgtgtctgtatttttcgtgtacgaggttaaggcattatctattatctaacgagtgcaccgttatatgcaaagccgatgtagtcaggtacatgctgtcggctccaatattaaagggacgagttggaaagtggatattttccttgactgagtttgatcttcggtatgaatcgccaaaagcgattaagggacaagctatagccgattttattgtagaacatcgtgatgattcaatcggctcggttgagatagtaccatggactttattctttgatggatcggtatgcactcatggttgtggcatcggcttagttataatttcccctaggggggcatgtttcgagtttgcttatactattaaaccatatgcgaccaataatcaggctgagtatgaagcagtgctcaaggggttgcaattactcaaggaagttgtagccgataccattgaaatcatgggggattccttgctagtaatcagccaattggcaggggaatatgaatgcaagaacgatacattgatggtttataatgagaagtgcctggaactaatgaaagggtttcgactggttactttgaagcatgtatctcgagaacaatatcttgaagctaatgatttggcccaaggggcatcggggtataagccgatgatcaaagatgttaaagttgaaattgcagcagtgtcagccgatgattggaggtatgatgtgcatcagtatttaagtaatccatctcaatcggcttctaggaaattaagatataaggcattaaagtatacactattgaatgatgagctttattatcggacgattgatggggtattacttaagtgcttgagtgccgatcaggctaaggttgcaatcggcgaagttcacgaagggatctatggtactcatcaatcggctcacaagatgaagtggttgcttcggcgtgcagggtacttttggccgacaatgctagaggattgtttcagatattgcaagggatgtcaagattgtcagaagttcggagcaattcagcgagcaccggcgtcagctatgaaccatattattaaaccgtggccgttcagaggttggggaattgatatgatcggaatgataaacccaacatcgagtaaagggcataaatttatattggtggcaactgattatttcaccaagtgggtagaggcgattcctttgaagaaagttgattctggggatgctattcaatttgttcagaaacacataatctaccgatttggtcttcctcaaactattactacagatcaaggttcaatcttcgtgtccgatgagtttgttcagtttgctgatagaattcaagttcccccttacaaacttgtttatggtcatgaggctgttttgccatgggaagttagaatcggctctcgacaaacggagttgcaaaacgatttaacagccaatgagtattacaatcttatggctgacgaaagggaggatttggttcagtcacgattgcgagcccttgcgaaggttactagggataaggaacgtgttgctcggcattataataagaaagtggtacctaaagatttttcggaaggagaacttgtatggaagctgattttgccgattggtactcgtgatagtaaattcggcaagtggtcgccgaattgggaaggaccgttccaaattcataaggttgtgtctaagggagcatatatgttgcaaggacatgacggtgaagtttatgagcgagcgctcaatggcaaatatttgaagaaatattacccaagtgtttgggttaacgcatga

SEQ ID NO: 70061 - DNA, 590 bp, Oryza sativa
  Clone ID: PAT_MRT4530_70670C.1
ctcctcttcatcctcttcctcccgctcgccgtcgtcgtcaaggaggagcacaagaacgtgtcccacctcgagcgcgctctccagcagccgccgtccatcgccgttgagcaccccacgaaagaagccgacggcggtgacgccacagcggcggcggcgtgcggcgggtgcggcatcggaaggatgttcaggctgccggagttgggggaggactacagcatcatgcaggcgctggtgagcgtggagatggtggtgctgttcgtggtgtcggtgttcgtcatcggcgggacgctgagggcgatcgacaacatggcacaaatcggccagttgctggggtaccctgcgaggagcgtgaacacgttcgtatcgctcatcagcatctggaactacgccggccgcgtcggcgccggctacctgtcggagatgctcctcgcccggtacaggttcccgcggccgctggtgctcaccgccgtgctccacgcctcctgtgtcggccaccattgcctgcctgcggagccgcgtgcctgagcgtgcacacgtatcattaatagtgatattattttcagtaccagttttaaataaactgataatat

SEQ ID NO: 70062 - DNA, 1722 bp, Oryza sativa
  Clone ID: PAT_MRT4530_70671C.1
atggccggcggcgagccgacgctgatgccggtgtcggcgatgtgcacgccggcgttcgtggcgcgggtggtgcggagccggtggttcgtggtgttcgcgtcgatggtggtgatggcggcgtcggggtccacctacatcttcgcgctctactccaaggagctccgctccacgctgggctacaaccagcagacgctcaacaccctcagcttcttcaaggacctcggcaccaacgtcggcgtcgtctccggcctcgtccagcaggtggcccccacctgggcggtgctcctcatcggcgccgccatgaacctcgccggttacctcatggtctacctcgccctggaccgccggcacggcggcgccgccggtgtggctcataacttcccggagagccgcggcatcgtcatcggcttgctcaagggcttcgtggggctcagcggcgccatctacacgcagctctacctcgccatctatggcgacgacgccaagtcgctggtgctgctcatcgcgtggctccccgccgccgtgtacatcttcttcgtgcacaccatccgcgtgctgccgtaccggcggcggggcgacggcgaggagctcgacagcaagcccttcttctgcttcctctacatctccatcgcgctcgccgcctacctgctcgtcatgatcgtcgtgcagaagcaggtccgcggcttctcccacgcggcgtacgtcgtcggcgccgccgcgctcctcctcatcctcttcctcccgctcgccgtcgtcgtcaaggaggagcgcaagaacgcgtcccacctcgagcgcgccctccagcagccgccgtcgatcgccgtcgagcaccccacgcccacgaaagaagccgacggcgagccggcgacgtcgtgcgtggggaggatgttcaggccgccggagttgggggaggactacagcatcatgcaggcgctggtgagcgtggagatggccgtgctgttcgttgtgtcggtgtttggcatcggcgggacgctgacggcgatcgacaacatggcgcagatcgggcagtcgctgggctacccggcgaagagcatcaacacgttcgtgtcgctcatcagcatctggaactacgccggccgcgtcggcgccggctacctgtcggagatgctcctcgcccggtacaggttcccgcggccgctggcgctcaccgccgtgctcctcgcctcctgcgtcggccacctcctcatcgcgttcggcgtcccgggctcgctctacgccgcctccgtcatcatcggcttctgcttcggcgcgcagtggccgctgctgttcgccatcatctccgaggtgttcggcctcaagtactactccacgctcttcaacttcggctccgccgcgagccccatcggcgcctacgtgctcaacgtgcgggtggcggggcggatgtacgacgccgaggcggccaggcagcacggcggcgtcgccgtcgccggcgacaagatctgcaagggggtgatgtgcttcaagcgctccttcctcatcatcaccggcgtcaccttcgccggcgcgctcgtctcgctgctgctcgtgtggaggacgaggagcttctacaagggggatatctacgccaggttcaaggtggcgccggcgacggccgcgacgtcggcggcggcggcggcggaggcgagctcgccggaggtggaggagaagaagggcactgagaagaacaagaaagacggagttcatgaacacgtgtctaactga

SEQ ID NO: 70063 - DNA, 297 bp, Oryza sativa
  Clone ID: PAT_MRT4530_70672C.1
gggggttcttttttttttttgttttttttctttttctgggccaacccaccaaaaattgctttgttaaactgaagagaatccccgcggggccaaccccttttatcccagttccctctttttaacccccttttttaaaacataactggaaacgtccttgccccatttttagatttaactgggggcgaggggaccaaaccttttgatccaaaagggcccaagtttttgaccccaatgacatttcccttcccggttttaccgggaccgcctgtgtccttggccatattcattccgcccccg

SEQ ID NO: 70064 - DNA, 301 bp, Oryza sativa
  Clone ID: PAT_MRT4530_70673C.1
aacaaaaaaaaatcgtttttgaccatttggccaatttttttattaccatgggtttgggcctatgattagcccggggctagcattcacatatgcatgcttttaaacctatgttgatccatacatttgtccatacatacccaggtggtgttgcccccaaccagatgaaaaaaaaaaactggacccaccaactgggaaaggggaaaccaatgccggggggccccatttaaacgtttaaagctgccaaaacccaatagatcaatcgagtctcctttgtataaagctcacaagtgagcttgctggc

SEQ ID NO: 70065 - DNA, 306 bp, Oryza sativa
  Clone ID: PAT_MRT4530_70674C.1
tcttcctcatagggaagggaagagtaaggaggaggaggaggaggaggaggggaggtggtagatgctcggagggtcgccccctcctaggactaccacccctatccttctcaccacttactatctgtcaaccaactccccttcatcctcgatcatgacatcgctccgtatctgtccctcataaaccactacaacacctaccatattcctctacactgcttacatatacctgcagccactccttcatccatgactctgccccggtggcctgtatccatacaatccacctcaccacctacattaaccttt

SEQ ID NO: 70066 - DNA, 357 bp, Oryza sativa
  Clone ID: PAT_MRT4530_70675C.1
atgcacgatcggtcactccgtccttccttcgtcgtgccgtcttatctctcatctcgacgcagcgttcgccgaaagctagccccggccgccgtagaacaagaatccgtgcccggtcgatcggtgaacctgggtatcaagacggaggtagttgtagattccagatttcctgaatcccgatgttgggtatcctgttcgcccactatttgtacggtccgctgtccgcagccgttcactggcaattggcgtgcacttgtcatgcttagcagtctgcctcgcatggcactggtgatagcagaaaacttctcctacagcgtactagttctgagccaggaccagcgcgataccacggtagaatat

SEQ ID NO: 70067 - DNA, 367 bp, Oryza sativa
  Clone ID: PAT_MRT4530_70676C.1
atgtggggaggggaggaggaggaggccatccggtcatggcccctccgccccctcccgccaccgcacatccattgcccgtggcctggcccgtcgtcgtggtcgccgtcatcgtcatcaccagttgccgtggtcgtggtcgtcgttgtcatcgtcgtcgtcgtcgtggcccagtgcgctgtcaccgtcgcccgcaaggatgggagagaggtgggcgaggaggaggagaaagagatagggatagaggtgggtgggtggtctgacagtgggaaggtgggtataatctgggatggcaacccggacatccccgtgggtagcaccctcccgtatccacacccgagatctaaaattcccctggccctcgtgccgg

SEQ ID NO: 70068 - DNA, 207 bp, Oryza sativa
  Clone ID: PAT_MRT4530_70677C.1
atggcgcgggatacggaggcggcgaccgcgcgggacgcagaggcagcgacgttgaactcctccgggagggagcaatggaggcgcgggacacagagaggatggtccggtcttcttcttcaccgtcaggatgggggtggcggtgggcggcggcaggcacggcagcacgcacggcgcagcggcgcagacggcggcaggttggataaatga

SEQ ID NO: 70069 - DNA, 395 bp, Oryza sativa
  unsure (1)..(395): unsure at all n locations
  Clone ID: PAT_MRT4530_70678C.1
cccacgcgtncggccacgcgtgcgcacacgcgttcgatgacgcgtggcgggcgctcgatcacatgctgtcaggcatttacagggagctcgtcgccaccgaggccgtgcaccccatagccgaggcgttccccagctgacggacaggggacttggagcgcgcggctgcaagcctcacggcgcactgcaacgtggacattctcaatgggccatgtggtgtctgctactagctngggtatcctacgaccccaagaaccgttcactaggctactatagatagctgcgtgtgagtgactatgtgctgttgctaaataattagtgctgtctattgtcaagaagcatgtatgtatatatatgtggngaataaatgatgaactttcatgctcttctgtaatngt

SEQ ID NO: 70070 - DNA, 339 bp, Oryza sativa
  Clone ID: PAT_MRT4530_70679C.1
ctaccaacccgaagctgcttttgcttccacctcctcctgtcgccgcttgtcgccgtctccggtcacctcaagctgcaccaccacttccattgcgttaaccgcatcgagcagtaccccggccaccgattcctcaaagccgttcaccaccaaaaccccttcggcaccataaaggccgcaggtccttcaggccgctatccactgcttcgcgctcacataacaccgtcggactgccgccgtcatcgccgacccgaggcgctgcctccaacccctcaagccacccaccctctcaccacctcctcgtcgttgcgcgcctccttgtcgctgcgcgggcacggttga

SEQ ID NO: 70071 - DNA, 252 bp, Oryza sativa
  Clone ID: PAT_MRT4530_7067C.1
atgaggttccttggtctcctgagcttggttgctctcatcttcctcctcagcttcaggtctctgattcatcagcaagttcttgttggagaaggcgcagcagccagcgggttcctccatggcagcggcgacgacggaaggaggcagcatgcgagggagtgggaggaggagaggaagaagatgaggtggttcatggtcagggactacgcccacgcgcggcgccacgagccgaggaacaaccggctggatccttag

SEQ ID NO: 70072 - DNA, 380 bp, Oryza sativa
  Clone ID: PAT_MRT4530_70680C.1
tccaaaagattaggcactactgacaaatcatgatctatctagtgaaatgtagagtgctccatttgcactcgtatttccaacccaactagtaatcaacacttctgttataggggaaatacgtagtgcaaacctggaaactaccttaggatcacaatggacgtctgagatattttactcccagatttaaccatgagtagttttctttactaagtcaaaaaaacccagtaaaaaaatttactcgtggtgacgttgacattctcagacgttcatttgtgtatcctatgataatctttagatttacactacatatagagtttgcactgcatattttccctgttataggctttgatcagcccttaaaagttaaaaaaaaaaaaaaa

SEQ ID NO: 70073 - DNA, 732 bp, Oryza sativa
  Clone ID: PAT_MRT4530_70681C.1
ccggccgggatccgtgttactctgcatcttagagtgaaagtataacaactaaaatcccgccacactggagatcattatcgtcttctgctctccttgctatatagctgcatgcatgcagcctctgcgccgcatgatgctgctacacgtctccacagacaaatattggatgacagcgcatctcgtgccgtggctgcagatgctcatgccatgcgatgtcttcatgaggcagcaatacagatcatcgtgatcctcctacttccctgcacccatgcatcgactgataaactgactgcatgtgcaggagcaacgatgccttatactctaaatgagcgctaaacatatccacatgatcatttacattacaatcctatacccagatgtgcgtagaaactactgctaccatcatatgcgctgtctcactactacaatcatttgtcaaactcatctactgctctacctaagtcctaaacttggcatgcaagtatagcagcatatactgaatataccagactgtccactgcactattccataccacactagatcgtgtttctgcattgtagcagtatagtagtacaggagagaaaaataaagtcatgcatcatcgtgtgtgacaagttgaaacatcgttgtgatacaagtctgaataataatgtcatgctattttagacataatgcctctgtaaggatatatcctagtacattgccgaaataattatcgtcacatctactat

SEQ ID NO: 70074 - DNA, 453 bp, Oryza sativa
  unsure (1)..(453): unsure at all n locations
  Clone ID: PAT_MRT4530_70682C.1
gccttgattacacgccggagtagcttcttccatgtggcgtnggagatttgcagaccaacataccaagtgcgtttantggtaggatggctttcttgtggtgttcacttctgtggacaggatattgttgtcttgttgaggtttcttgcggtttagtcagcagagattgcaatgatcatgaaggcaattgcatcgaatttntgtgatctaagcatgggaattcacaatggtgtggtgttgcttgccgacgacgaatatggaaattggtgattgtacaaggtattttcatgtgtatggaaacgacaatacattgtaccagcttaatatatcatcgcttcatttgtttgcattggtttagctcatcatggcaccctctctgttttnctgggctggtctcacacacaacttattgcaaataggcacattttaggttatctccacatatgtncgtctang

SEQ ID NO: 70075 - DNA, 1149 bp, Oryza sativa
  Clone ID: PAT_MRT4530_70683C.1
gacatcgcttcgtgattttcgtgccaaatgacaaaggaaaagtttttggtcaaggaatttttcattgtaaacatgtactgctccttggaccaaaacagcacatgagtggttgcataagctacgtgagaaaaagagaagtcatgaaggccgcgggttttttttttttttttttgcacgaatcattctagactctctattcctatttttgatttgcacaagatcccaggcttttattttcgcctcatctcgtgcccccagacataagccgagtgctcatgccaacatgatcatttcgtcgtagaagcgagtacatcagcccttgggcgtgagaccagagtcgtaagatcccaccgaaggttgtcatttcagaaataatgcgcttatttcttaccagccttggcagcggacttggtgaccttgccagcagcgccagtggacttctcgacggccttgatgacaccgacggcgacggtctgtcgcatgtcacggacggcgaaacgacccagaggagggtagtcggtgaaagcctcaacacacatgggcttggagggaaccatcttgacgatggcggagtcaccagacttgatgaacttgggggcggcctcagtagccttaccggttcggcggtcgatcttctcctggatctcggcgaacttgcaggcaatgtgggcagtgtggcaatcgaggacgggagcgtaaccagcaccgacctgaccggggtggttgaggacggtgacctgggcggcgaaagaagcggcacccatgggggggtcgttcttggagtcaccagcgacgttaccacgtcggatgtccttgacggaaacgttcttcacgttgaaaccaacgttgtcaccgggctgtccctcagtgagctgctcgtggtgcatctcaacggacttgacttcagtggtgacgttggaaggagcgaaggtaacgaccataccgggcttgatgataccagtctcgatacggccgacaggaaccgttccaataccgccaatcttgtagacatcctggaggggaagtcggaggggcttgtcgttgggacgcttggggggctcgatggagtcaatggcctcaaggagggtctttccggagagcttgccagacttgatctcacgctcccaacccttgtaccaggggcagttg

SEQ ID NO: 70076 - DNA, 304 bp, Oryza sativa
  Clone ID: PAT_MRT4530_70684C.1
caaccaaaacgaggccgtaatatatgcatactgatttaattttaactgagatcagcccatcacacaaacagatagccaatacaacccatggcacacaatgtgcacattgacatatttacagcgagcttgctcaggtcgcacagagccaattgatgcagcctagccacacacagtttttaccaggcatacagcatcacctattgataagaagtctatttcaactctaccaaaacataaatattgaaactagggtataagtgaagcaaaagagtgctcctaaagctgaaccaatgacggtagcgta

SEQ ID NO: 70077 - DNA, 606 bp, Oryza sativa
  Clone ID: PAT_MRT4530_70685C.1
ggtcatttcatccactagaagttccaacaacccatatctctcctcaaataaacactgaagctggacctaggaaccgtgaacctacaagtccaaaagcaaggcaatctgatttttgtgttttaaatgatgatggtgttcgatctcctgctaaacacaccagtttaagcaatgttgaattgtatgagaaatctgtttcaagatctactggaaagggctgtacatctcttgatagaatcgcagatttatatggttctatagccaactgcgatgatgacaacatgttgctgaataatctgtcagcacaccccaaggctgtcgttactccttgtggtaatgctaatgcttcaagctctcatgaagatgaacctttgttgactccagatgttgcatatttgagaactaggaacaacattctgaatgaaactaatgaaggtccttcttttgctgctctcagccttgtcaagaatgttgcaaataagtttaggtccagaataacacatttcaatagtagaactccttttttgggcgaagaaatgccatcatttaagttgttagattcagatgatgatattagtgattgtgacaaagagaatgaagttgctgaag

SEQ ID NO: 70078 - DNA, 159 bp, Oryza sativa
  unsure (1)..(159): unsure at all n locations
  Clone ID: PAT_MRT4530_70686C.1
cagccacggggtaactcataccttatcactatgtctgtgccngatttcacacattgggtcaatctaggggcatctntcttctttcagcatccagcagcttgccgnatcccattaactgggtttggtgccagatggtcagagtgatggcttggcagacag

SEQ ID NO: 70079 - DNA, 480 bp, Oryza sativa
  Clone ID: PAT_MRT4530_70687C.1
cggacgcgtgggcggacgcgtgggcggacgcgtggggcatctcccctctcatccccgccgccgcgatggctgggacagcaggggcggcggcggcgtcgtacgcgcagcaccggcggaggttctgcgccatcgtggcgaccgcggcggcgtcaccggtgccggccgccgtcgagatggtgcacaccatgtcgctcgtccacgacgacctcccctgcatggacgacgacgacctccgccgcgggaagcccacctgccacgtcgtctacggggagcccatcgccgtgctcaccggcgacgcgctgctctccctctccttccaccacatggccaggttcgactcctaccctccggacatcgacgctgacaagcaccccgcccgcgtcgtccgcgccattggcgagctcgcgcgctgcataggctccgagggcctattcgccggccaggtcatcaactcgtcattttctattcgattccttattc

SEQ ID NO: 70080 - DNA, 1494 bp, Oryza sativa
  Clone ID: PAT_MRT4530_70688C.1
atggctgccttccccccgctcgccgcctcccgcgtccgcatctcccctctcatccccgccgccgcgatggctgggacagcaggggcggcggcggcgtcgtacgcgcagcaccggcggaggttctgcgccatcgtggcgaccgcggcggcgtcaccggtgccggccgcggcggcggcggcggcgacggggtttgattttaacgcgtatatgggtgagaaggctgcggcggtgaaccgggcgctggacgcgtcgatcccggcggacgagccgcccgcggcgctccacgaggcgatgcggtacgcgctgctggcgggcgggaagcgggtgcggcccgcgctgtgcctggcggcgtgcgcggtggtcggggggcgggaggcctgggcgatgcccgccgccgccgccgtcgagatggtgcacaccatgtcgctcgtccacgacgacctcccctgcatggacgacgacgacctccgccgcgggaagcccacctgccacgtcgtctacggggagcccatcgccgtgctcaccggcgacgcgctgctctccctctccttccaccacatggccaggttcgactcctaccctccggacatcgacgctgacaagcaccccgcccgcgtcgtccgcgccattggcgagctcgcgcgctgcataggatccgagggcctagtcgccggccaggttgttgatcttgagatgactggatcgaccgaaactgtacctcttgaacgtcttgagtacatccatctccacaaaactgctgcattgcttgaggcatcagtggttattggggcaatcttgggaggtggctctgatgagcagattgaaagtttgcgcatgtatgcgagatcgataggattgttgttccaggttgttgatgatatacttgatgtgaccaagtcttctgaggagctcggcaagacagcagggaaggacttggcgagtgacaagacgacatacccgaaattacttgggctggagaaatcacgggagtttgcagaaaagttgctttctgatgcaagggaacaactttcaggatttgatcaagagaccgcagcaccacttctgcacctggccaattatattgcctatcggcagaactgaggtgatgggtactccattgattattgttgatttgtaactttgtaagctcattaagattcagatttgaggaatattctgaattatcttgtgatacgtgctagttgtagtttcttatcttgagaagaatatctggttgacaaatgtcaatttcctagttagtcagtcaaaacggaataatgaaaatcagcctctctgccctataccccaattgcttgattcttgacaattgaacacatcatatcataaaggaagaaaatattttatcttccatgttaaaattgattatcaaagttcatgttcaaacctgttttagtgtttatcctacgcaattgatttcgttttaagtgattgtatcaggttcgtttttcaatgagtgccaatgttagctttgat

SEQ ID NO: 70081 - DNA, 501 bp, Oryza sativa
  Clone ID: PAT_MRT4530_70689C.1
aagaaataaaagaaatttaattagcataaaattgggcaggggccaaatccagaaaaaaaactttgggaactgggggggaagggggggaaggtttccagggcccaattacaaatttacagggggggcttatggattttggagggccggaaatttttgaacttttgggccttgaacttggccgggctcccgtgggggaaaagttggggggggggcccaacaaagggctccggggggggtttgaaaaaaacgggccaaaaaatccgggtcctgtctttggccaccggggtccgaggaaaaaccgccttgaacctcccgggggtaaaaatttcaatttggtccccaatggggataaagagggcgtcgggaacctacttgacggcgaaccaggggccatccttgaatacctggaggccctggacgtctttggggacaaggacgggaaacgggctatgttcgggggggggggcgaccccaagggttaattccggtttcgggccgggg

SEQ ID NO: 70082 - DNA, 327 bp, Oryza sativa
  Clone ID: PAT_MRT4530_7068C.1
atggaggctcgatctgcggctgctggttgccacgggctgcttgctgcttgcttgaagatgaaggggcgaatgagcttgctggggctagtttgctgcttggagaccacgacgaagaaaaagactcaaatcccatcgctggtgatgcctccctattgctccccgactgggtcgagccgtgcgcatctgccgtgggaattcggagcgccagacagcactgcgcaggccgttgtgccaaatgaccttgtcagatgcagtgatggggaagatgaacagtggagagaggagaggaagaaggaagatgggggtaattctgcccaaaaagtttag

SEQ ID NO: 70083 - DNA, 194 bp, Oryza sativa
  Clone ID: PAT_MRT4530_70690C.1
ctgccggagcagctccgcaagctgcgcctcctccacgagctggacgtgagcaacagccgcctgagcggcgggtgcccgcatcacatcctgtggctgcccaacatcaagtacgtcgacctccggttcaacagcctctgcggcgccgcccccgccgcgctgttcgacaagccgctcgacgccatcttgctgagcgg

SEQ ID NO: 70084 - DNA, 490 bp, Oryza sativa
  Clone ID: PAT_MRT4530_70691C.1
ctctccccccccccctctcctcttttttttgggggccaattaccatcgtcttgtcaagctgtaatggcaaagttatcattactcacctgcttgtttcctatacccattagttactagtccaattgttcacattcatgatacaggtttgtttgcagatagatgcatgcaacatgtatgtgaacctgctatactcagaaatcttccttgcagacagatgctatacctcaattccagataggagtatatagcttcacacagttagtgctgtgtcgatcgctgagactactgtatcaagtaatgcccgatctttcccatttgtactcgtagaaccttttctgaacttggaaatcatagtgctcctgatagcatttgttcctgtccatcagttctgcagattgcacaagatagcgcatctagtgatctaacgtaactcccagctcctacgcacgcacgcaaaacgattactccagcctccagctatgctactaca

SEQ ID NO: 70085 - DNA, 1062 bp, Oryza sativa
  Clone ID: PAT_MRT4530_70692C.1
gaagtgcataatcacaaaaaggagagagatatgaatgagccgccatttccattgttcacggtcaagttcgatgcacctccatcatttgaatagagcatcaaaggtaagcttaatggtgctgaaattaatcaagacgagtaaccattagtggaaccaatcgttgagattccttcgtcacaagttaatttgtttgctattctttgtgataaataagagatgtgtgataatacttcacttatatcattgccacaactagtaaatgaacaagttacttttagtgctagttctttatgtgctgattttaaacatattgttcatattactaatgaagttgaggaacatgaattgttatcttctttaaatactttgggctttgttttcattaatgacttttgtaagctcgataatttgatagagaaattatttgataaatctgatttgccatgtccaattaatactatatttcatatctttggcacatataatgatagaggaatttatttggtgcataaagtttatatatgtttagcttagaacctccggtatatgtagataaaattagtgatagtcatattattgttaattatattctctcgagtttgtcttgtcatgatttaaagaaacatgttggctgtcatgcaatacgcaaagattgctatatggaaaaaccgatgacagttttccatgaagaaggggagaatgatgtgaccattatttctatggatacaactattgctcacatcacgtgtcaacttgaagacatcgagatcaagccatacaagttctagaatccaattcggccaccgacaacaactctaacttcaaatggacaccaaatatgcatacgagctctattctgggcccatgagaagaaacaagatgttgcaccacatgtcatgagcgttcgggcttgtaactttgtttaggactctggtccaagaatgaggttgatacgcaccaccaatatcaacaaccccatagaaaggtgtatcgatcgctaagatacaacacaacaacgtcttgtatggttatagtcagatcgtcaatgtttctcctaaatca

SEQ ID NO: 70086 - DNA, 364 bp, Oryza sativa
  unsure (1)..(364): unsure at all n locations
  Clone ID: PAT_MRT4530_70693C.1
gtttttgttttttttttttttttttttttttttttttttcaaaaatggatgttttaaattatttaaagggttaaaactaaaagtcaagttttagaaacagcagggccaaataaaagcatccaancatccatccaacaccaagataaaaattggagggctttaagttccaggaaaactaaaaaggggcccacacatgttgggcccattgggggaaaaaactactttttttttcccaaacaacatttcccaaaaacacagggcgaaattggcccccttctagggggagggccaaagggatggggctgagctaaacccatttaaccccttttaacctaacctaaaaatggaaaccccctggaaaagg

SEQ ID NO: 70087 - DNA, 458 bp, Oryza sativa
  Clone ID: PAT_MRT4530_70694C.1
taattataggtcgtgcgcatcctaattagttatacagaggccaggagtggtcctagattaattgtatcaatgtaattgtttgagatctataaagcttcctttatttaaaaaaaaagtttgcttagacactagacagtgagataagccatctgtgcaaagcaacccactagggtagaatacacgactttcagggaaaaccaacggtaacaatttttctcaacataatttcaagaaactagatgaaaccctatgcattgctgcgggagttttgtgtgatattagtagaaataacatgtaatatagctacattttgtataattttcatctttgatcgactaataaaaaagctacaaacaattgagatgatatggtttataaaaattttaatcatatatggattgatcattcaaaaacaaaactaaggtgatgtggctcgatgagagaaggaaaaaaaaaaa

SEQ ID NO: 70088 - DNA, 594 bp, Oryza sativa
  Clone ID: PAT_MRT4530_70695C.1
cggcacgagggaatgttccactttattctatttcaacaatttcttatctctacttgggtttttttttattttattgtgttgactggattgaagcgagctagtacagatttatagcgtcatgtgttaacctgggactaggctatgctctaaggctcatcactacaggtgtttctgttgttagcaaaatgacctcagagcctgtcatctcaaatagataacgtcataatgtgattggttagggactcagcagtctatttttctaggcaatgaggattgttggtagttaaagtaaccttagagcatgaccaacagctcccttatactactcccattaccaaattaaggggttttgcatgaaaaatctctccaacagtagacgtaaaccacccctaaaaatttagcatttctaatcccgcgtactaaggctcatcattgtaggggagaggcgcggcgtccaatccttctatcgcagtctcttcgcgcatgttgggcgaaaataatcccgctaggctcttctttgcgccctcgtctgccggcgagtagatctgttccgccggccttatcttccctgcagctgttgggaaagcagccatc

SEQ ID NO: 70089 - DNA, 522 bp, Oryza sativa
  Clone ID: PAT_MRT4530_70696C.1
ccgccgcaccaccggcgcgccagatctgaggtggccttccgcttcccggacgacctgggcctcgggggcggcgcggacggcgggggcttcgacgagatcggctccgaggacgacctcttctccaccttcatggacatggagaagatcgccggcgccgaccgcgaccgcgccgccgagacctcctcccctccccgccccaccaagcaccgccacagcgcctccttcgacggcttcgccttcggggccggtgcgggtggccccggccctggccttgggaagcagcaagacggagcaggaggcgtgttctccgaggttatggaggctaagaaggccatgtcctccgagcagctggccgagctcgccgccatcgaccccaagcgcgccaaaagaattctagcaaacagacagtctgcagcccgatcaaaggaaaggaaggctcgatatataacagagttagagcggaaagttcaaactcttcaaactgaggctaccacactgtcagcacaactgacactatttcag

SEQ ID NO: 70090 - DNA, 321 bp, Oryza sativa
  Clone ID: PAT_MRT4530_70697C.1
atggacagagcagtatcggtcaaatgtatggtgatagcctgcaactgtcctcggctccgcctcctcctcaaccgggcacccgtcgtcggcaccgctgcccgccatccaccgtgctgccgccacatggggggcttggcgccgtccggagcacgacgccgcttctgccagggccgccgacgctggggagacggctcccgcgccgccgtcatcgtcctcctagtgtcgcccgtcctagcgccgccgtcatcgccttccctcgccgtcgccgtcgactcgcacgggagaaagaggaagaagggggagaggaggaagaagcagtga

SEQ ID NO: 70091 - DNA, 2701 bp, Oryza sativa
  unsure (1)..(2701): unsure at all n locations
  Clone ID: PAT_MRT4530_70698C.1
cttcacantaatcgaataaataaataaataaataaataaatatacatacatacataccatacagacacagacacacacacacacacacacacacacacccaccgttggatcacttcctcccatttataagatgcgttttgcatatcaactcattaccagggggtaaaaacagaaacagaataaaccgctttgatcaggccaagcagatctatggacagggaagcgaatacatgaaaacttgagatgccattagaacgtggaaatatacaacaaccgtcctgtactagattacactcagatccttgaccccaggcaacctaaattgccataaaagaaccaacttacatcacagagcatctctctctctccccctcctttcttcagcacccatgttaccactcggccagtgtacctctccctgcttcatcaaatggtttcagtgcagcatgggaggtaaatgaagtagcggagtgaccattgcgaagccttgaagggcgcagctcaggtgaaaatctcgttgaaagcgcaccgcgacacagtcaatatgataattcatggccacgcagtgatatgtacttcttaacccagatggctatatcttcggcgcaagcctgagccagtggtgttttcagcaagacgtccagcgtggcgaactcatggaccgcatccttgtactcgagaacaggggcatccacatttaccttgcggagctcctccgagtaagcgatcgcgcggtccttcatccagtccagctccgcaacactgtcaatgttggaggaatgagcttcaaagggggacgttgacttgtcatagaaataggagtttgccagcttcagttccgattgcgtgggactagtccccatgaaaaatggatacatcaaaacctgagcgacgaccttgatggggtcgaggagtttcccagcctcaacagcttttcgagccacatagtcagcaatgttcgctccgcagctgacaccaaggagaacacacctaatctccatcttgaagatcgtatgttgtttcttctcgccaattatcagaatgaccactgtgcagctcatgctaccaccatctacagagaaggcatctattaaatggttacgatctacagcgaagtacaggctacgatcgagaatagatctggatggatcggcgtgcgcagctagccacggctcgaccaacgccgcgccgaacgaatcggcccctccagagcccgcccccctcgccatcgtccgcccgcacgcggcgaggttggcctgcttggcgatccattcttttttcccgcaagttgtctgtgattgagcaccgtgaccccgtccgcgcacgaggtgtcatcctccagcgcgaaccggtacctgcaggcacaagtgatgatcaattgtgtttgtaaacagaacggcaaaaaaatgtcaaaaactagcttccagctagcttcttccaaaccggacatgagtgttgctggcgaatctcgacgatgaaaagctatgcttccttgtgtttggtgagtaagttgcgcgcggcgacgggaaacacgatggcgcgcagagccacgcgacgggagcggcggcgtcgccaccagaagagaactgatggttattggcggcgctgtcggccgcgcccgtggcgaacgcgcccccgtggaactgcacgatcaccggcagcctcctcccggagcggcgccaccggccctcgcgagcgcgttcttgtcgaactcgtcgacgtcgtcgtcggacaggaacgccgcgagcttacgcagcgccgggcacgggtccaccccgggcgccccaacccggcggaggagctccgccgccgcagcggcgggcgtggggccaacagccgatgccgccaccggcgacgacgacgacgacggcggcgcggccgtggaggcccagagcgcgatgaggcggcggagggtgaggttggggacgaggtcggtggaggggagcgggagcatggtggcggggcaggtggtgttgccggagtcgatccagcgctggatggaggcgcggtcgtaggtgacgccggtgcagaggctcaccggcgagcgcatgacgtcgagggagatggggcaccggaagaacgtcgggacctttacctccaggccctggtactccgccgcgagcctgccgccgccgccgcccatctccttcctcaccatggatggctgctgctcgatctcgttccgaccacaaacacttggtgttgcaacaatggcgatgcctagctgaggggggaggctgggggtggaggcggcggtagggagtggagtcgaagcgcgacaggacgctggagcggccctctggcgcggcggggcagctcctgccccgccgccgccgcgcggcggcccccgtcggccccgggcggcgcgcgcgagctccgccgccgccgccgcgggccgcgcccgccgccgccggcgccgcgccgtcgcccccgccgccgccgcagtcgccgtcgtcgtcggcggcgagcccgtccggcccgtggccctggcgggcaacagcgtcagcgccggcggcggaggagaaggagggattggaaggcggcgaggggtggtggtggtcggcggcggcgcgggaggagacgccgaatgaggaggaggaggaggcggcggaggcggagagggaggagaggcggcggcggggcggcggcggaggatgagcttgaagaggaggctgtagagctggattgcgacggggggcat

SEQ ID NO: 70092 - DNA, 215 bp, Oryza sativa
  unsure (1)..(215): unsure at all n locations
  Clone ID: PAT_MRT4530_70699C.1
tgtgttttcttaaaatggggtgtgttaacgataatttggactatcaccaggtcaaaattgttttgcctaaaacatatgattttataacaaagcattcatactctgggaaaagggtanagcactgcacatctaacaacaacagtatccaatcaacaagacgcttaaaacaaacacccatcctctggagtgaggcggggagggaatataatagaact

SEQ ID NO: 70093 - DNA, 1146 bp, Oryza sativa
  Clone ID: PAT_MRT4530_7069C.1
atgtcgtcgtcgtcggaggaggagcagggagcgtcgggcgtcgggctcggcaacttcctggaggtcggcccgctggacggcgacctgaagccgcgcggctcgacgtggctgcagaaggccgacctcatcttcgtggtcaggaacacgaactcctcgtcgtcgccatgctttctctcgatctccaacctctctgctaaattatcatggctgaagctgaagctctacgctctgcaggacaacccggtggggacaggatacagctacgtggaggacgacgcgctgctcgtcacgacggacggcgaggcggcggcggacctggcggcgctgctcagggcgctcgccgccaaggagatacccaccctgcagagcagcccgctgttcctcgtcgccgagtcctacggcggcaagtacgccgccacgctcggcgtctccctcgcccgggccatccgcgccggcggcctcaagctcacgctcgccggcgtggcgctcggcgacagctggatctcgccggaggatttcgcggaaagcacaggtggtgaagcagcgcatcgcatcggggcagtggaagctggcgcagacgtgtacaacttcctgctcgacaccgggatggacccggtcgccgccggcgctgctccggcgaggagcttcccgccggcgtactcggcgtacctggacagcaagctgtccgtcggagactccattcgaagcgtcatgaatggagccatcaaggagaagctcaagatcatccctaaagacgttgtatgggaggagcagtcctacacggtctacaatgcgctgatcaatgacttcatgaagccgagaattcaggaggtcgatgagctcctgtcgtatggcgtcaatgtgacggtgtacaatggacagctcgatgtgatctgctcaacggttggtgcagaagcatgggttcagaagctcaaatgggatgggctgaagaacttcttgagattgccaaggcagcctctacattgtggctctagtgaagtcacaaagggctttgtcagatcctacaaaaacctgcatttctactggatccttggagctggccattttgtacctgttgatcagccctgcattgctcttgacatgattggtagcataacgcaatcttcagttcagtctcatccatag

SEQ ID NO: 70094 - DNA, 752 bp, Oryza sativa
  Clone ID: PAT_MRT4530_706C.1
agctgggcgccataatgcaaaaagcctcgcactttcggcaattcagctgctcgcaggccaccaaatcctgttggttcagctggtcgcagaccttcaggcccggctggtacttggcagcggccccctccaccaatgccttcctatcctgatcgatatggacatgcagatcggtaccattacactgcaccctctgcaacatatgatcctcctgcttatgcttcttacagcgaaccatacagtgcctcaaagccataccagtacacaccaggctcagtagctcctgcatcatacaactcgaatcagttcaaagtagcttatggtggacctggtgccccgccaacagcaggcggctacggaagctacaacgatgcagcagggcagtctacttcgagtagctattcgggttattctggttaccacccttcactaccaaggttataacttgcatttgctatgctacgctggttatgataaagcacaatctggctatcaatctcgttcagagttcagaccccagatgtaacctttagatatactctagtggattttgtagctgtaactggtgtagatcttgatcttccaaggctggtcgtgtgagaagccggtcgattttagagactttttttttgtcctgctacatgtatccagttgaatactgttgcgtgtacctaacctgttttgaatattctccatgttcagtcttctgtgactaactactaagaaaaaaaaaaaaaaaaaaccaagggcggccg

SEQ ID NO: 70095 - DNA, 422 bp, Oryza sativa
  Clone ID: PAT_MRT4530_70700C.1
gtctctccttcgccactccccagcggcggcgcgccttctccctctcccagcgacggcagcgcgccatccactcccttcctcccagatccgactggatgaggggagggcagcggcgaggaggcggcgctccccaccccttactatctccccaatactggatcaggctgaacgaggggagcgccggaggggccagccaccgcatgccacagacgaggtgatgctcccttcctagctggcaaaaacgtcaggaggagggagcgcacgtctactgggcggcccttaacgcactacctccaacagctggagggagggtgacgcatcatacaccctagcgacggccgcgagggcttctcactcatcagagtcctccacgagctaatgggggccaacagaaaccaaatatgatcagaacatagccgcag

SEQ ID NO: 70096 - DNA, 524 bp, Oryza sativa
  Clone ID: PAT_MRT4530_70701C.1
gaaagcttccaatagcagactttccgtgtgaagaattcgataaataatccatgtacaacaactaagaaccaaaaaacaatgactattaggattacatatatttacccttattggcagaagaggaagggaaaaaccgtcatgaatcgatggggcgtgaaacacagccatgagcccgaagctcgttgaataccctatctaacaatctggacagtgccttcttccaagagaacgagtatctggacaatgaggctgacacccacctttacttgaagactcattcatatcatcaatacctgcaaagcatgtagtccccatatttgagactaatcccatcgcaaaaaaaatagttaatcaatcctgtcaattaatgaatagaacatgctttgtccactcttctgccgacatttatgaccaacgatagcaacccttctcctgttccacagctgtatttgtagtcgtagtgcacaataaaagcttttgggagctatagcatccagtcagtacgccacataagggtgagactc

SEQ ID NO: 70097 - DNA, 1260 bp, Oryza sativa
  Clone ID: PAT_MRT4530_70702C.1
atgtatcacgtgatacttgcgaggtatcggatgatacttaccagggtaggagcaccccgacacgcgcagtcgccccctgcagccgtcccttgtagacgaggatggcgacggcaagggcagaggacgggcgcggcgacggcggcggtagcgggggataggcgcggcggcggcggcgacggcggcggcgacgggggacggacgccgccgcgccgtccgccgcgcacgaatcaccaattcaccgtcgtcgtgaatcgtgtgatcaccaaaagcacatgtgatttgattttggtcatggcaggcgatgatctgtcgttggcagagacgaagaaaaagaaaaggaggaacctagtgtgcccacacgaagaagcccgcggccagcaaacggacggcccagatgttgacacgtcggagggagcttcctccctcgaccgtatgatcgccggaggggtacgggtctcgtggtactccctccgtttcacaattttaaattacatccctaaaccacaaagtcggaaatcttcacacttaacttgtaaaaaccgggttaaattatatcctatgacagtatgggtggctgtcttcgctgacgtggcatccatgtcggtgcccgcacgaggagtaggtggagtacggtggattcggcttggagaggcggcagatgacgtggttgaagagcgactaggcgacaggggtcggcgtgctagcgtgcgtgtggatgagctcttgcccccgttcacaaccacatgcaagtaccagctgccgtccttcaccgccgtcgagtccaacgccaacaaccaggctcgctgcaacaccacaccgctagctagcaacggcgacacggtaaaatggcccgaacagggagcagacaatcgtgagcttctcccagtttgcaataaaatcagcgagttccgagatctgagcgacagagcaaccccaaacaatgacacttctggctatcaggattcgcattcgggccatccatggacgacatttcccgcatgcagcagcgtcagcgtggcaattgtccgagctgccatggctccacgtgaaaagttgaaagttaaaaaaaaaagtaagaaactaaacacggtgtcagtgacaccagtgcaggtctgcgtttgtggcagtcgatgtaagctcccagtccgatgcacctcgaccaaaccacacgacgatcacggagacttcgccgtttctgctgaagatatcgaagagatattgctgtcaccgagtatagatgattggcagatgcacttctct

SEQ ID NO: 70098 - DNA, 1539 bp, Oryza sativa
  Clone ID: PAT_MRT4530_70703C.1
atgaacatcgccgatgtcgcccggccgttggtcgccctcccatctcgccgccggctcatctcccatcccgctgcttcccttctagccggatctagcagaggggagggcgaggccactgtcccgcgcctgtccgccgccagccttccatctcgccgcgtcccttccggcgcattcccctacagaaacccaataatgctaaggtcaaccttcccgctcgtctcccacctcccatcccgcaaaccacccccaatccgcccacgcccaccacctgttcggccctatgcctcttccgccgcctcgcctcctcctcctcctccgccgccggcgtccgcttacgtccacctccccttctgccgcaagcgctgccactactgcgacttccccatcgtcgccctcggcacctcctcgcccccgacatccccacacggcggggacggcgacgacccgaggatcgccgactacgtccgcctcctcctccgcgaggtcgccgccacgcgccccgtgtccgacgacggggtgcccctcgagaccgtcttcttcggtggcggcacgccgtcgctggtcccgccgaggctcgtcgccgcggtgctcgacgcgctgcggaccaggttcgggctgtcggcgtccccggaggtgtccatcgagatggaccccgggacgttcgacgccgccaagctgagggagctggtggggctgggcgtcaaccgggtgtccctcggcgtgcaggcgttccaggaggacctgctccgtgcgtgcggccgcgcgcacggcctgcgggaggtgcacgacgcggtcggcatcgtgacggcgtgcgaggggctgcagaactggagcatggacctcatctcgtcgctgcccaaccagacagaggagatgtgggaggagagcttgaggtgcacggtggatgcccgtcccacgcatgtgtctgtctatgacttgcagatcgagcagggaactaagtttgggcaactgcccagaagaatgaaggaatatgcagagtgggttcagaaattggaaaatggagtgtggagccatgagtctggcaattctgggataaaggacatggcaatggacgtggacaacttcctctacgtctccaacttggcaaagaagatgcacagatccaagaagcccaccctctttttcaagcttgatatcgccaaggccttcaatttggtctcatgggaatacctattaacgctacttgacaagatgaggttcagcgccaaatggcacgactgggtggccctgattctgtcaacctcctcctccagtgtctcactaaacggaattgagggagaaaggatagaccatcctaggggtctaagatttctcaagattataaccgtcgagggccacctaagcgagttcgcggaccgcagcgtgcgcttcagatgctccctgtatgctgacgacgcggcaatcttcatcaagccatcatgccaagacgtggacagcctaatctcgatcctgaacagtttcgggggtgccaccggactccaggagatctttgcatcatttgttactcttggaggttga

SEQ ID NO: 70099 - DNA, 410 bp, Oryza sativa
  Clone ID: PAT_MRT4530_70704C.1
tttttaagcttgcctaaatacacaaatggaagggggggtctgttgagaccttatgagctatgaccacaaggctaagtgaggctatatgagatcctgcaatcataaccaaccttgcatcggagaaacaaaaagactctaacattggaagaacaaagagatctttatgatcaagagattactgattatgctctggtcattgatgatcctcgaaatgcaacaaaaaacttcaaatggcaaggcaagccctgtaagactggacatgcaagaatgatctggccaatactcgctgatctatgacctactattaaccatcttatagaaagtggggacacatgcaagtccagggctggtccatgtgctacatgttaacatatcatggcgctgtactgaataatcattactaatactat

SEQ ID NO: 70100 - DNA, 1998 bp, Oryza sativa
  Clone ID: PAT_MRT4530_70705C.1
atgctaaggtcaaccttcccgctcgtctcccacctcccatcccgcaaaccacccccaatccgcccacgcccaccacctgttcggccctatgcctcttccgccgcctcgcctcctcctcctcctccgccgccggcgtccgcttacgtccacctccccttctgccgcaagcgctgccactactgcgacttccccatcgtcgccctcggcacctcctcgcccccgacatccccacacggcggggacggcgacgacccgaggatcgccgactacgtccgcctcctcctccgcgaggtcgccgccacgcgccccgtgtccgacgacggggtgcccctcgagaccgtcttcttcggtggcggcacgccgtcgctggtcccgccgaggctcgtcgccgcggtgctcgacgcgctgcggaccaggttcgggctgtcggcgtccccggaggtgtccatcgagatggaccccgggacgttcgacgccgccaagctgagggagctggtggggctgggcgtcaaccgggtgtccctcggcgtgcaggcgttccaggaggacctgctccgtgcgtgcggccgcgcgcacggcctgcgggaggtgcacgacgcggtcggcatcgtgacggcgtgcgaggggctgcagaactggagcatggacctcatctcgtcgctgcccaaccagacagaggagatgtgggaggagagcttgaggtgcacggtggatgcccgtcccacgcatgtgtctgtctatgacttgcagatcgagcagggaactaagtttgggcaactttcggtgctctgctcagaactcactagtatgataaacaattattgtagtcaatacaccaaaaggtgggtcgaacctatcagacttaccctaaaccctgttcttgacaaagtagcaactcaatcctttttcataattaatgcttgcagatatacacctggtgtttatccgcttccaaatgagaaagattctgcaaacttctataagatagcttcgaaacgtctttctgaagcaggatataaccattatgaaatcagtagctattgcaagactgggtatgagtgcaagcacaatgtaacatattggcaaaaccggtcattctatgcatttggtcttggatccgctagctacatcaatggtatcaggttctccaggcccagaagaatgaaggaatatgcagagtgggttcagaaattggaaaatggagtgtggagccatgagtctggcaattctgggataaaggacatggcaatggacgtggtgatgctatcactgagaacagcatggggcctagatgtgcaaagtttcagtaaaaccttcggaaggagtctgacagagtcattgtgcaacacatttaggccttttgtggagagtgggcttgtaattgccatggatatggaacggcgagctttgcaaccaagtgaatttgagttggacttgcaacatgatgctcaattattagttgataatcttgtccgagtttctgctgatgggagccggggaggaatagccacattttgggatgatgaagccctccaacaaagcgatcttgatatcagaaccttctccctctcaatctgtctcactcagaagtcctcaaatacgaccttcctcctcaccaatgtttacggcccgatggaagatgcaactctgatgcagacatgctcttctcaaaccacaacctccaagcactctcttcatcatgctccagacatgctcttctcgaaccactgccccctgttgctctcaccaacaaagcagctcctgcgcaagccaactttcaggtttgagaatttctggccaagactattgggcttcctcgaagttgtccaaacggcctggtcccagccggttagcgcttcacacccggtcaagcgcctgagcacaaagctaaaaatgatggccaaggcactaagatcctggagtaaccgcattctaagtgacagtcgtgtccaatttcaccttgtcatcgagcttattctcaaattggacatcgcctag

SEQ ID NO: 70101 - DNA, 279 bp, Oryza sativa
  Clone ID: PAT_MRT4530_70706C.1
atgcgccgatggggatgtggtggccacggcggcggatgtggtagtcaacgccagatctcctctctccgccgctgccgccgtgaggaggaggtagtgttcgtcgaggaggacgagcagaagcaggaggagcagaagcagaagcaccgtatgcacagtacacatgcaagcacaaagcgtgcacaaacagctactccagaaatcgtttttttctgggacaaagactttcctccagaaatcgactctctttgtgggacggagggagtaaaagtctcaggatga

SEQ ID NO: 70102 - DNA, 447 bp, Oryza sativa
  Clone ID: PAT_MRT4530_70707C.1
atggctcgtcgatcaaacccagcactgatcagtaccctttgctgcttcactgcactactgtctctcgcctttgtgtgcttcttattaccgtatgtgtgcccgttggatggcgacgacgacgacgccggcttgactagtgtgtggccggtgcttgtgcgtaccgatgctgctactctcatgcacaacgactgtcgccgcgtgcacccgtcgacggccggcgtcgttccgacctttgtctcagctggctcggagtcacagcaccatcagaggaagaagaagaagagcggaagcatggcgccccttctgatcgtgctgctgctgattgcggttgctgctgctacaggatgtgcagctgcagatgcgagaggctcacgctgcagcaacgatcccaacttacccaggaggatccgtgcttgcggccccccgtcaattaagcctcacaactag

SEQ ID NO: 70103 - DNA, 1554 bp, Oryza sativa
  Clone ID: PAT_MRT4530_70708C.1
atggcggatttctactcgccgtcgcacgcctcgagacggctgtcgacgtcgatcacatttgccggcgggctcgacgtgacgtcggagctcgtcatcgccgccgtcgcggcggcgctgctcctcgtcctcctgttcgccgcctgcgcctgctgctcctggtgctgcaggaggaggtcggcgacgcagcggtggcagaatcaccacgccgccgccttcgggtaccaaggcaacaccacggcgtactactaccaccacaccggcggcgcgaggccgcagtgggcggcgaccaagaccggcgccccgtcgacgccgccgaacatgatgatgcacccgacgaacatgaccggcccgcacgtcgtcgtgcggccgccgctcgtgccgcccccgccgccgcctgttccggcgggcctggacgagaacgcgttcgggtacgacgagctggcggcggcgacgggcgggttctcggaggggaacatgctggggcagggcgggttcgggtacgtgtaccgcggcgtgctcggcgacgggaaggaggtggcggtgaagcagctcagcgccgggggcgggcagggggagcgggagttccaggcggaggtggacatgatcagccgcgtgcaccaccgccacctcgtccccctcgtcggctactgcatcgctggcgcgcaacgcctcctcgtctacgacttcgtccccaaccgcactctcgaacaccacctccatgaaaaggggttaccggtgatgaagtggacgacgaggttgcgcatcgcggtcggatcagcaaaggggctcgcctacctgcacgaggaatgtaatcctcggatcattcaccgtgacatcaagtcggcaaacattctcctggacaacaacttcgagccactggttgcggattttgggatggcgaagctgacgagcgagaacgtgacgcacgtgtcgacgagggtgatggggacgttcgggtacctggcgccggagtacgcgtcgagcgggaagctgacggacaagtccgacgtgttctcctacggcgtcatgctgctggagcttctcaccggccgccgccccgccgaccggagctcctacggcgccgactgcctcgtcgactgggcgcgccaggcgctgccccgcgcgatggccgccggcggcggcggcggctacgacgacatcgtcgacccgcggctgcgcggcgagtacgaccgggcggaggcggcgcgcgtcgccgcctgcgccgtcgcctgcgtccgccacgccggcaggaggcgccccaagatgagccaggtggtgaaggtgctcgagggggacgtgtcgccggaggagctcggcgacggcgcgcggcccgggcagagcgccatgtcgtccagcagcggcgactccagctcggggtcgggatcgtacacggcgcagatggagcgggtcaggcggacggcggcgtcgccggccagcccggagtactacagcagcgagtaccagggttacggatgcccgtcgccggccagcagcgccggcgacaacgcgtcttccggcgagcatgataaccagtggcgtaaagctcaccggtaa

SEQ ID NO: 70104 - DNA, 717 bp, Oryza sativa
  Clone ID: PAT_MRT4530_70709C.1
catataagacccaaaaaaaccaagaaaaaaaaaggtcctgataaaaggaagtcgaaaccgagggaaacaaaaagaggaacaaaatagagaaaaagaaaaccaaaaaatgaaaaaagaaaaacaaatcgaaaaaacaacaaacagagaaactagcatataaggcacaaatataaaatgagacgaaaagaagggaaaaaaacgcaaaaaaaatcggcaaaaatcggaaacataaaaggaaaaacaaaaaaagcaaagaacccagacaacaagatcacaacaagggaaaaaaaacgagaaaaaaaacaaatattcaagcataggtaaaaaacaagagatgaaaaacaaataacaacagacatagaaagaataaacatggggaaaaaagcaaaagaataagaaaatcaggaaaaattaaaacaaaacaacataaataacggaaaaataacaaaaaaaaaaaggtaaaaaaaaaaaaaaaaaaaaaaaaacaatagaaaagaaaataggaaaaaacaattaaacatgcaaaaaaaggaaacaaaatataataagaaaaaatagcaaaaaaagataccagaaacaacgtaaaaaaagaaaagcctacgcaatgaacaaaaagagccgtccgccatgacatcagccacgcacaagatgccctccccacgccgccgcgccgcccgccgtccccatgccaccgcgctgcccgccgtctaccgccac

SEQ ID NO: 70105 - DNA, 144 bp, Oryza sativa
  Clone ID: PAT_MRT4530_7070C.1
atggtgacccgcgcggcatccgcgcgattcacacgacggacgtgccggcctgtctctaccaaccgcgcgacgaggccgccgtgccgtggcagctgtgcgccgcacgcccgccgccgacctcgtcctggcatgcggattgcctag

SEQ ID NO: 70106 - DNA, 200 bp, Oryza sativa
  Clone ID: PAT_MRT4530_70710C.1
cggacgcgtgggcggacgcgtgggcggacgcgtgggcggacgcgtgggcggacgttgggtccgccacggcctcgcggtcaccgtggcagccgtcaagccgccactcgactctcccgatttctccgccgctgtcgcgcgcttcgcggagtgcaaccccgcatcaacttcaggctgcgcgcgcgcacgccggccgggctcgt

SEQ ID NO: 70107 - DNA, 1806 bp, Oryza sativa
  Clone ID: PAT_MRT4530_70711C.1
ttttagttgtcgccgcagcctcctctcggctgctcccatcctctccttcgagttagcttcctccttattcaaccatgggtaaggagaagacgcacatcaacattgtggtcattggccacgtcgactccggcaagtcgaccaccacgggccatctgatctacaagcttggaggtatcgacaagcgtgtgattgagaggttcgagaaggaagccgctgagatgaacaagaggtccttcaagtacgcgtgggtgcttgataagctcaaggccgagcgtgagagaggtatcaccatcgatatcgccctgtggaagttcgagaccaccaagtactactgcacggtcattgatgcccctggtcaccgtgacttcatcaagaacatgatcacgggtacctcccaggctgactgtgccgtgctcatcattgactccaccactggtggttttgaggctggtatctccaaggatggccagacccgtgagcacgctcttcttgctttcactcttggagtgaagcagatgatctgctgctgcaacaagatggatgccaccactcccaagtactccaaggcccgttacgatgaaatcgtgaaggaagtctcatcctacctgaagaaggttggctacaaccctgacaagattcccttcgttcccatctctgggtttgagggtgacaacatgattgagaggtccaccaaccttgactggtacaagggccccaccttgcttgaggctcttgaccagatcaacgagcccaagaggccatcagacaagcccctgcgtcttccccttcaggacgtgtacaagatcggtggtattggcaccgtgcctgtgggtcgtgttgagactggagtcctcaagcctggtatggtggtgacctttggtcccagcggcctgaccactgaggtcaagtcggttgagatgcaccacgaggctctccaggaggctcttcctggtgacaacgtcgggttcaacgtgaagaacgttgcggtgaaggatctgaagcgtgggtacgtggcctccaactccaaggatgaccctgccaaggaggctgccagcttcacctcccaggtgatcatcatgaaccaccctggccagatcggcaacggctacgccccagtgctggactgccacacctcccacattgccgtcaagtttgctgagctggtgaccaagatcgacagacgatctggtaaggagctggagaaggagcccaagttcctcaagaacggtgatgctggtatggttaagatgattcccaccaagcccatggttgtggagaccttctctgagtaccctcctcttggtcgttttgccgtgcgtgacatgaggcaaacggtggctgttggcgtcatcaagaacgtggagaagaaggacccaaccggtgccaaggtgaccaaggctgccgccaagaagaaatgatcctcgttcaagtggtagttttgtgcacggccatggcactcgttgcattgaccgttattatcatatgctcgctgtgtgcactgtgtcgtttaaaactctctattttctgttcggtttaaacttgttctgagcctgattattgcccttcggctgttgtggaatgcgggtatttacattgctaattcctatgtctttattttggcttgtggcattcgcttgttctactgctattgaaaactgtaatctgtttctgttattaaaaactgaaccttttcttctgctatttgaaactgaagcgagtgggtttcaatttgctgaaatcctgctacttgctatttaaattatttatgttcaatttcgttcagtcccatatttgttggattgagtg

SEQ ID NO: 70108 - DNA, 534 bp, Oryza sativa
  Clone ID: PAT_MRT4530_70712C.1
tgaaggggataatcttgcggccgctccgggccaactgaatggataaacaagcgcggagatacaccatgggcgcacgaatgtcaccggagtatattgctcggggagtccacgagcgaccacagtcacgggattcgacccaaaaaggagaggacgaaggggacacgggtcggcaaagttcggcatctggtgggaccatcgagaggaggacgcaggcatgaggctctttggcatgaaggtgagagctacggatccgtgcggctcaaggcatgactatcagacacaaccctaccctctatgcacgatgatgccgccgcactttgggaagccactgcgagggctagatggtaatatgttagtaggcggtagtatcctgacaccgtactgactgtagaggaccgaacggacaaggacagggtttacatgacgatctttggacagattctgggttagcttagttgagccgtacaagtgattatactgatcctgaggccacagacactgttgacatgaatacgcttgattgcgtaccccgga

SEQ ID NO: 70109 - DNA, 3258 bp, Oryza sativa
  Clone ID: PAT_MRT4530_70713C.1
atgggtaaggagaagacgcacatcaacattgtggtcattggccacgtcgactctggcaagtcgaccaccacgggccatctgatctacaagcttggaggtatcgacaagcgtgtgattgagaggttcgagaaggaagccgctgagatgaacaagaggtccttcaagtacgcgtgggtgctcgacaagctcaaggccgagcgtgagagaggtatcaccatcgatattgccctgtggaagttcgagaccaccaagtactactgcacggtcatcgatgcccctggtcaccgtgacttcatcaagaacatgatcacgggtacctcccaggctgactgtgccgtgctcatcattgactccaccactggtggttttgaggctggtatctccaaggatggccagacccgtgagcacgctcttcttgctttcactcttggagtgaagcagatgatctgctgctgcaacaagatggatgccaccactcccaagtactccaaggcccgttatgatgaaatcgtgaaggaagtctcatcctacctgaagaaggtcggctacaaccctgacaagattccctttgttcccatctctgggtttgagggtgacaacatgattgagaggtccaccaaccttgactggtacaagggccccaccttgcttgaggctcttgaccagatcaacgagcccaagaggccatcagacaagcccctacgtcttccccttcaggacgtgtacaagatcggcggtattggtaccgtgcctgtgggtcgtgttgagactggtgtcctcaagcctggtatggtggtgacctttggtcccagcggtctgaccactgaggtcaagtcggttgagatgcaccacgaggctctccaggaggctcttcctggtgacaacgttgggttcaacgtgaagaacgttgccgtgaaggatctgaagcgtgggtacgtggcctctaactccaaggatgaccctgccaaggaggctgccagcttcacctcccaggtgatcatcatgaaccaccctgggcagatcggcaatggctacgccccagtgctggactgccacacctcacacattgccgtcaagtttgctgagctggtgaccaagatcgacagacgatccggcaaggagctggagaaggagcccaagttcctcaagaacggtgatgctggtatggttaagatgattcccaccaagcccatggttgtggagaccttctctgagtaccctcctcttggtcgttttgccgtgcgtgacatgaggcaaacggtggctgttggcgtcatcaagaacgtggagaagaaggacccaaccggtgccaaggtgaccaaggctgccgccaagaagaaatgatcctcgttcaagtggtagttttgtgcacggccatggcactcgttgcattgctgcaaccgcctttgcctctacctatgttgcagccgctggccacgccaatggacgctgacaaggtcgtggaggagaagggcgcatctgctgactgctgggcaccttcgccacttgccgagatggttgcgcgcgtcaaacgtctacctccttattcaaccatgggtaaggagaagacgcacatcaacatcgtggtcattggccacgtcgactccggcaagtcgaccaccacgggccatctgatttacaagcttggaggtatcgacaagcgtgtgatcgagaggttcgagaaggaagccgctgagatgaacaagaggtccttcaagtacgcgtgggtgcttgacaagctcaaggccgagcgtgagagaggtatcaccatcgatattgccctgtggaagttcgagaccaccaagtactactgcacggtcatcgatgcccctggtcaccgtgacttcatcaagaacatgatcacgggtacctcccaggctgactgtgccgtgctcatcattgactccaccactggtggttttgaggctggtatctccaaggatggccagacccgtgagcacgctcttcttgctttcactcttggagtgaagcagatgatctgctgctgcaacaagatggatgccaccactcccaagtactccaaggcccgttatgatgaaatcgtgaaggaagtctcatcctacctgaagaaggtcggctacaatcctgacaagattcccttcgttcccatctctgggtttgagggtgacaacatgattgagaggtccaccaaccttgactggtacaagggccccaccttgcttgaggctcttgaccagatcaacgagcccaagaggccatcagacaagcccctgcgtcttccccttcaggacgtgtacaagatcggtggtattggcaccgtgcctgtgggtcgtgttgagactggagtcctcaagcctggtatggtggtgacctttggtcccagtggcctgaccactgaggtcaagtcggttgagatgcaccacgaggctctccaggaggctcttcctggtgacaacgtcgggttcaacgtgaagaacgttgcggtgaaggatctgaagcgtgggtacgtggcctccaactccaaggatgaccctgccaaggaggctgccagcttcacctcccaggtgatcatcatgaaccaccctgggcagatcggtaacggctatgctccagtgctggactgccacacctcccacattgctgtcaagtttgctgagctggtgaccaagattgacagacgatctggcaaggagctggagaaggagcccaagttcttgaagaacggtgatgctggtatggtcaagatgattcctaccaagcccatggttgtggagaccttctctgagtaccctcctcttggtcgttttgcggtgcgtgacatgaggcaaacggtggctgttggcgtcatcaagaacgtggagaagaaggacccaaccggtgccaaggtgaccaaggctgccgccaagaagaagtgagcctcgttcaaatggtggtttgcatgtctgcagttgagatatctagttctagtatttgttaagttttgcccacggccatggctctcgtttcatggaccgttaatatctgctcgcaatgtgcactatgtcagtcgtttaatactcgtttatttctgttcggttaaaactgatgctctgagtccgattattgtccatcggctgttttggaatgcgagtatttacattgctacttcctgtgtcgttattttcgtttgtgctattccctgcttttgctgctattgataactggaaactgtctctgtcattgaatctcagacaagttttctgctattggaaactgaaagcctaatggatttcaatt

SEQ ID NO: 70110 - DNA, 458 bp, Oryza sativa
  Clone ID: PAT_MRT4530_70714C.1
tttattttttttttttctttaccatttttatttttttttttttttggggtttttttcagacacaatgggggttaaaccggggattgggcaaacagcttaccagaggggaaaacagggcacagggatatagcgcaatatcccatgtagtaaaaaagaaacatttgagcaatggaatccccatggggctacaagtttggggggctacaactacccagtggtcaaccaagttcattagaacaaatggccaaccactttagcagaagcccttaggggccaaaatgttgggaccgcattagggattctaaatcaggccctggagctgcaaatcagggtagggcttctgggtgaagatatttccctcctgatcttcggactttttttctaggactggccgccacttgttcagcccttgtggttgttgaattttttcccaaagttcttttgcctcctggatggat

SEQ ID NO: 70111 - DNA, 695 bp, Oryza sativa
  Clone ID: PAT_MRT4530_70715C.1
gccgccatttatccgccttcgactgctcactcctctcgtctgtctaagtcttgtccttggagtgaggtatcttcttattccaccatgggtaaggacaacactcactttcatcatcatcgaccgttgtgcacgactactcctcgaagccgaccaccagggaccgtctgatttacaagattaggaggtatcaacaagcgtgtgatcaataggctcgagaaggaacacgctgagatgaacaagagggacttcaagtacccgcgggtgcttgacaagctgaaggcccagcgtgagagaggtatcaccatcgatattgccctgaggaagttcaagaccaccaaggactactgcacggccatcgatgcccctggccaccgtgacttcgtcaagaacatgatcacggatacctaccaggctgactgtgccgtgctcatcattgactccaccactggtggctttgaggctggtatctccaaggatggccagacccgtgagcacgctcttcttgctttcactcttggagtgaagcagatgatctgctgctgcaacaagatggatgccaccactcccaagtactccaaggcccgttatgatgaaatcgtgaaggaagtctcatcctacctaaagaaggtcgggtacaatcctgacaagattcccttcgatcccatctctgtggtttgagggtgacaacatgattg

SEQ ID NO: 70112 - DNA, 780 bp, Oryza sativa
  unsure (1)..(780): unsure at all n locations
  Clone ID: PAT_MRT4530_70716C.1
cactgtcctgtgatctacaagcttggaggtatcgacgagcgcgggattgagaggctcgagaaggaagccgctgatatgaacaataggcccttcaagtacgcgtgggtgctcgacaagctcaaggccgagcgtgagagaggtatcaccatcgatattgccctgcggaattccgagaccaccaagtactactgcacggtcatcgatgcccctgggcaccgtgacttcatcaagaacatgatcacgagcacctgccatgctgactgtgccgtgctcatcattgactccaccactggtgggttggaggctgctatctgcaacgatggccacacccgtgagcacgctcttcttgctttcactcttggagtgaagcacatgatctgctgctgcaacaagatggatgccaccactcccaagtactccaaggcccgttacgatgaaatcgtgaatgaagtctcatcctacctgaacaacgtccgctacaaccctgacaagattcccttcgttcccatctctgggtttgagggtgacaacatcattgataggtccaccaaccttgactggtacaagggccccaccttgcttgaggctcttgaccacatccaccaaccccaataaggccatcagaacaagcccctgcgtcttcccttcaggacgtgtacaacatccgtggtattggcaccgttgccctgttgggtcctgttgaaaatggaattcctccaagccttggtatgtgggtgacctttggtcccaccggccttgaccacttggangttcanttcc

SEQ ID NO: 70113 - DNA, 528 bp, Oryza sativa
  Clone ID: PAT_MRT4530_70717C.1
atggcgtcagttgtagatctcatcgagagctcatttcctattgcaacaaaaatactgaataaaacaacgattgataggacaataaaatgggcagtgggattagacattggcctttctggagctgtattagcagtggcaacatttgccattagccagctacaattgagaatcagggtgatcggaataatatgtgcgtgcttcaacgtgttgatgtatgcctctccactcacagccgtgataaatgtgattcaacacgagaacgtggatgccatgccgttctggctatcatttttcctcttcctcaacggaggcgtctggcttgtctatgggataattgacagagatatgctgattggaatcccaaatggtataggcttcttactggggacaatccaactgatcgtatacgcgatctatgcgaatttcatccattgccgcaggcttcggctcttccttcggggtttagtgggcaggcaggctctggtggcgcctcttctccccaacgccgttgaagggcaggaagcttaa

SEQ ID NO: 70114 - DNA, 1430 bp, Oryza sativa
  Clone ID: PAT_MRT4530_70718C.1
ccggccggctcccgtctcgccctagccgccgccgcctcctcctcctctcgccttctcccgtcttctccttcgagttagctacctccttattcaaccatgggtaaggagaagacgcacatcaacatcgtggtcattggccacgtcgactccggcaagtcgaccaccacgggccatctgatttacaagcttggaggtatcgacaagcgtgtgatcgagaggttcgagaaggaagccgctgagatgaacaagaggtccttcaagtacgcgtgggtgcttgacaagctcaaggccgagcgtgagagaggtatcaccatcgatattgccctgtggaagttcgagaccaccaagtactactgcacggtcatcgatgcccctggtcaccgtgacttcatcaagaacatgatcacgggtacctcccaggctgactgtgccgtgctcatcattgactccaccactggtggttttgaggctggtatctccaaggatggccagacccgtgagcacgctcttcttgctttcactcttggagtgaagcagatgatctgctgctgcaacaagatggatgccaccactcccaagtactccaaggcccgttatgatgaaatcgtgaaggaagtctcatcctacctgaagaaggtcggctacaatcctgacaagattcccttcgttcccatctttgggtttgagggtgacaacatgattgagaggtccaccaaccttgactggtacaagggccccacccttgcttgaggctcttgaccagatcaacgagcccaagaggccatcagacaagcccctgcgtcttccccttcaggacgtgtacaagattggtggtattggcaccgtgcctgtgggtcgtgttgagactggagtcctcaagcctggtatggtggtgacctttggtcccagcggcctgaccactgaggtcaagtcggttgagatgcaccacgaggctctccaggaggctcttcctggtgacaacgtcgggttcgtcgcgtgagggaccaccgatcgatcgatcgatctcgccaaggccggggccgaccgtccgtcacgatcccgcaccgcgcgcgcgcgacggatcggagcgcgaacaacatgccgtgcaccgtacaccgatcgaccaaccggccgtgcccttcgatctctctctcatgtgtatataatctgtgaaagaccgacctgtgcgggctcggtcgtgcgttgagcattccatgtatgcattcagtaggttagctagcagtagaagaagcagactcctttcaaaaaaaaaaaaaaacagagagacaagaagcagcagcagactgtatagcactaccaacttgatgcatgattggttattattggtcgaaaaaaaaaaaaaataaaaaaaaaaaaaaaaaaaaaaaaaaaataaagaataaaaaaaaagaataatttatagggctttc

SEQ ID NO: 70115 - DNA, 1780 bp, Oryza sativa
  Clone ID: PAT_MRT4530_70719C.1
ctctctccctctcatcccagccgccgccgccgcagcctcctcctctcgccatctcccgtcctctccttcaagtcagctacctgcttaatcaaccatgggtaaggagaagacgcacatcaacattgtggtcattggccacgtcgactctggcaagtcgaccaccacgggccatctgatctacaagcttggaggtatcgacaagcgtgtgattgagaggttcgagaaggaagccgctgagatgaacaagaggtccttcaagtacgcgtgggtgctcgacaagctcaaggccgagcgtgagagaggtatcaccatcgatattgccctgtggaagttcgagaccaccaagtactactgcacggtcatcgatgcccctggtcaccgtgacttcatcaagaacatgatcacgggtacctcccaggctgactgtgccgtgctcatcattgactccaccactggtggttttgaggctggtatctccaaggatggccagacccgtgagcacgctcttcttgctttcactcttggtgtgaagcagatgatctgctgctgcaacaagatggatgccaccactcccaagtactccaaggcccgttacgatgaaatcgtgaaggaagtctcatcctacctgaagaaggtcggctacaaccctgacaagattcccttcgttcccatctctgggtttgagggtgacaacatgattgagaggtccaccaaccttgactggtacaagggccccaccttgcttgaggctcttgaccagatcaacgagcccaagaggccatcagacaagcccctgcgtcttccccttcaggacgtgtacaagatcggtggtattggcaccgtgcctgtgggtcgtgttgagactggagtcctcaagcctggtatggtggtgacctttggtcccagcggcctgaccactgaggtcaagtcggttgagatgcaccacgaggctctccaggaggctcttcctggtgacaacgtcgggttcaacgtgaagaacgttgcggtgaaggatctgaagcgtgggtacgtggcctccaactccaaggatgaccctgccaaggaggctgccagcttcacctcccaggtgatcatcatgaaccaccctggccagatcggcaacggctacgccccagtgctggactgccacacctcccacattgccgtcaagtttgctgagctggtgaccaagattgacagacgatctggtaaggagctggagaaggagcccaagttcctcaagaacggtgatgctggtatggttaagatgattcccaccaagcccatggttgtggagaccttctctgagtaccctcctcttggtcgttttgcggtgcgtgacatgaggcaaacggtggctgttggcgtcatcaagaacgtggagaagaaggacccaaccggtgccaaggtgaccaaggctgccgccaagaagaaatgatcctcgttcaagtggtggtttgcgtgtctgcatttaagatatctagcttttactaattcgttaagttttgtgcacggccatggcactcgttgcattgaccgttattatcatatgcccgctgtgtgcactgtgtcgtttaaaactctctattttctgttcggtttaaacttgttctgagcctgattattgcccttcggctgttgtggaatgcgagtatttacattgctaattcctatgtctttattttggcttgtggcatgcgcttgttctgctgctattgaaaactggaatctgtttctgttattaaaaactgaaccttcccctcatatttctaaaaaccaa

SEQ ID NO: 70116 - DNA, 567 bp, Oryza sativa
  Clone ID: PAT_MRT4530_7071C.1
atgaggattgtttcggactttctaactgatagtagtacatacagatatacagatagatatacaggatttgaaatgagcaatactcccgaggattatgttgccatctgcaaatctctgcgcaatccctgtgcttcggaagatggcatgagacggcagccgtcgcggaggagtcctccacggtgcaagctggagactgcctcgacggagcttgaccttgccatcgccaacatgggcacgaccctccacctctcgctgaggcatatcgcccagagagtgttggtctgctccattgacgatggcccccatgtgttctcgtcttggtccggcccatctgcggatggggacgacaccacggcggcgacggccagccaaggtcacacaacggcggcgacggcacgcatctggccatctggagaggaaagacgtcgatccgatcgagttcccaaaattttctatgcgaaaagaccaccttacccttccacccgtgcggtaccacccaaacgactaagcgataccgggtggtaccgatcaatttcagccgttggatccaattcatctgatggttag

SEQ ID NO: 70117 - DNA, 1816 bp, Oryza sativa
  Clone ID: PAT_MRT4530_70720C.1
ggcgattgggaccctcgaggccggccgggcccttctcccgtctcatcccagccgccgccgccgcagcctcctcctctcgtcttctccttcgagttgttagctccctccttattcaaccatgggtaaggagaagacgcacatcaacattgtggtcattggccacgtcgactccggcaagtcgaccaccacgggccatctgatctacaagcttggaggtatcgacaagcgtgtgatcgagaggttcgagaaggaagccgctgagatgaacaagaggtccttcaagtacgcgtgggtgctcgacaagctcaaggccgagcgtgagagaggtatcaccattgatatcgccctgtggaagttcgagaccaccaagtactactgcacggtcatcgatgcccctggtcaccgtgacttcatcaagaacatgatcacgggtacctcccaggctgactgtgccgtgctcatcattgactccaccactggtgggttttgaggctggtatctccaaggatggccagacccgtgagcacgctcttcttgctttcactcttggagtgaagcagatgatctgctgctgcaacaagatggatgccaccactcccaagtactccaaggcccgttatgatgaaatcgtgaaggaagtctcatcctacctgaagaaggtcggctacaaccctgacaagattccctttgttcccatctctgggtttgagggtgacaacatgattgagaggtccaccaaccttgactggtacaagggccccaccttgcttgaggctcttgaccagatcaacgagcccaagaggccatcagacaagcccctacgtcttccccttcaggacgtgtacaagatcggcggtattggtaccgtgcctgtgggtcgtgttgagactggtgtcctcaagcctggtatggtggtgacctttggtcccagcggtctgaccactgaggtcaagtcggttgagatgcaccacgaggctctccaggaggctcttcctggtgacaacgttgggttcaacgtgaagaacgttgccgtgaaggatctgaagcgtgggtacgtggcctctaactccaaggatgaccctgccaaggaggctgccagcttcacctcccaggtgatcatcatgaaccaccctgggcagatcggcaatggctacgccccagtgctggactgccacacctcacacattgccgtcaagtttgctgagctggtgaccaagatcgacagacgatccggcaaggagctggagaaggagcccaagttcctcaagaacggtgatgctggtatggttaagatgattcccaccaagcccatggttgtggagaccttctctgagtaccctcctcttggtcgttttgccgtgcgtgacatgaggcaaacggtggctgttggcgtcatcaagaacgtggagaagaaggacccaaccggtgccaaggtgaccaaggctgccgccaagaagaaatgagcatcgttgaagtggtggttatgctggctgcatttgagatatcttagcgttcgttaagttttgcccacggccatggcactcgttgcatggaccgttaatatctgctcgcaatgtgcactatgttagtcgtttaaaactcgtttatttctattcggttaaaaacttggatgctctgagtcttattgttgcccttcggttgttgtggaatgcgagtacttacagtgctaaatcctttgctctttattttcgattgtgctatttggtgaaaactgaaagctcttttgcttggtgaaatctgaaaactcttggtacttttgaaatctttaacttggtaaaaaaaaaaaaaaaaaaaa

SEQ ID NO: 70118 - DNA, 486 bp, Oryza sativa
  Clone ID: PAT_MRT4530_70721C.1
atgtggaagcttgtatacccgttcccacaagcagccgacgggcctcttcacaaatctacctgcgaaaattgattttcgcacgcgatccttgaatcgtcctaggggagaaatttttgtatacgaagatagttatagtccgcctgcaacctagaggtagggatgaaaacggagcggatagtttccatctgctccagacaaaaacggatacaaatacctttcggatcggatatataattctcggatagttcggatacagatacgaataaagatattttctaccggatacggatacagatatgaagttgagttggttttcgtgttccgagaaaaaaatattttcgtattcgtgtccgatcatattcgattcttattcgtattcaagataatccgtatttgtttccgtattcgttctttgaggcagagaatgtatttcatcaattactttcttgactctttggagtacagtaaaccattatagggatgctt

SEQ ID NO: 70119 - DNA, 1795 bp, Oryza sativa
  Clone ID: PAT_MRT4530_70722C.1
ccggccgggaattttcgcagccaactccggctttcccctctcccatctcaccccgccgccgccgccgccgcagcctcctcaaggctgctcccatcctctccttcgagttagcttcctccttattcaaccatgggtaaggagaagacgcacatcaacattgtggtcattggccacgtcgactccggcaagtcgaccaccacgggccatctgatctacaagcttggaggtatcgacaagcgtgtgattgagaggttcgagaaggaagccgctgagatgaacaagaggtccttcaagtacgcgtgggtgcttgacaagctcaaggccgagcgtgagagaggtatcaccatcgatatcgccctgtggaagttcgagaccaccaagtactactgcacggtcatcgatgcccctggtcaccgtgacttcatcaagaacatgatcacgggtacctcccaggctgactgtgccgtgctcatcattgactccaccactggtggttttgaggctggtatctccaaggatggccagacccgtgagcacgctcttcttgctttcactcttggagtgaagcagatgatctgctgctgcaacaagatggatgccaccactcccaagtactccaaggcccgttacgatgaaatcgtgaaggaagtctcatcctacctgaagaaggtcggctacaaccctgacaagattcccttcgttcccatctctgggtttgagggtgacaacatgattgagaggtccaccaaccttgactggtacaagggccccaccttgcttgaggctcttgaccagatcaacgagcccaagaggccatcagacaagcccctgcgtcttccccttcaggacgtgtacaagatcggtggtattggcaccgtgcctgtgggtcgtgttgagactggagtcctcaagcctggtatggtggtgacctttggtcccagcggcctgaccactgaggtcaagtcggttgagatgcaccacgaggctctccaggaggctcttcctggtgacaacgtcgggttcaacgtgaagaacgttgcggtgaaggatctgaagcgtgggtacgtggcctccaactccaaggatgaccctgccaaggaggctgccagcttcacctcccaggtgatcatcatgaaccaccctggccagatcggcaacggctacgccccagtgctggactgccacacctcccacattgccgtcaagtttgctgagctggtgaccaagatcgacagacgatctggtaaggagctggagaaggagcccaagttcctcaagaacggtgatgctggtatggttaagatgattcccaccaagcccatggttgtggagaccttctctgagtaccctcctcttggtcgttttgccgtgcgggacatgaggcaaacggtggctgttggcgtcatcaagaacgtggagaagaaggacccaaccggtgccaaggtgaccaaggctgccgccaagaagaaatgagcctcgttcaagtggtgctttccatatctgcatttgagatatctagctcttttagtactcgttaagttttgtcgacggtcatttcagttgttgcattgaccgttaatatctgctcgctttgtgcactatgtcagtcatttaaaactctattttctgttcggtttaaacttggatgttaagacttattattgcccttcgactgttgtggaatgcgagtatacattgctaattcctttgtctttattttcgcttgtgctattcgctgtttctgctgctattggatactggatcgtcttcctgttaatgaaaagtgaactttttg

SEQ ID NO: 70120 - DNA, 306 bp, Oryza sativa
  Clone ID: PAT_MRT4530_70723C.1
atggcggtcaaatcgccattatggctaatgcgccagcctggccgctcagcggcaaccatctgggttccccgccgggcccacaacctcggcacgggaagtcgtgaggcgccacgtcagactgccctcagggggccaatgtccgacgcggtgccgggggctactatcggagatatgggcccggggaggcggccggggggcctcggggtgccacgtcatgcccctcgggccctcgcgctgccttgccccgaggccctcgcccaactgccatgtggcggggggagcaagcggggaggagacccaggctga

SEQ ID NO: 70121 - DNA, 365 bp, Oryza sativa
  unsure (1)..(365): unsure at all n locations
  Clone ID: PAT_MRT4530_70724C.1
atcacgccgtntgaacttanagtcantgtcacagtagaatacagacataatatgcaactagatagtaattaanatcaacagctgcggctagcactatgcagcgctcctacgtctctctctgtntcagctgtatactttagggtacgcnnancccctcgcnntnncatggagtcgtcgccggcggccaacacatagctnagtaatataatttcttgatactagaacgaggtctataaatagtaaatagaatataggtggtaaatgtactccaaaattgggattgcgtaaatgcaaggattggacacaatgttgaagtgtctctgtcctgatatcactgttactgtcatgatcctatgttgcactga

SEQ ID NO: 70122 - DNA, 519 bp, Oryza sativa
  Clone ID: PAT_MRT4530_70725C.1
tcgctaagttagaagaccaaggctcagaccccagttgagttttgcctgtggagtggagctgaagccccgctaggatcgccttttccgctgctactgctttcttttaggtgtctgccgtcggccgagacgatcgcctccgcatgtagccgcgcaccgcggcagcccggagcagcaaacccgccggcgtcctcactggagcccccaagccgctgacacatgcgcatgcacatgcgcagattgcagctgcagcagccatttggacctatccaatttcaattcactaatgcgtttgcatatgtatcgatacgtatctaaccacgattgatctatcgttttgcatgtacgccatcggtcgattttcctcctgcatcgtgcgaggcaccgccaccaggcgtccacacgtctctcgtgccggcaaccgcgcgccgaacgctcacgcacggagatgttgtgaccaggctgctcgatcgcaaactacacgtgcaagccgcacgaggccgaccagcgtgtacgtactga

SEQ ID NO: 70123 - DNA, 309 bp, Oryza sativa
  Clone ID: PAT_MRT4530_70726C.1
atggctgggtttggctttggatttgttcatgccagtgcctctcacggtggaacaaggggctccggtgaaggatccattaattcgttataccaggggatgccgttgatggggcagagcgaggaggtgaggaacttccacgagaagctggttgaagaaaatttctaccttattactgaggtgtgggacttgataaagcttggagatcatctcagtgaatgggaggatgttgatccttgtagggttgggatcactggtgaatcacttagaggtattgtatatgatgaattcatgattgcatccttatattga

SEQ ID NO: 70124 - DNA, 3759 bp, Oryza sativa
  Clone ID: PAT_MRT4530_70727C.1
atgcgcctccccctcctcggcgcggcgttgccgctcctcctctccctcctcgcggcgtcgcagctgggggcatctgcgacagcggcggcggcgagctccggtgccgccgcctccgggcgcgcggaatggcaggtcctgaccagggccaacttctcctcccagatccggcttcacccccacatcctgctcgtcgtcaccatgccatggtatggcgagtcaagatcactgatggccgagatagaacttttggttgctgccgatgagcaggagctcgggcatctcaagttgatggctgtgtacagaaattctgagaagttgctaacggatgtacttggtgccacagaaggaataaagttcatatactaccaacgctcgttgccattcaaatatgaagggaagcttcgtgcacgtgagatattgtcttcagtccactatattatgtcactcaagcatgcagaggccccatttgtggttttgcatacgaaggaagatgtggaggcttttgttgaatcaactgacaaagctgtagttctatctgaattctgtgggtggttttccaaattggctcatggtgggagcaacagaaccgagggcacttcatccaaaaatcacacagaaaatgttgacatttctgggaaggcactaacaggagaatcggatgggccactagagcttgttatagaggatgaagaactgatttttggaggtggggttcagcttgctggctctccttggaaaggtggatttaccttagcaaacggaagcatgtcagatcaaaatgggattacaactgatgaaaatagaaagttgtgtacagcggaaaagcttcaacagtttgaaagtttctatgcaaagcttactgctctatcaagagattattttcttcctccagagaaagttagatttggccttataactgaaagatcatcattaccttcatcagagtttatcaatgaaggcaattcggagacatggttcctcagtgttcattatctggggtgcaccaattgttcaattgttgcaaaagaaggtgatgacctaagaagcctactgcaatcttatcataatcttaacattaacgagatggatattgatgcaagtggtatcgctacctttcctgcaagtagatcatcggctattctatttattgatagattgtcagattcttcaaaagtcagagatgaaagcaaactatccctcaaactactaagggaatatgtgcagaaaaattatccatctcatttcagtactggtggtctaactagtggtaaatccagaatgagctctaaagctgttccttccctagttagcacaggtagatctgcccatactgaacgaactaggctgaatgattgggcctccaaattaatggaaattggggagaaaatgtcagtaatggtggtcaatgatggagaaagtatttcgtacagaagtgatagccaaggtagtaccgataatccattatatgatattctaacaaaactgatacacaaaacaagaccagcacataggtcaaagaaaacaaagataagttttgttgcaaaagatgttgccataaagaagctgtctgatgattctgaagtccaagtggtggaatctctgtcaattcgagatagtcaacttgaaagaaatgaagggtcatgtgccagttcagacggtggtaatgatgattacactgaagattctgttcatgaaaacagggcaacagaagctgaatatatcaatgatagacaagcacccattaaacttgagaaaggtcctgcaaattactgtgataacaatgaaaaacatcttgaatccagtgatacagaagtggaggaagaacacaaaacaaaggcctcagatgtaagccttgatctgcaggaagatatttctgttgatgtgcacagtagcaatgctcctaaaaatttctgtaagatcaataaagaagatcttgactgtagtgatacaaaaatggaggaacaagaacataaaactgaggcttcagatacaagtgctgatcttcaggaagaggtctccactgatgtgcattccagcaatgaagttggtcatatattacacaaacacaaagatgaggaaacagttagagaagctttagacattttggaacccgatgggacaaatgtgaattttaaccaacagaagtcaggatcagcaaatcagcaagatgctgtgttttcagtcctgggtcaagaatctcgaagaattgaggatgccatttatgaggataacctatttattctagatgaaggatcagaagaaagtgatagcaaatatcctgtgcatgcagcattaagctcttccagtagccttgtgggcgataacacatattatacagagcaggaaactccaagtatacctgatgaacattttgcgggttcactcttcttctctgatggtggttataggcttctgcaaactttaactggtggatcgagaatgccatcccttgtaataattgacccaattcagcaaaagcattatgtctttccagatgagattgaatttacctacccttctttagcaaattttctcgaccattttatgaatcgaagtctatctccatattatcgttcagccttatctgtcataagttcgaaggagcttctgagaccaccttttattaaccgtgatttccacgaggcagattccatcccccagttgacaacaagtaatttttgtatgttggtctttggatttgaaggttgtgtttcaaaaagtgaactgccgttttcaaacactgaaaatatttcatctgcttggaagaaggatgtattggtgcttttcagcaactcttggtgcggattttgccagcgaacagagcttgttgtccgtgaggtatatcgatcattcaagaactttttgagttcaaattctcaatttttacaggctcaagacttgcagattgaagagaaagaagaagaatctaccatgaagggttttccagctatttatctaatagactgcacatcaaatgaatgccatcatttactgaaatcagttggcaaggaggagcgttatcccacattgttgttttttccggcagagaacaaaagtgcaatatcatatgaaagaggaatttcagtttctaatttatttgaattcttggagtctcatgctagcaattcaccccacctgttggaatataaaggatttctgtggaagaagaaaacggtcgtgcaaggtgatgcaccacaggcaattcagtttgataacagcgacaaaatcagcaacgatgttggttcccattcaccaagtcattcagagaggaacgaggcacgtgtcctcacaggttccgtgctcactgcaacttcgaagctcgggtctgccgttccatttgacaactcccaggtgctcatcgtatccgctgactctcgtgagggctttcatggcttgatcatcaacaagcgcttaagctgggacaccttcaagaatctggacggctccatggagccgatcaagcacgccccgcttttctacggcggacctgttgtggtgcagggctattaccttgtgagcctttccagagtagccttcgatgggtacttgcaggttatacccggtgtgtattatggaaacgtagccgccacagcccaggtcaccagacgaatcaaatcaggggagcaatctgctgagaacctgtggtttttccttgggttctcgaactgggaatacagtcaactatttgatgaactatctgaaggagcttggcaagtgagtgaagagcctatcgagcatttggtctggccagagaattaa

SEQ ID NO: 70125 - DNA, 287 bp, Oryza sativa
  Clone ID: PAT_MRT4530_70728C.1
tgattaccaataagggtttcatcggggtttcagccgatttaacaacatcaaacttccagccgatatatgctttaacctttggatcaatgcttattgtatcataccattattagccgattggtttatgttggattatattattgttttattacattatcatcagccgattgtctttatgccattatttacattggacatatatccgattgctcaaaatcccatcagcattggctggtatccatatcggctagtatcgctctatcggctcgttagccgatcgactcttt

SEQ ID NO: 70126 - DNA, 1446 bp, Oryza sativa
  Clone ID: PAT_MRT4530_70729C.1
atgccggtgtggctggactgggccatccgcgactccgttacctgccctccactggaggtgcaggagaagaaaccggctgggtacgcgtgtatgagcgacaacagcgagtgcgtcaactccaccaacggtcccggatactactgcaagtgcaagcaaggctacgatggtaacccctacgtcgacaaggaccaaggttgcaaggacatcaacgagtgtgatgtgtccaacaagaagaaatatccctgctacggcgtctgcaacaacatcccaggggattatgagtgccactgccgtgtaggataccagtggagtggtgaaggccccaagaaacaagagtgcagcgcaaaattccctcttgcagcaaggcttgcccttggaatcactttgggattttccttcctaattgttgctgttcttttcacgctaatgatgcacaaaaagcgaaaaatgaatgaatatttcaaaaagaatggtggttcagtgctacagaaagtggacaatatcaagattttcaccaaagatgagctaaagaaaatcacaaagaataattcagaagttcttggtcaaggaagctttggtaaggtgtacaaagggactcttgaagacaatactccggttgcagtgaagacgtcaatcgaagtaaatgaagctcgaaaggatgatttcacaaatgaagtgatcatccaatcgcaaatgatgcataataacattatcaagcttttgggttgttgcttggaagtggatgttccaatgttggtgtatgagtttgccgctaaggggaatctgcaagacattctccatggtgatgccaacatccctctcccgttgggcttacgcctagacatcgcaattgaatcagctgaaggtctaaggtacatgcactcatcaacaagtcgtaccatacgacatggtgatgtcaagccggccaacatacttttaacagataagtttatccccaagatctcagattttggaacatctaagcttcttaatgtagacaaagatttcaccatcctcatcattgagttccaaaatgcctatgatcaagagaacagtgggaggataatgttcgacaaggagattgcaaatgaagaagatatcctaatcctagaagaaattggcaggttggcaatggagtgtttgaaagaaaaggttgaagagcgacctgatatgaaggaggcgccagcgccggcgccgccgcactccattcccatagccagccgccggagctggtgtctcctccatcctcctggtcggtctaaccgccacgacattggaggggaatgggggttgtcagatccggctgttccctaccttggggcgactggatccgtccagcgccgcatggtcctcctgcagatccccattttcagtgataaacgggtgcgagggccacacgtccaggggtgggcaggcttgttgtacttcccctttgcggcgaagtga

SEQ ID NO: 70127 - DNA, 150 bp, Oryza sativa
  Clone ID: PAT_MRT4530_7072C.1
cccacagcttcggcgatcgcttagcccgttcatcttcagcgcaagggctcgaatcagtgagccattacgcactctttaagggtggcggcttctggcaacctcttgccggtccttgcaccccacctcctttatrcctgagtcgtaattagg

SEQ ID NO: 70128 - DNA, 2562 bp, Oryza sativa
  Clone ID: PAT_MRT4530_70730C.1
atgaccctagaaggcatcgaccttgaagtgcaagccgaagccgagatggggacgatgcgtcagaacatgaacaagttacaagacatgcttcgccaaatgcaactgcagcatcaagcctatgaagcggcaaaacaagtcaagccagccccatcggccccccacccgacttcgacagcgatggtcaccacccaaggtttcggccatgctgcacaaccccatgctccgccggcttcggccatgtacggacaagtctatcaagctccgctgtacgttgccaaagccgctccgaccgttacagtgcaaccggccccttacaccttcacgatgcccgttcagccggcagtgacacaagtacaaccggcgaagcatgtcgaagcacagcacgccgccatagaagcatctttgaccttacaagctcagttccaagctttccttcaacagctcaatcaaccccacacaatttcgaaaccaaccccatcggcgaatgccgttggaagcaagtcaaggtgccccggtgcaacgatgagaggcgggggcgaaaagaggccaccgttaagttgggtgctcaagaatcatcccatcccaccccaattcaagtacccacccgttgcaatatactcgcgtgaatcagacccaagtgagttcttgtcaatctacgagtccgcaatcgaagtggctcacggcaatgacaataccaaggcgaaggcacctatgaggagccgaaaacgcagcaagacctcttcggcatttgctagaagacggagaaacaacaaggagtacattcgacacttctcgcaagcacgctgccaagtgcaagacatcacagaggcgtccgtcatcaatgctgcttcggcagggctccttccaagcgacctcacaagaagaatagcaaggaaagagccccagaccatcgagcgcttgtttcgcatcatcgacggccatgcacgtggcgaagaggacacaaagcgaaggctggagatacaagccgactatgacaaggccgccgcttccgctgcagctgcgcaagcggtgatgcaagcagctgaagccatgccgctggcgaatcgccaagtgcagccgacgaagaaggtgctgcccccaagacccagccaagctcccatgacgtgtaaaaagaccagagccgaacgtggaaaggttagaaacgccgagggggtcttgttcctacaccaagacccgctgatcatttcggcagagatagctagatttaaagtacgtcgaatccttgtggatggcggcagttcggcatatgtcatcttcgccgaagcatacactaggatggggttcctgaccttggctctctctcaggcgctcactttgcttcacggctttgggggcgaagcggtgcaagtcctaggccaagttcacttagctccggcgttcggcgcgggtcccaacagacacgagcagatgattctcttcggtgtcattgatatttcgtacaactacaacgccatcttcggcaccgccacgttgaacaagtttgaagctatcgcgcaccacaactacctcaagctgaagatgcctggtccggccggggtaatcgtagtcaaggggctgcagtctttggccgtgctagggagcgaaacaacagtgataagtagagaagtagacaatgtacaagctgaagatggtgagcgagcaagaatcgtgccgaagccgtccccacatggcaaggtgatcaaggtccaagttgacgaggctgaaccaacaaaggtggtttccctaggcggcgatataagtgaagaagaaacgaataacatcttggccgtgctcaagaaaaacatcaacatcttcgtctggggatcaaacgagttggggcggaatgttgaagcatatgtcgacgacatcatcgtaaaaagccgcaaggcattcgaccatgcgtctggccttcaagatacattcgacaacctgtgctcggagaagaaaccggctgggtacgcatgtgtgagcgacagcagcgagtgcgtcaactccaccaacggtcccggatactactgcaagtgcaagcaaggttacgagggtaacccctacgacaaggaccaaggttgcaaggacatcaacgagtgtgatgtgtccaacaagaagaaatatccctgctacggcgtctgcaacaacatcccaggggattatgagtgccactgccgtgtaggataccagtggagtggtgaaggccccaagaaacaagagtgcagcgcaaaattccctcttgcagcaaggcttgcccttgtgatgcaccaaaagcgaaaaatgaatgaatatttcaaaaagaatggtggttcagtgctacagaaagtggacaatatcaagattttcaccaaagatgagctaaagaaaatcacaaagaataattcagaagttcttggtcaaggaagctttggtaaggtgtacaaagagactcttgaagacaatactacggttgcagtgaagacgtcaatcgaagtaaatgaagctcgaaaggatgatttcacaaatgaagtgatcatccaatcgcaaatgatgcataataacattatcaagcttttgggttgttgtcacagctag

SEQ ID NO: 70129 - DNA, 192 bp, Oryza sativa
  Clone ID: PAT_MRT4530_70731C.1
atggagctactgttcctgatcaaagggaggctaggggtgcaaaagataagggaaaatgaccatcctagcctgcaaaggaaacaaggagatggggataaaaagggaaagctggaaagggaaagttcatatcggctgtcaagaagaaaagcgcttcagaaggaatgtgatgctttcagattttgctttgactag

SEQ ID NO: 70130 - DNA, 423 bp, Oryza sativa
  Clone ID: PAT_MRT4530_70732C.1
tttcgtaggcatcactttgggattttccttcctaattgttgttgttcttttcacgctagtgatgcaccaaaagcgaaaaatgaatgaatatttcaaaaagaatggtggttcagtgctacagaaagtggacaatatcaagattttcaccaaagatgagctaaagaaaatcacaaagaataattcagaagttcttggtcaatgaagctttggtaaggtgtacaaagagactcttgaagacaatactacggttgcagtgaagacgtcaatcgaagtaaatgaagctcgaaaggatgatttcacaaatgaagtgatcatccaatcgcaaatgatgcataataacattatcaagcttttgggttgttgtcacagctagattttcgttttagggtttataaatttgtaactcagtttaatgtggttcaa

SEQ ID NO: 70131 - DNA, 263 bp, Oryza sativa
  Clone ID: PAT_MRT4530_70733C.1
atcaacgatggacgatcccgattagcccgcctcgcggttcatccggagaatcccaatattctgaccgccaccgtgtccctctacccgccgtcacccctgggcttcgccgccggcgagcgaaccccgccgctccccttccgaatcccgggccgacattgcaagccggtgggcatcgccacgcgtgttaccgcggcgccggatgaaccgcgaacgccgcctgcctgctcgacggaatgcctgagtggagtgaggcacgctggcgc

SEQ ID NO: 70132 - DNA, 2097 bp, Oryza sativa
  Clone ID: PAT_MRT4530_70734C.1
atggccacatgctggctacttgccggcctgctgattcttctggcttccgccgccggcgacgagagcgtcgtcaccggccggcctgctgccggctgccaggctaggtgcggcgacgtcgacattccctacccgttcggcatcggccccaactgctcccgcggggagggcttcgagatcgcctgcaacccccgaaacggcagcggcgacctggtgccgaccctcgccgccgccaacggcaccatccatgtgcagagcctgtcggtggcgccgctcccggaggtcaaggtgatgctgcccgtggcgtaccagtgctacgacgccggcgacagcgtcaccggctcgttctacggcgaggtagacctcaacaacaccggcgtgtaccgcatctccgacagccgcaacatgttcgtcgtgatcgggtgcaacaccctgtcctacacccagaacgggaacagcggcggcagcaacgccctctacgccggcctcttctacaccggctgcgtctcctactgcaacgactccccgagcgcgcgggacggccggtgcgccggcgtcggctgctgccacgtcgacatctcgccgggcctcaccgacaacgtcgtctccttcgggccctggacgcgtggcttccaggtagacttcagcccctgcgactactccttcctcgtcgacaagaacgagtacgagttccgtagcgccgacctcaagatggacctcaaccgaaccatgccggtgtggctggactgggccatccgcgactccgttacctgccctccactggaggtgcaggagaagaaaccggctgggtacgcgtgtgtgagcgacaacagcgagtgcgtcaactccaccaacggtcccggatactactgcaagtgcaagcaaggctacgagggtaacccctacgtcgacaaggaccaaggttgcaaggacatcaacgagtgtgatgtgtccaacaagaagaaatatccctgctacggcgtctgcaacaacatcccaggggattatgagtgccactgccgtgtgggttaccagtggagtggtgaaggccccaagaaacaagagtgcagcgcaaaattccctcttgcagcaaggcttgcccttggcatcactttgggattttccttcctaattgttgctgttcttttcacgctaatgatgcaccaaaagcgaaaaatgaatgaatatttcaaaaagaatggtggttcagtgctacagaaagtggacaatgtcaagattttctccaaagatgagctaaagaaaatcacaaagaataattcagaagttcttggtcaaggaggctttggtaaggtgtacaaagggactcttgaagacaatactccggttgctgtgaagacgtcaatcgaggtaaatgaagctcgaaaggatgatttcacaaatgaagtgatcatccaatcgcaaatgatgcataataacattatcaagcttttgggttgttgcttggaagtggatgttccaatgttggtgtatgagtttgccgctaaggggaatctgcaagacattctccatggtgatgccaacatccctctcccgttgggcttacgcctagacatcgcaattgaatcagctgaaggtctaaggtacatgcactcatcaacaagtcgtaccatacgacatggtgatgtcaagccggccaacatacttttaacagataagtttatccccaagatctcatattttgggacatctaagcttcttactgtagacaaagatttcaccatgtttgttgtaggaagcatgggctacatagatccagtattccataagaccggccatttaacacaaaagagtgatgtatacagttttggagttgtactgctagagctcatatgtaggaagccaacaatatatggtgaaaattgtagcctcatcattgagttccaaaatgcctatgatcaagagaacagtgggaggataatgttcgacaaggagattgcaaatcaagaagatatcctaatcctagaagaaattggcaggttggcaatggagtgtttgaaagaaaaggttgaagagcgacctgatatgaaggaggtagcagaacgacttgttatgctgagaagatctaggaagtgtggatag

SEQ ID NO: 70133 - DNA, 192 bp, Oryza sativa
  Clone ID: PAT_MRT4530_70735C.1
atgtcaaacaaaaacgacgtgaacggcttggagcttcgcccatctgcaagtccagggctccagatcaagcctcctaaaacagatccaaataccaaacccatatggaacagcgaggagaaacttcagaaagaaatgaaagagtcggaaaaagcaatcaacggaaagaagcctgacgtctatcttccgcaactg

SEQ ID NO: 70134 - DNA, 612 bp, Oryza sativa
  Clone ID: PAT_MRT4530_70736C.1
atgtccacaagcagcaggccggaggtcgggcggtggagccttgccggcgccacagctctcgtcaccggtggcagcaaaggaatcgggcgcgccatcgtggaggaactggcgagcttcggcgccacggtgcacacgtgcgcccggaacgaggctaccctgaacaggtgtctggaggagtggagagccaagaagctcgccgtcaccgtctccgtccgacgcgtcttgaatgtcgtcttccaccacaagttcccacctctcccccaccaaccttcggtcaccaagaaggccctgccggattctcgagtggccgcccctcgtggaaccccggttgcgatggatgaactattggaaagaaggctagtggcagccacggtgacagtggctgcaactgacgaggtcgagaggcttcggcaaaagttctcgtgctgctccttcattgcgtggtgcttggacaaccacagtgactgcgttgatgaggctaccttcctcacattggctaggcctgctgatagggactttattccgtgcactctacggcttgaccgctcttctagctgttcctaccatctccgagcttgggactcacaccatgagggtcatcagaccttctag

SEQ ID NO: 70135 - DNA, 326 bp, Oryza sativa
  Clone ID: PAT_MRT4530_70737C.1
ttttttttttttttttttttttttattagttggggggggtttatatgtttattttttcttttttttatttaaagaacatgagtgagcttattatagattaggtttgttgaggaatccgggggacccctttttggggaaaaactatttaaaggaaaccgcagggggggggaagggcccggggggccacaattcccgggggggatacccaaatttaaagggggggtaaaagggccaaaaaggttggggcttggggcacattttcgggtaaaagggggagattcccaaaaacgggggggggatggagtttggtgagccttttgggcgcg

SEQ ID NO: 70136 - DNA, 453 bp, Oryza sativa
  Clone ID: PAT_MRT4530_70738C.1
aaaagaaaaaaaaaggagcatcgctcctgcagccctagccgcgtcaccccctgcgttttgccgccgccactgttgttcctgtcgccgccggcggcgccgccgccgccggttcagccgtcgtcgtccttcgccaccccatccgctcatctccttgcgtggcttgttgctgttgcatcgatcagagacgagaaggctccagacagcagagaaagcagttgaacaggagtaacaagggaaggaaaaggtacctaataacattgatcggtatggggcgggagtagcacccttggactacacattatcattgcacacaactaaaatttagttttagactatatatatatatatttttttgctcagcataagttttgcatagaacttgtaaaggtcatttaaggttctgattcttattttttcacgtggggtttgtggagctaggattgtggattatat

SEQ ID NO: 70137 - DNA, 1731 bp, Oryza sativa
  Clone ID: PAT_MRT4530_70739C.1
cggcacgacgcccaacccagcataggtaaaccccccacaacccaaaccctaacaacaaggcaaggcggcgccgattgctccctccggctaccaagcagcagcgagctcagtgaacccctaccgctgccgcaccctaccaccaatggcggcgcctccggccacggcctccgcgccctccctgcgcccgtccgcggccagcccacgcgccgccgccgctcggtcggtcgccgtcccctcagggcctcgcaccgtcggtccgaggcgagacgggggccgcttcctcggcgtccgtgctgccaaggctgtcagtggcgtgcagagtggtaccgtggtggatgatggagtgcaaagaccatggaagctcagcgatgctcggctcgttcttgaggatggttcagtttggaaggccaagtcttttggtgcttcaggaacacaagttggtgaagtggtatttaatacatctttgacagggtatcaagagattttgactgatccaagctatgctggtcaatttgtcctcatgaccaacccacatattggaaacactggtgttaatcctgatgatgaagaatcgaaccgatgtttccttgctggtctgatcataaggaatctaagcatatgtacatccaactggcgatgcacagaaacacttgaagagtatctgatgaagagaaacattatgggaatatatgatgtggacacacgcgccataacacggagattacgagaagatggtagtctaattggtgtcttaagtactgatcaatctcggaccgatgatgagttgttggaaatggcaaaaaattggaaaattgttggtgttgatttgattagtggtgtcacatgcgatgctccatatgaatggtcagacaagactgattcagagtgggaattcaagaagggtcaatcgactgaaagttttcatgtggtcgcatacgattttggaatcaagcacaatattttgagacgtttgacgtcatatggatgcaagataactgttgttccagccaattggcctgcttctgaggtacttaacttgaagcctgatggtgtgttttttagcaatggtcctggagatccagctgcagttccatatgctgtgaagacagtacaagaaataatagggaaggttcctgtgtttggcatctgtatgggccaccaattgattgggcaagctcttggtgggaagacatttaaaatgaagtttggtcatcatggaggaaatcatcctgtttgtgaccttcgaagtggacgtgtcgacataagtgcacaaaaccataattatgctgttgacccagagtcacttccagaaggggtgaaagtaacacatatcaatctcaacgataatagctgtgccggccttcagtaccctaagatgaaacttttgtctcttcagtaccatccagagtcctcacccgggccgcatgattctgacttggcttttggtgaatttatagagatgatgaagaacaacagattgtgaggcgcaaatataagatacaagggtttggttcttgaaccgggaggtgagaggttctatttcagatttctgatgagagccacaagagtcaaaataatctgttgtacctgtagcttttctttccttattataagctccgacaagcttgaatgcgagggtcaaggactcgagaataagttgctttgtgactgaatcagcctatgcaaaaatattttactcctcaaaaaaaaaaaaaaaaaaaaaaaaaaaaa

SEQ ID NO: 70138 - DNA, 2726 bp, Oryza sativa
  Clone ID: PAT_MRT4530_7073C.1
gcacgagggagagaactagtccgagttttttttttttttttttagaggactaaccaaggaaggtaattccattgaacagagaaaaaattaagaatgtaacttacattgttttaacaaaatcattcattgataaatgaaaaatggacaattataatctctcttttgttaggaagagatcatggacataataaccatggggaacatatgaattttaacccactaaaataaagactcatctgagctaatcaaaagaatactagttaggaccccaagtaatgaggttgtttaccaatctctggaactgatttcagctaccaatctgtgaccaaatgttttgttgaacttgaccaccatctctgactttgcccaccaaaaatttcaagaattaaaaagaataaattattatttactaggaccaacaactattctttggtaaataaccttggcaaaataaaggcttcatccactttgggacttcatggcttcccttggaaatcacttctgatccaggtgcatctgctcaagccaagcaccgatcaccgtctggtccaacaagtcaccctgattgttcaggtcaggcctgttcatcaatgcagaagtaccaggcatgccttgtacttcgcccctcttgccattaagctcagcattgcttaccagtgactgcacccatgatacatctgtctcatcttctccaaaccctggttgtgcagggcgtctcaagcggactagctcctcgctatcgacaccccagtcaaccttacccatcggggaccccacggtgccccaagcactggaattccgtggtgaaccaacagaaggccgctgtgtggcaggggctcctacacgagcacttaggggtgatgtaggttccatggtacggggggaccggggagacatgccaccaaatggagaatgtgccaaagatgacggatcaagagcccttggggagtacattctgttggtgttaacaggtgataagaggcccttctgttgatgaagcttgttgaggagggctgatttgtgggctggtgagtagactgagtgaccttggtcattagggaacctcggagacattgccatgtctgaagcatacatgtcttcaagattggatggagcaattgttggcctgatactcagaccagctgaaaggcgtggttgggggcggctgctgggtggcaggcagagtgccccaaggtattgtgattcccattcgaggagcatgccaaggtcatcaacagcagcatcccttgcattgaaagaagaacgcagcctactgccttggagccaatgcgcagcagcagctcctccattgctcccagcagatggtgacacaggcggcggtgcaaagtgtctggtaggagaacctggaagaagcccgagcgcagctgcagcagtcatatcaatggatgaagaagcgcggggagacagcaggccggcaccactgttgtgaggcacatggcggagctcatcctcatcatgggcaaagaagcaaatgcgacgggcgcaagctgctccctccttgcagagccttgtgcgatactgtgatgggtgtagccagctctcaaacacgccatgcgagaactcacagctatcgccgctagggcagccaccaggccggcgaaagttggggcaaggcacagcagtgtatgggtgcttgcggggatcacggcggcgggcgttctcgccggggtgcacaaacgggcactcagtccagtcgtgtgagtaggcacgggagcagggccggaccttgaacgcaaacatgcggaactcatccgaagcatacacgctgctcttgatgtccggcagagttggatccaccggatactccttcttcccacgatccacagtgatgggagacagcgacgacgaacgcgacgagggcgacctgttgccctcatctggtgaggacgagagcggaggggatgacgaacctgaagccaccgaggtcgccacggcgagtgctcggcggcggccgaggagcacctcgagatcgccaagggcatctggcgaagccggaggagctaggatgacgtcggcggggaagcggccggcggaatcgggggtggccggatcggcgccagcggccaaaagcagcttgacaacagcgacggcgttgcgcgagccaccggaggcggcgcagtggagcgcggtggcgccgtcggctccagggcgacggttgacgtcgacgcaaccgccgaggcccaccagcagcgagaccaccccggcgctgccgtacgtcgccgccaccatcagcggcgtgcgcgcctcgtacgccttgctccgaccataccacagcccgaccccatcagccaactccgccgcctcctcgcctccctccgcgagcgcccccctgagcccatcaacatcatccgccgccgcgagctccagcagcgccgccagcctgtcccgccggccgccggcgagcggcggctgcgacggcacgacaacgagatcagcaagctcgcccattatctctcgccggatagattaaccaaagctcaacgcatctgtagcaaccgctagcgccctccggggttgatccaaaatcgaatccgacccaatccaatcaagcccggatccaccgctcctccctcccttccctcccctcccctgcgacgctcgccgcggcggctgcttctcgcccttggggaacaagtgagagagagagagagagagaaagcgagagtagcacggcgacgagaacctcgtgccgattcctgcagccc

SEQ ID NO: 70139 - DNA, 1134 bp, Oryza sativa
  Clone ID: PAT_MRT4530_70740C.1
atggcctacgctccagcgtggagcgtggtctcaccccgcccgaggggaatattcccgccagctcagacgggaccacacctcagcagagatggaggcatggcttacactatgaggcatatccctagccgggtctttattcacttttgctcacgtggatgttgggggtgctccctgcgttggcgatggcctaaggtgtcagctgacgtggacgcacgcgggatagacgtcgacggcatggtacgacaaccacgacggcaaacggcggcggaaaccgagagcacggggaggaagaggagaccgaggccatccttaccagtacttacaagacgacagacggtgaacggagacggccggctgcgagctcgggtcggcggctttctggcgacgacgggcggcggcaacggaggggtagacgggcttctcctcggcgctggcgatgccgaggatggcgatggggggaacaacggtgggtcacggctggaggtcgatgggaggcagaggcgctcgggttcgcatcagcgagcagcttcctgcggtcttcggtacaagcgaaccggcggccgaggtagccctcgcccttgtggagccgaaggaggcaacggcgcaaggcggcgtcgaccagagaggcggcgcgacgcggccggagttggcggcggtggcggacagagaggaaactcgcgggaagaggtggctaggccacggcggctcggggacaggaggggaaaccgaagaggagacccgggcatcatttatataggcggaggaggaagagatccatgcggatttggggtttcggcggtgggaaataagggttcccgagttcatcgggataagaatggggccgaaatccagcgcgaatttgttgggggctttcttgtggcgaacgtagaggtgatcgagggaattccgtttccgcggagcaacgacgaggccgaatttggtggaggtggcggcgttgatgtgcacgggcacggccgcacgggagaggcggctgggggaggaagacggcagtcacggcactgtagccgggtgggccctaggcgtcaggagaatgaaggaagagggacgcacagaggacttcggacgagaaagacgggcgcgggctgcgggctgaggaaggagagaggagattag

SEQ ID NO: 70140 - DNA, 543 bp, Oryza sativa
  Clone ID: PAT_MRT4530_70741C.1
atggactccacggcgtgcgccatttcaccgcggggaagcgacccgcccgacgtcgacgaggaggaggaggaggagccgtccgcgctgggagtggtcgcaggcgtagcacgagcgcttgtaggacgaggtagcggcggcggaggaggagcgcggccgccgtcgtcgacgctggtggcgtggggagattcgcgcgcctccgacgaggtagcacgaccgccgcttggtgccgatgacggtggcggcgtgagcgtcccgttcgtaggaggaggcggcggcggcggcggcggcgacggtggcgtcggaggaggggtacggtcgacggcggtggcggaagattcccgcgcctccgacgacatcgcctcgccctcaaccctcccaaaaaccagcgaacgctgcagtggagcgagcgtaggaggcagcagcggcgtcggcagcgggggcgtcggaggaggggtccggtcgccgtcgccgtcaccgtcgccgtggccggcagtggcggaggatttccacgcctccgacgagaaggccatgaaccctccctaa

SEQ ID NO: 70141 - DNA, 457 bp, Oryza sativa
  Clone ID: PAT_MRT4530_70742C.1
ggcgcatgcatcatcctcggctataattcgtcttccgccgatgcaactagagcagcgatgactagtgttttaattgtacaatcaatatgtatctgtgcctgagtctctgtaacatgtgtgggttttttactcgacaaaaatgtttgttttggctatatggatttgttggtaaataggatactctatggtcaggtagtattttatctttaatgagaaggttcgagcaatttgtggccaaaaaaaaaaaaaaaaaaaaaaaaaaaaaaaaaaaaaaaaaaaaaaaaaaaaaaaaaaaaaaaaaaaaaaaaaaaaaaaaaggaaaaaaaaaataaaaaaaaaaaaataaaaaaaagggggaaggcaaaaaaaaaaacccttttttaagggcccctaaattaaaataaatggccgttttttttaaaacctccaaaaatgaaaaaaacctgggggtccccca

SEQ ID NO: 70142 - DNA, 1047 bp, Oryza sativa
  Clone ID: PAT_MRT4530_70743C.1
atggcggcatcggagaccgcgccgttcggcgtctcggcggcatccaagggcggcggcggggtggcgggggcgagggcgcagcacgggcaactggcggtggcggggcgggtgcacgacgcgctcgtcttcgcggcgggcgcggtggcggcggtcgggcggcgtggggggatcaccgggtgggacgcgaggcgggcggcgtggatgcgactgcggtacccgcgcgggctcaacgcgacggcggcggggagggagcgggtggtgatggtgtccggctcgcaggcgccgccctgccgcggcgagggcggcgaccacctcctcttccggttcctcaagaacaaggtcgactactgccgcctccacggcgtcgagctcctctacaacaacgcgctgctccagcccaggatgctcgcctactgggccaagatccccgccgtgcgcgccgccatgctcgcccaccccgacgccgagtgggtctggtgggtcgacgccgacgccgtcttcaccgacatggacttctccctcccgctccacaagtacaaggatcacaacctcgtcgtctatggctggaacaaggaggtgtacggcgagcgctcgtgggtcgggctcaacgccggcgtgttcctcatccgcaactgccagtggtcgctcgacttcatggacgcgtgggcgcgcatgggccccgcctcgccggagtacgccaggtgggggagcgtgctccacgacacgctccgggggaagtccgacaaggagtccgacgaccagtcggcgctcgtctacctcctctccgagcacgaggagaaatggggggccaagacctacctcgagaagggctacttcttccaggggtactgggtggaggtcgtcgaccggctcgacgacatcgcggcgaggtacgaggcggcggagctggcggccctcggcggcggcggcgcatctccgccggcggcacgcggagcgggagcactagcgtttcggagcccgaagacccacagtgcgaggatttcgaggatcaagctccagatctcgagcaaggcaagccacctttga

SEQ ID NO: 70143 - DNA, 423 bp, Oryza sativa
  unsure (1)..(423): unsure at all n locations
  Clone ID: PAT_MRT4530_70744C.1
accaatgcgccgcccacgcgtacgaccttttttttttaaacaaaaccgccaagacagggccaaagagggcgggaagaacgcaacacaggggaacgacaaggcagccgaccacaaagccagcaaccggcgagagggggcagagacggagcagaggcacagaaaacccgacaaggcgaaagagccgacgaggcaagcgaccgcagaacccgcaggagaggacaagaggcgagccgcngcngagggggaagaacccgaccaagagaaagcacaaaaacccccgaaaccgaggagccgccacgcggaccaggaggaaaganccggaacaacggaaccaacccgcgcagccgacgagagaacaccggagccacgaaacgccaccccccaaaaaagccccaaanaagcacaccagcaagaggaaaacaa

SEQ ID NO: 70144 - DNA, 1462 bp, Oryza sativa
  Clone ID: PAT_MRT4530_70745C.1
acctcgtcggagagcgggtccttgtggcggtacccgtagttccggagcacctggtcgtcggcgaagttgagcgcgcggttcatcccgtcggcgcagctcttcttggagtagatcttgttcggctcgccgccgcacggctggcacccggtgaagtgcgtcacgaacggccgccgccacccgctctgcccgccgccggcggggcccgggacggcgcccctcaccgccgcgttcctcgccgccgcgtaccgctcgtgctcccgctccgcgtgccgccggcggagatgcgccgccgccgccgagggccgccgctccgccgcctcgtacctcgccgcgatgtcgtcgagccggtcgacgacctccacccagtacccctggaagaagtagcccttctcgaggtaggtcttggccccccatttctcctcgtgctcggagaggaggtagacgagcgccgactggtcgtcggactccttgtcggacttcccccggagcgtgtcgtggagcacgctcccccacctggcgtactccggcgaggcggggcccatgcgcgcccacgcgtccatgaagtcgagcgaccactggcagttgcggatgaggaacacgccggcgttgagcccgacccacgagcgctcgccgtacacctccttgttccagccatagacgacgaggttgtgatccttgtacttgtggagcgggagggagaagtccatgtcggtgaagacggcgtcggcgtcgacccaccagacccactcggcgtcggggtgggcgagcatggcggcgcgcacggcggggatcttggcccagtaggcgagcatcctgggctggagcagcgcgttgttgtagaggagctcgacgccgtggaggcggcagtagtcgaccttgttcttgaggaaccggaagaggaggtggtcgccgccctcgccgcggcagggcggcgcctgcgagccggacaccatcaccacccgctccctccccgccgccgtcgcgttgagcccgcgcgggtaccgcagtcgcatccacgccgcccgcctcgcgtcccacccggtgatccccccacgccgcccgacctccacggcgtacgacaccctcgagtcgtcgtagaacgtcctccccgccgcgcccggcccgccgcgtacgccgacatcggcgtcgatcgccgcggaggcggcggacgtggaggcgaccgacaccgggagggagcggaacgcgacgaggttcgtgacgggcatgggcgacaggaacgacgccgtggccagcagcacgagcaccgccgccaccgcgcccgccgcgaagacgagcgcgtcgtgcacccgccccgccaccgccagttgcccgtgctgcgccctcgcccccgccaccccgccgccgcccttggatgccgccgagacgccgaacggcgcggtctccgatgccgccatggccggtctcgcctcgccgaaccgaactcccactctactcgcgagcg

SEQ ID NO: 70145 - DNA, 471 bp, Oryza sativa
  Clone ID: PAT_MRT4530_70746C.1
atggccaactacgaccaccacccctgccaccccctcgacgcccgctgcgtcgtccgccgccgcacctacgccgacacccgcggccgcgtcaccccctaccttctttaccttgaccaccccaacttcgacatcgtcttcgccctccgcggcctcaacctcgccagggagaccgactacgcccttctcctcgacaaccgcctcggcaagcgccgcttccatggcggctacgtccacaacggcctcctccgcgccgccgcttgggttctcgacgccgagtgcgacctcctccgggacctcctcgccgaccaccccgactacaccctcaccttcactggccactccctcggcgccggcatcgccgccatgctcaccgtcgtcgtcctcctcaacctcgacaagctcggcaccaatctccacaggagccgcatcaggtgctacgccatggcgcctgccagatgatgtcgctaatct

SEQ ID NO: 70146 - DNA, 202 bp, Oryza sativa
  Clone ID: PAT_MRT4530_70747C.1
tccctcctcctcctcctcactcctcacggagagatgccgagccggcgcggagaaacgaccagggggggtcactctccaccgcagaggaacacgccccaccgcgcggaggggaggtggagagctccaccgcatttaccccccccgcggcgctgcgtaggaggaccggggaggggaggggagccttgcccgaacgcggggtcta

SEQ ID NO: 70147 - DNA, 257 bp, Oryza sativa
  unsure (1)..(257): unsure at all n locations
  Clone ID: PAT_MRT4530_70748C.1
ttcaatattatagttgaagcatagtagtagaatccccaccactgaagatcattttcgtatttgctctccttgcttttgttgcctgcaatgcctctgcgcggtttgntcctcttagtcctngttttcgggcgtctcngctgctgtcgcgtctcctttttctgctttcttttgctccgcccttgcggtgctgtcgcncggtttctttttttcttagtggcctcccctttctgtgctcctgtctcgtttcttttgttttt

SEQ ID NO: 70148 - DNA, 156 bp, Oryza sativa
  Clone ID: PAT_MRT4530_70749C.1
atggcgacacttatggacgttgtaactttggtgagggcatcacacctctggatacatatgaggggggggatcaggaagcacttggagatgctagaagatggaggccaaattcatatcaagttagaggtctggtctcacggcaaaaacatcttctaa

SEQ ID NO: 70149 - DNA, 511 bp, Oryza sativa
  Clone ID: PAT_MRT4530_7074C.1
ggggggggccaaccgaacggaacccattaagcagtttatgcttgactgaaaaaaaaaagaggcaaaggcatagcgaggggtatgaaacaacaaggccctagctgggggaaaaaccaaacaaaagggggacagacccggggcttcgttcttattgaacaaacaacagggcgatggcccgttatcaacgggaaaaagggaaattaagttgtttgccccctggaggggctaaattctgccccaaaaagcaaaagggccccgggtaaaaaagctttttttccaaagggggaaaaaaaccccacccctttaggggggggaggggtttttgggaatttactgcccccaggagcccatgggacaatggagggatcgggatgctggaaattcctggactgggcttccccataatcgaaaagcctatcgatcacatccggggtggccacatttttggtcgccccgaacttttccctgaaaacccacccctcctggaaaaaaagggggggggggaccgccc

SEQ ID NO: 70150 - DNA, 757 bp, Oryza sativa
  Clone ID: PAT_MRT4530_70750C.1
ttccatctccgcagcttgctccggccgccaattacaagcgccccacacccagctgcttcgccttcacgtccacttcaccggagttgccatttccaatcccaaaccaaaggacttcattggattgcgaggggagtggagttgctgtgctgctgctgccgctgccgtcttcgacggtgagaagccaagaaagaggcggaccatgaacacgcccaactcgtggctgttcgcagacaactccaagtacagcacgcgggcgcggctgctgttcatggggctctccttctccatcggcatcctctccttcctcgtctacctcgccatctggtacacctgcacccgccgccgccggagccgtcagctccgcggcggcggctcggcgtccgcggatcaggaggcgcccgaggcgaacagccacggcatgagcgccgccgcgatcgccgcgctcccgacgttcgggtacgaggcctcggcggcggcggcggcggcgctggattgcgccgtgtgcctcgggcaggtggacgccggcgagaaggtgcggcagctgcccaagtgcgggcacctgttccacgccgagtgcgtcgacgcctggctgcgcgcgcactccacgtgccccatgtgccgcgccgccgtcgaaggccccgccacggccgccatcgccaagaaggccagctccggcggcggcgccaccgacacgccccccgtcgtggcaccagccccaccggcggcggcagaggcactgccactgccacctgtctag

SEQ ID NO: 70151 - DNA, 461 bp, Oryza sativa
  Clone ID: PAT_MRT4530_70751C.1
gcgactagctagatttacctcatcctgccgctactcgtctccgcactcgtctcctccgcccttctcctcgaggtcgacgaattcgctctgcctgaccgccgcgatcctgccgctcgcctctcgctaaaattcatgacctgatcggcccttcctgccgaggaagactatatgataatgccttattgttatctcctttgttctgattccgctcatcctgagtttatgagctcgcttatttaagcagtttacccggctgggaggcattcatatgttgaccaagaaactcggggagatatgtagacaatctgaaccggccccccctatgatgcgaatatactctacttcaaagcgtctggatattagctgtacacgctgggggtgctgattgatgctagtgtgacagcgcaggacatctctaagagtactcttgtgttctcttatatgctgacctactacttggg

SEQ ID NO: 70152 - DNA, 380 bp, Oryza sativa
  Clone ID: PAT_MRT4530_70752C.1
taaggaacgatgtcttgttcgttggatgctctgttcgcttgccggagcccgatgcatgattactcccatatatatatatcatcgttccatcactacataagcctttcttttttaaagcctcgattgttcttaaaaaaaagcctcgatcaatgccacgctgcatctggcatagtggcctgggcccaaatctatataaaaaagaagaccatcgataaggtacataatatgcaggtaatgtaccaactgtatacgcgcgcgtgcgccggcacatgtaaggtatgtataactaaaaaaaatatgtgggcatatgtttacttttttaagaagataaggtggctattccgcgccatcaacgttgcataaaataagggagggaaaaa

SEQ ID NO: 70153 - DNA, 554 bp, Oryza sativa
  Clone ID: PAT_MRT4530_70753C.1
gggaaaaaaaattccccaaaaaattcacccccaaaccaaatttccaaaaaaaaggcaggaatttggccccggggtttaaaaaaaccctgaaaaaaagccgggggtcccagggcccaaagggaaaaaacaccccggccggggtcccccccccaaaaccaagggggggtcataaagtttaaaaggaaaaaactggggggcgccgggtacgggccaacgggttttggcgggagcatcaaaccccggtaaattagccggccgggaaaaaaggcaacccccccccaaggggaaaaacgggggtttttgcccaagaacaaaaaaaacaactttggtcaaccctacccaaaaaaggaaattctcaggggggtcttcccgcttcggggccggggggggtaaacccaaacaaagggcccccgggttaaacctttttgaaaacgcttaaagcccttttcttgaaaagaaacaaaaccggggcccggaaagggctatctaaaaggaattggggcccacaaaaaaaatggggtgagggcccaaaaggaccggtttttaattaaaag

SEQ ID NO: 70154 - DNA, 1701 bp, Oryza sativa
  Clone ID: PAT_MRT4530_70754C.1
atggccaccaccacctcctcttccgcctccgatcccgccgccatttcgccgacgccctcgcagcaacatgccagcagcacggtgaagacattggatgaccggcggcctgctggcaccagcagcagcgccggcgagacggaaccgaaggcggcggttgagccgcaggagtacccacggcgacccggagtgccggactgcagctactacgtggagttcgggagctgcaagttcgggatgcgctgcctgtacaaccaccctgcgaagcatgccggcggttgcgacaagctggagcacccgcaacggcccggggagcacgactgcctccactacctgaggttcgggagatgcaagtacgggatgaactgcaggttcaaccaccctcccgaccgcctgcctcagcagcaagtgcctgctgagcaaatccgttacacaagggatcaacttctcaaactgcgcgagactgttgatgtacctaaggacatcatgaaacttattcaagatattaatgtagaactccgtgctgaagatgaaagtcgggctccaaatgaaacaaattatgagactgacagccatgactggcattcacggtctttacaaactccagtggttgccgaggaagagaaatctcaggacgatactcgtgaagcaaaagaaccctatgctttaggttggaagcaaaaggagtttaacaagcaagaccaaaaaagcttccagtctgattctaaagctcaggctggccccaccttggctcttcataaggctgaagacccttggtcaatccagagaagcactgtccctgagaaatacaaagttcttaaaacagtaaaaggtatactgaacttattgacaccagagaagttcgatattctgaaggaccaactaatagaagcaggaatcactagaaccgatattttgaaggatgttattgatcttatattagagaaggcggttgctgaaccaactttatgtccgatgtatgcccaattttgctcttatctaaatgaaaatatcacagcattccccccaaaagacactcattgtgaacaaattacattcaaacaagcactatcggacaaatgtcaacaagcatttgaaattgctcgcaatgttcgagccgacatctacaaattgactggacgagagcaagagatggagcgacgggataaagaaaggctagtgaaacatcaaatacttggaaagattcgtcttattcgtgatctgctcaagcaaaaaatggtcccagataagatagtacatcacattgctcaggcagtgacggattgtgaaaattttcactttgaaccacttgagaatgttgatttgctaaatataatctttgacggcgtgctggattcggttttaccaggaactgaagctaataaagttgtcaatgctattattggtatcgagaaatgttccattgcttcaaatgatgctgggatcattcataaggatgttaataggcgaaatgaggaggcaaaattacaaaaatcttctaatgatatcccgaataacttgatcgatcctcagaaaaattatgtggtttcagcttttggtcatcccattgagaatgagaagcaaacaaattcagaaacatccgtgagaatcagtgaagtaggatgcggtatttctgagatcatggagttaattgttaatgctggtgctgaggaaggcaccctcaaggaagacttcggtggctaa

SEQ ID NO: 70155 - DNA, 5898 bp, Oryza sativa
  Clone ID: PAT_MRT4530_70755C.1
atgtctacggaggacgagaagctcctccaggaggcgaagcacctgccttgcgaccggcggctcgagcaccgcacccggaccgtgcggatcgacgcgaacaccccttcctccgcgccgtccgcctcgaccccctcccccaagcccacccccttctgcgtgtccgtgcatcagcgaggagcgcggggctgccatatccgaagaccccgacctcgctggtggatctagcagcctggaggaaagggacgcaagccatagcgaccctcttcccctctttcatctctgctccgccatcacatctctctcgatcgacctatccgcgccgcttggttgttgcaggtttgtctcgatggccgtcggaattgatgatctcgaccagaagtgaaggctgccacccctgctctcttctcctcttcctctccggtcctccactgctcctctcgaccctcttcctcccgctctccgcaccgctcggtggcagatccaaggggctatttggtctcctatgaggacacatgaacgctacggtgtgggggctgaccgatggctaggaggctgggaaggagaagctagagccagagtggcgcggctcagaccccaaagccacgacgacggcagcgcagcgtcgactatggctagatacggtatcgactaatgaaagaacttggtgcgtcctgctcttattttcttgttcacgcttatccatctcgcaatatgagagccgaacaagaaaaggaacttgaggaggaagttgtgccagaggcagcaggcactaacaattctgaagaggcagtgccagaggcccctatggagatcgatgaatacgatcttgttgatcctgttgatatcttaacaccacttgagaagtctggattttgggatggtgtgaaagctaccaagtggtctgaaagaagggatgctgttgccgagctaaccaaacttgcttcaaccaaaaaaattgctcccggtgattttcatgaaatctgccgaacactcaagaagcttattaccgatgtcaatttggctgtttcagtggaagctactcaagcaataggaaatttagctaaaggtttaagaactcatttttctggaaattcacgggttctgcttcctgttttacttgaaaaactaaaagagaaaaagcctactatgacggaagcactcagtcaaacacttcaggcaatgcataagtcaggctgtatcacacttcttgatgtgattgaagatgttcgggtggccgtaaaaaacaaggtccctcttgttcgatccttaacactgaattgggtcgcgttttgcattgaaacaagcaataaagcaaccgtgctaaagttgcacaaggaatatgttcctatctgcatggagtgcttgaatgatggcacaccggaagtgcgtgacgcttcgttttctgtgttgactgcaatagctaagatggttggcatgaaaccattggaaagatccttggagaaattagatgacgtgaggaaaaagaaactgtcagatatgataggctctgccagtgatactacttcagggacagtggcagcctcaaatactggagttggcacatctgctcgtgaggttatggatagctcatcaatgagaagatctgctgcaagcatgcttagtgggaaaaagcctgtccaggcagtgcctgctaccaaaaagtctggacctgcaaaatctgccactgcaaagaagacagatggtggtccacagtcaaaggcttctgctgctcctgtaattgaagatgttgagccatctgaaatgagtttggaagaaatagaagagaagttcagttcgatgaaagggatcagcgtcaatttcccaattaaagagcactgtctggaaggaacgcctttgagctattagcatgctaaagcaggaggtggaaagtcttacagaactagacttattaatttgctgaggcctttatacccttcaagatggccatcccctacaccaccagagtccctcgcagtgaaaaaccagaagatctcagatttagttgtcaaatgtttaattaagttgacaaaggttttacaaagtacaatatatgaagtcgaccttgatcgcattcttcaaagcattcatatttattggcaagaactagggatggaagagattcggagaagggcaggagccgatgacaagccacttagaatggtcaaaactgtgttgcatgaacttgtaaagcttcgtggtacatgcaatcaaaggtcacctttcaatggttccaatagatgctgaacctcagccaatcattttggcatacattgatcttaatcttcagacccttgcggcagctagaatgctgactccatctggaactatgggccaaactcactggggtgatgcagggtccaataatccaaacccatcaactcattcaactgatgcacagttgaagcaagagcttgctgctgtattcaagaaaattggtgacaaacaaacatgtacaattggtctttatgaactctaccggataacccaactgtaccccaaggttgatatatttgctcagcttcagaatgcaagtgaagcatttaggacctatatcagagatgggctagctcaggtggagaagaatgctgctgctggaagaactccctccagccttccattatccacacctccgccaattgcacctataccctctccattatctacaccttctccgcttcactcaaaatcgataaataataaaactgattgtaatgaggatgatgctggtggtgacacacaccccttcagaggtcaaggggagattgataataggttacaaactactaacctacagaccgacagataccaatcttcagtgaggacgttggatgcccttagggaacggatgaaaagcattcaagctgctgctgttggtgccaattttgatggagttcaggctcgtccattgccgagcatgaatggtaatacactccatgggggaacacgattggatgctgacccacaaacacaaaatattattccacccatggacgagagagcgttatctggcctgcaagcacgaatggagagactaaagagtgggtctatggaaccactttaaatacagtaattgtactccgaaatataccaatcaattgtaattcactgtaaatttgcagcatagtcatgctgtttgtagataggcatgtcagacgtgcaacatgatgcagggctgacactttgtgagcccagtttgacaacccattcttgcagagtttttcggttcagttttagataagctagccagatgctttgcctgtagcttgccgcttaagggccagattagtgttttgacacattttcgttgagtgttgagttttcctgtattgtacagccatagaaggattttaaactaactgaaattatcacctgtggaatcttaaatcatttataactatatgcgattgaggggtctggggtggccccatttgtgctctgtaagcttgcgactatggaactctgattttaagaggcaaatagatggtattgagttactacagaaggcattgccttctagtaggaaagaagtgattgagcttctcgatatactattaaggtggtttgtcttgcgattttgtgaatctaacacaacatgtttgctgaaggtgcttgacttccttcctgagctctttgatgttctgaaagatcagtcatacatgttaacagaagctgaagctgcaattttccttccatgtcttatggagaagtctggccacaacatcgaaaaagtcagagaaaaaatgggagagctgataaagcaaatggtcaacatctattctcttccaaaacttctcccatacattttggagggtctacgctccaagaataaccgtactaggatagaatgtgttgatattattggatatttcatggaccatcatgggactgaggttagtgggtttactgaaaaatttgccatctgtagcggcattaacagcagaacgtgatggtgaaatccggaaagctgctcttaatacacttgccactgcatacaagaaccttggagatgatgtatggagatatgttggaaaactttcggatgctcaaagaagcatgcttgatgatagatttaaatggaaggctcgagaaatggataagagaagagaaggaaggccaggtgatgctcgagcagctttgagacgttcagttagagagaatgggtctgatattgcagagcaaagcggggaagcggtttcccgttcaatggcagggtcaatgatttcaagggaaaactttgggtattctgatgctcatatggtacccaggcagatggcaaccgcaacacctggtccagcagattggcgtgaagctcttgatattgttgcactaggtttgcctgagcagtctgttgaaggaatgaaagttatctgccatgagctaactcaggcagttgatcctgaaagctctgtccttgatgatctgatcaaggaagctgacagattagtttcatgcttggctgttatggttccaaaaacttttaattttagcctatctggggcttcgtcaagatcttgcaaatatgttttaaatactctcatgcaggctgtatttcagactttccagatcaaacgtcttgctcatgctgtgaaggagggtactctagataaccttatcacagagctactactttggctcttagatgaaagggttcctcttatggatgatggaagtcagctactcaaagctctaaatgtcttgatgcttaaaatcttggataatgctgagagaacatcctcattcgttgtgcttattaatttgctgaggcctttagacccttcaagatggccatcccctacaccaccagagtccctcgcagtgaaaaatcagaagttctcagatttagttgtcaaatgtttaattaagttgacaaaggttttacaaagtacaatatatgaagttgaccttgatcgcattcttcaaagcattcatatttatttgcaagaactagggatggaagagattcggagaagggcaggagccgatgacaagccacttagaatggtcaaaactgtgttgcatgaacttgtaaagcttcgtggtacagcaatcaaaggtcacctttcaatggttcctatagatgctgaacctcagccaatcattttggcatacattgatcttaatcttcagacccttgcggcagctagaatgctgactccatctggaactatgggccaaactcactggggtgatgcagggtccaataatccaaacccatcaactcattcaactgacgcacagttgaagcaagagcttgctgctgtattcaagaaaattggtgacaaacaaacatgtacaattggtctttatgaactctaccggataacccaactgtaccccaaggttgatatatttgctcagcttcagaatgcaagtgaagcatttagaacctatatcagagatgggctagctcaggtggagaagaatgctgctgctggaagaactccctccagccttccattatccacacctccgccaattgcacctataccctctccaaaatttgcaccttcaccggttcacacaaaatcgataaataacaaaactgattgtaatgaagatgatgctggtggtgacacacaccccttcagaggtcaaggggagattgataataggttacaaactactaacctacagaccgacagataccaatcttcagggacgttggatgcccttagggaacggatgaaaagcattcaagctgctgctgttggtgccaattttgatggagttcaggctcgtccattgccgagcatgaatggtaatacactccatgggggaacacgattggatgctgacccacaaacacaaaatattattccacccatggacgagagagcgttatctggcctgcaagcacgaatggagagactaaagagtgggtctatggaaccactttaa

SEQ ID NO: 70156 - DNA, 543 bp, Oryza sativa
  Clone ID: PAT_MRT4530_70756C.1
atgccgccgtcgtcgagtccttgctctctaaggagaggagaggaaggtcaccggtcatgtgccacggagctcgtcctcgtctcccactcgcgcggcgaggagctcgtcatcgttcgcgcgccgctgagctcaaagtcgtcccccgctcgtgagccgccgagctcgtcgtcatccaactgcttggctccacagacctcgtcgtcgtcgattcgtcgggtctgccgccacctcggcttccttgaccgctgctgcatccccatgcgggttgggctcgagcagcatccgggagtggagaggccccgatggggagaggggataggccggtggcggcgtagttcgttgctgaggtgtggggagtggggagaggccggcggcggtggagttcatcgccaaggtggggagaggctagaggcggcggtgtcgctgtggaggaaactctgtcgtgctgaggaagaagggaaattggaacaatttgctgagaagatgaaggagctgacctctaatctaaaaccgagaagaactggagtagggcagacccggtag

SEQ ID NO: 70157 - DNA, 1124 bp, Oryza sativa
  Clone ID: PAT_MRT4530_70757C.1
ctgcaagcagcagcagcagcagcagctcaccatcacttgggagttcggagctggtcagcattatcaagcttgagctgagctaggtacgtaggcgggcttgatctcgtggttgacacacgagctcatcgtcagccatggcgtttagctctagggccgtcgtcgccgtcgcttcggttgctctgctcgtcgcggctctggcctccaccgccgcagccgagggcaatcccgtcgagtacacggagagttactacgataacacgtgccccaacgcgcagaacatcgtgcgatcggtgatggagcggagcgtcgccgccaacccgaggatggcgccggccatcctccgcctcttcttccacgactgcttcgtcaatggttgtgacgcctctgttcttctgaaccggacggacaccatggagagcgagaaggacgccgagccggccaacacctcgctcgccgggttcgacgtcatcgacgagatcaagtcggtgctggagcacgactgcccggccaccgtctcctgcgccgacatcctcgcgctcgcctcccgcgacgccgtcgccctcctcggcgggccgagatggagcgtgccgctcggccgcatggactcgcggcaagccagcaaagcggtcgccgaggacgccaacaacctcccgaacccgaacagcgatctcggcgagctcctcagggtgttcgagacgcacggcctcgacgcccgcgacttcaccgcgctctccggcgcgcacaccgtcggcaaggcccacagctgcgacaactacagggaccgcgtctatggcgaccacaatatcgacccctcattcgccgcgctccgccggcggtcgtgcgagcagggcagaggcgaggcgccgttcgacgagcagacgccgatgaggttcgacaacaaatactaccaggacctgctccatcggcgcgggctcctcacctccgaccaggagctctacacccatggcggggaggtaactagtgagcttgtggagctgtacgcgaagagccgtaaggcgttcttcgcggacttcgcgagggcgatggtgaagatgggggagatacgcccgccggagtggattccggtggaggtgaggctcaactgcgggatggtcaacaattga

SEQ ID NO: 70158 - DNA, 177 bp, Oryza sativa
  Clone ID: PAT_MRT4530_70758C.1
atgattgtgcctggtgaagtcagtgaatgctcgggcaatccattcgaggcgtcagtgacaccgcagatggaccacctgtacattccttccttcgatgaagctccagcatctttacctccgggtggcatagccctggatgatgatagatttgggaacatgttagcatgcgtcagctag

SEQ ID NO: 70159 - DNA, 543 bp, Oryza sativa
  Clone ID: PAT_MRT4530_70759C.1
atgggccacgccgccgtgacgaaggcggacacgggcggcacgtcgcggagtgcgcgccagacgatcgatcacttttgtgcgtgcggttacctcgatggtggaagcaagagcaatggcagtaggcggcggcggcgtgagccagatgcagccgtcgtcttcgctccaccactcggctaccgcctgaggcagcagctccacttccgccggcaggcattgggtggatggggagaaaaggccggcgcagcgaggaggtgccggggcagcgccgggcagaggaggccgaggtggaggcgttgggtggtcccggaggcggcgcccgtgcgggccggcgctcgcagtgtggttgtggtctcgagcaagacgaagacggcggtggtcgcggtggcgattcgttcggccgagatggaggccggaggtgctgacagtcgtggtggcgaaatggcagtggcgcgggggtggtgctcgcgcgggagatgtggccgcgcgtggtggcagcggccgagcggacggcttggcgcggcggccgagagggaaaagtggtag

SEQ ID NO: 70160 - DNA, 1262 bp, Oryza sativa
  Clone ID: PAT_MRT4530_7075C.1
ttagagcccaacaataataatccccccttttcatcgcggcgacgatacccgccattttcatctcattctcaccaccaaaagcgaccacgcagcgaccggccaccgatcgagatggagcagcatgaggaggcagcggagaggaagccttcgccgccggtgatattccggctgttcggcgtcgaggtccgcggcggcggcggcggagttgacgaggaggagtacgaggaggaggaggtggagggtggattgttcatcaagaagagctccagtatgcccaacctcacctccatcgacccgctgccggtgccggccgacggcggcaaacggcgcgcctccgacgactccgagctcgcctccggccagcagaagcgccgccgccgcaaggtgcaggagaggaagaaaggggtaccatggactgaggaggagcacaagaaattcctggaagggctgaggcagctggggaaaggggactggagaggcatctccaagaactttgtgaccagcaggacggcgactcaggtggccagccacgcccagaagtacttcctccggcagaccaaccctggcaaaaagaagcgccgggccagcctctttgatgttgttgctgagtgcagtgatgatcagcttccaagtcctcagagtgttggaactaagcctcctacccaggatataattcatacagatcgcggcgatgtcccgatactaagctatccagttgctagaggctttagaggcgatagcgtgcaggttgatgaactaactgaatatgtgaagagattaaaggccgccgaggacatgtcgctctccatgatctctggactggaaatggcatcatcatccatcagcagtctagagctcagtatcgcgcctcctcattgcgcgatcgaggcggccatcaaggtgctgtgatccagacgcaattctccaccgaaggaatctggatcggcttcagctactgttcttcgtcgccgctgttgttgtttgttgttgttgttttttttttttttttgcgggggttgtttgttgttgttgttgttgtagttgtcatgctaactttgtatttgggtcatgtggcgtttctttcagcagtcttatataatacagtgagaatgtcagtaccttccgagacatgtttaattaagccttggttggttggtataagttggtgaaaagaaaaccagatagtagcctgtctgtattgtacggttgcaaaattggagtatattgatgcagagatcatgaagggtctccatcttgttcat

SEQ ID NO: 70161 - DNA, 921 bp, Oryza sativa
  Clone ID: PAT_MRT4530_70760C.1
atggctgagaagctgctgtacccaccaccgcttctctcccacgaggaggtcgccaacgacagagcggccttcatggacaccctcaggcgcttccattccctcatgggcaccaagttcatgatccctgtgattggaggcaaggagatggacttgcacgctctctatgtggaggtcaccagcagaggcggcctcgcgaaggtgatggaggagaggaaatggcgggaggtgatggcgcggttcagttttcccgcgacgacgacgagcgcgtcgtacgtgctgaggaggtactacctcagcttgctccaccactacgagcaggtctacttcttccgcgcccatggcgccctcctccgccctgctgcgtcggcgctgacgaagacgccgaggaggaagatgagaggaacctccgatcagtcgccggcggcggcggaggccgggaagagaatggcgctcccggagcggctaggcggagagccctgcagcttcagcgtgaccggctccatcgacggcaagttcgagcacggctacctcgtcaccgtcaagatcgccgccgagacgctgcgaggcgtgctctaccgcgtcgcaccaccaccaccaccaccagcagcaccaccaccaccgccaccgccggcgaggggccggcggcggcgagggcggcggcagcgcgacccggcgcagccgaggccgaacaggagcgcctacaacttcttcttcaaggagaagcacccggagctgaaggcgacccacccgcacagggagagggagtacagcaggatgatcggcgacgcctggaaccgcctcgccgccgacgacaagatggtttactacaggcacagtgcagaggacaaggagaggtacaagagggagatgcaggagtacaacgagaggctcaagcttgcgccgtcaacaatggctggatga

SEQ ID NO: 70162 - DNA, 350 bp, Oryza sativa
  Clone ID: PAT_MRT4530_70761C.1
ttttcactgctggcgctgacttcatcctggtggggtccatttacaagccgtgcggtctgatccagctgcacaccatgcagtccggctcaatggccactggtgtcatgcaccggtggcctgtcgtgcactgtgtaggagggcaccacaggctttcacatgggtgccttagaccctgacatgctgaaccaggcagatgctgatgccattgcagcaacagtgcacccgcgtcacacaggtttactgcatcccctggttccaggatacggtgaaggcctgcatgaacccggacctcagatgtagccagcccgccaggaagtggcaggccacgctggaggaggacaccaaggggt

SEQ ID NO: 70163 - DNA, 2167 bp, Oryza sativa
  Clone ID: PAT_MRT4530_70762C.1
gggcgaattcgagctcggtacccggggatcctctagagccgacaatcaagctcaagcgttctctcattgatggtggcgatgcactgaacatcctcttcgccaagactctagacgagatgcaaatcccaagaactgagttgaagccgagtattgcgccctttcatggagtcatcccggggttgtcatccacacctcttggccagattactttgccggttaccttcagcactcgggaaaacttccgtacagagaacgtcagttttgaagttgctgatttcgaaacggcttatcacgctatacttggacacccggcgttagctaaatttatggctgtcccacactacacctacatgatgatgaagatgccagtacaacgcggagtcatatctctgcgaagcgacaacaagcaagccatcaccttcgataaggagagctgtgagatggcccaaacctgtgagacagcactcgctccttaggagatccgactagttgcatcaacatcagctgagggtgaagaacctgctaccaagctacccaagactggagaaggcgatgcaaagacaatgaaaatcccccttgatccatctgatcctaccaaaactgctgctaataaagatttctttacgtggaaaccatctgatatgcttggtattcctagaaaggtgattgagcactccttaaatgttaaataatacggtaatcataccaagcaacgactccgccaattcgcacaggacatgaaggatgcaatcaaggaagaattgaccaagctattagcagcaggcttcatgaaagaagtctttcatcccgactggttggccaacccagttctagttctgaagaaaacaggaaaatggcgtatgtgtgttgatttcacggatctcaacaagtcatgccctaaagatccttttgggctgcctcacattgactaggtagttgattcaatagccggctgcgagctactcagctttttggtttactactcgggatatcaccagatagcctgaaagagtctgactgcttgaagacttcatttatcacaccatttggtgcttatttctatatcactatgccgtttggtttgaagaacgatggggcaacttatcaatgcatgattcagagatgtttttcaagccatattagctgcaacgtggaagcttacatggacaatgttgtaatcaagaccaagcacaaggacgactttatatctgattcatccgagctccctttaagcccattcaagtctcagtaaatcaagaaaaatgcatagaatccattaaaaagggttttgttctttgtttcagtatttctgggcgtgacagttaggtgtcgcccgtgagaatccattgcatattgtcgatgtcccggataagtttgtgaaggatctcctctcctccgaaagggaacgaggtaagttaattaagttcttgtgctgagattctagaggctttccaattctggagttccttaccaggaagttccgggtctatttgaattttaccgctgcgatttgtttttaagttttcagggacagcctattcacccctccccccttcaggcttcatcagcgcgttcaatacgtgtcggcaacatcttaggtagtgagttcggtgcttgtcattgagcgagaggaagagggccatgttcaaaaagtttaacgaccaatctacttcgttagtgaagttttggccgattccaagacaagatatcctcaggtacaaaagttgttatatggtgttctaataccattaggaagttggccctttactttcaaagtcacttagtcatggtgttcacatcttttccactcggagatatcttcacaatcgtgaggcgactagtcgtattgcaaagtgcgctttggagttgatgtctttggacatatcattcaagccacccacttcaatcaagcctcaagccttgccagattttgttgccgagtggaccaagtgctagtaagacacgccttcgaaaattggagtactagactatgcattttgatgggtcgaagagaatattaggcacaggtgctggggttgtattgatttccccgactggagaacgacttagctatgttttgtagattcattttttagcttcccataatgtggctgagtatgaagcactacttcacggactcagaattgcagtatctttagtgtcgaaa

SEQ ID NO: 70164 - DNA, 204 bp, Oryza sativa
  Clone ID: PAT_MRT4530_70763C.1
gcgttctcttccgtcagacttctggccattcgactccccatttcaccgtaccctaattccttactccttattatattcacgctcataagctctgaaaaacacctgaactactgcatctccaggacgtggaattatggcgatggacaagttgaacgccactagctgaaatctagtggaccatgcatgcttaataacctacctact

SEQ ID NO: 70165 - DNA, 242 bp, Oryza sativa
  Clone ID: PAT_MRT4530_70764C.1
cccacgcgtacgtccacgcgttcgcagaattatcataagaatcgattaaaggggtgtattacactaacgccgcctatgtgcattactcatttagaaaaacagagttaccgcttcttgtagagggaaattggattcttggacctcttaaacaagaaccacctggaaatgcgagggagtgagcccctccactaaagacggctttgggaaaacttttcctcggaacagacaatatacttgggatg

SEQ ID NO: 70166 - DNA, 318 bp, Oryza sativa
  Clone ID: PAT_MRT4530_70765C.1
ttgtttaaagagatggggtgtgtggatgaggactaattacaagcaggaacctacgctatggcgcaggaggaactgtgaaccgaatagcatggggcatgcaggtattgactctgagggcagaaaaaggttcggacattattccacaaaactctgaggcatactggaatagatggctgacgcagagatgcacaaggcaggatttggagggagttttgccggggacacgctcgtcaagagggtgtacaagtactggaagaaggccgtgccgtggtagtatcctcacgtggcgccggttccggaggcggtaaaggcgataga

SEQ ID NO: 70167 - DNA, 144 bp, Oryza sativa
  Clone ID: PAT_MRT4530_70766C.1
atggcgcttctcctgtcggtggacggccgcataaggtgtgggggtgacatcgcgtcggtcgagctcgacggcgtgcggcacgtgctatgcgagaaaggggctcgtcgccgaggtatccgagttcctcttcggttccgggagtaa

SEQ ID NO: 70168 - DNA, 165 bp, Oryza sativa
  Clone ID: PAT_MRT4530_70767C.1
atggaggatggatggtgggtggagcaatggagtgttagctttcaatcagcaggtggtcggatgacggagctgtcaagtcaaaaccctgtcttggttctccttgagacctcaatggacgatgatggcagtgccatcgtcgttcctctccttggagacgtcgtctaa

SEQ ID NO: 70169 - DNA, 687 bp, Oryza sativa
  Clone ID: PAT_MRT4530_70768C.1
atggagagggggccagcggtggtgatggggtcttggagaggagtcgatgaggcagcggcagcggcgggtggctccaaggtcgacaacgacgatgagtgcgagacggcgccgcgagtgcgagaagacagagcgtcagggtgggtgcctcacgagaaggaggaggcggcggcggcggaggatgaggaggcggccgcttggcgcagctttcccccctccctctcggcgtcgtgcgggcggagcggtggccgagtcgcggcagccgcggacgagctggccggcggtggaggtgggggcgccgtcagagcggtgcggcggagggggcctcgacgccggccgtcccgccgccctcgtccttcccgcgcgcacgccgctgagagggagggggagtgtgcgggcggagcggtggccaagtcgcggcagccgcagatgagctgccccgcggtggaggtgggggcgccgtcagagcggcacggcagagggggcctcgacgctggccgtctcgccgcccttgtcctctctgcgcgcacgctgctgagaggcgccgccgccgtacgcttcatcctcatcgttgtcctcctcatcccccctcgttggtgccgcccgccgtcaccgcgtcctccccggcgctccgccaccgcccacacgccgccgctgaccctacctgatcttatccccgttgggcaatga

SEQ ID NO: 70170 - DNA, 273 bp, Oryza sativa
  Clone ID: PAT_MRT4530_70769C.1
cggacgccgtgcgcactctatacgttgcgtggcgaaataacacatggtgaacgtgctgctgcgttaaaggtgcagaccacacacacgtttttctggtgtgctaatcgacagctgcaatgcctgggtggatggagcctactacagagcatctatccctgtgatagatcgtgcatgcgattcacacagctggcatcatacatgatgatgtcataggcgatactggcatgagtggagggagagacatgtttggtgatttatctggaagccgcatgg

SEQ ID NO: 70171 - DNA, 5814 bp, Oryza sativa
  Clone ID: PAT_MRT4530_7076C.1
atggccgagcaagcaaaggcgcacgacctctctccgagtgtgagcggcgacgacggggagccaaacccgcgccgtcgagctcgtactcccccacctcctccacgccaaagtcccaagcggggggaagcgctcgagagagtcgaaaaatccgcagcatcgccagtcgcgggtggtgcaggagaacggcgagatggggagcgtcgcctcctcgtctacggcgacggcagcacgcctcaaggcgcgcttcaggctgttggcgcgctcctacgtcacccgcctgtcgtccctgacccggagtctccagcccagcgatggctggacgacgtggccaacttggtcatgacggcacagcaacgcctgggtgctggcggacggtccgccaccaccaagacctccggcgccgccactaccggttccgcgtcgtcaagacggagggcgcggcgagcggcggctgctgcacgccattcggctaccactccctcgtcggcgcctccgactcgggaggatcagcatgaagagccggatgcccgcctcgacattgagcgccgacgtagtgatcggcgtgctccccgcgcaacggagggtgcctcttcgtccagggtgtcacctcgacatggacgtgaggatcagccctccgtgcccccggttggtggtgttggctgtagagcctttgtggcgagtcttcggaatgtccgttggcccccaaggttccggcccaccatcaccgagaagtatgatgggagcgtcaaccccaccgagtttctccaggtctatacgaccgggatcgaggccgctgggggagacgacagggtcatggcgaatttctttcccatggccctgaagggacaggcgcggggttggctaatgaacttgccacccgcgtcggtccactcctgggaggatctgtgccagcagttcaccatgaactttcaaggcacctatccacgcccagcgtttctgccaagtccgcaatactataccttgcatccctgcacacgcggtgatctacgcgttcaggggggtgtgcggcacaaccgcatgctcgaaaaaattgcctccaaagagccccagactaccgcagagctttttcagctcgcggaccgagtggctcgtaaggaggaggcctggacctggaacccctccggttccggtgtggcagcttcggccgcccccggatccgccgctcagacagggcggcgtgacaggaggaggaagaaaaggtcggtccattccggcgacgagggtcacgtcctcgccgtcgagggcgctccgcgggccacccgaaaggggaggcctgcgagcgacaaaaagaaagaggctggtactcccagcagggagcgcccagccagcaagtggtgctccgtccacaacacctccctccacgatctcgcggactgtcgcgcagtcaaaaacttggctgagcgaacgaggaagtgggaggaggacaggaggcaggaacgccgtgagggcaagtccgcggcagttccctccggtaaacggcgaagtgaggccagacagaaggcccccgccgttgacgtcgatgatggtgatgatgacctaggtttccaagaacctggggccaccattgccactgtcgacgggggagcgtgtgctcacgtttctcgccggagcttcaaggctatgaagcgagagcttctggccgcggcccctactcatgaggcgacgcgtcgggcgcggtggtcggaggtggccctcacctttgaccagaccgaccacccaccgtgcgttgcccggggagggcagattgcgatggtggtttcccccaccatctgcaatgtgaagttggggcgtgtcctcatagatggaggagcggctctcaacatcctttcccccgcggcctttgatgctatcaaggccccggggatggtgctccagccgtctcaaccgatcattggtgtgacgccggggcacacatggccgttaggtcacatcgacctaccggtcacctttggtggatcagccaacttccgcacggagcgggtgaacttcgatgtggcggacctcagtctgccctacaacgcggtcctggggaggcccgcgttggtgaagtttatggcggcggtccactacgcctacctccagatgaagatgccgggccctggtggccccatctctgtccgtggcgaccttaaagtcgcgctcgcttgcatggagcagcgcgcggaccacctcgctgctgcgaccaagcccgagggtggtgacgagaggcttggcacctccgcccccaccgccccgaggcagcggattgccacatgcgacgaggtcccggaagacgcgctcgtctccttcctgcgggcaaacgctgacgtcttcgcatggagaccagcggacatgcccggggtccccagggaggtgattgagcaccgtctcgccgtgcggccgggcgcaaggccggtccggcagaaagtgcggcggcaggccccggaacgtcaagccttcatccgcgaggaggtggcgagacttctggaggccggattcatccgtgaagtcatccatccggagtggctggcgaacccggtggtcgttcccaaggcgaacggcaagcttcggatgtgcatcgactacaccgaccttaacaaggcatgtcctaaggatccttaccccctgcctcgcatagatcagatcgtcgactccactgcggggtgcgaccttttgtgttttctagatgcatactctggttaccatcagattcgcatggctagggaggatgaggagaaaactgcgttcattacccccgtaggaacctattgttatacatcaatgcccttcgggttaaagaatgcaggtcctacttttcaacgtactactcgaatttctttgggtagccaaataggacgtaatgttgaggctcatgtcgatgacttggttgtaaaaacgcgcaaccaagaaactttactttcagatctagcggaaacttttgagaacctccgctccgcccgcataaagctgaaccccgataagtgtgtgtttggtgtacctgcgggcaagcttctcgggttcttggtctctgcccgaggcattgaggccaaccccgagaagattcgagctatcgagcggatgcgcccccccagcaaacttagggatgtgcaatgcgtcaccggttgcatggccgccctaagtcgtttcatatcaaggctgggagagaaggcgctacccttgtttaagctcctcaagcgctcggggccgtttacttggacggaggaagctgaacatgccctcactcagttaaaggcatatcttagctctcccccggttctagtcgccccggagccaaatgagcccctgctactttacttagcggcgaccccccaagtagttagtgcagcgttggttgtggagcgcggtgaagacaatcctcatttcgtgcacccccattctatgctaacttggcccgggagcgagcggggaggagaagcccccgagtcggacggtggcctacggcccctgacgaccggagtcggccctctgcccgcttgtcagacggtgctaggtgcccccgaccctcaggagggccccaaggccactgcgggaaggccgcacttaacgccctctgaccccgaggctaaccctgtgctgactcgacccgggaaagagcagggagaagaggcccccgagtcgaacggaggccagaggcccctgacgaccggagttggccctttgcccgcttgtccgacgatgccaggagcccccgacccccaggacggccccgaggccactgagggaaggccgcccctttcatcttccgaccccgaggtcatcggcacagaagacaagtgtgccccgaaaggccacttgaacgaagaacgccccggggatacgtcccctagcagagaggatcggccccaccgaaaggtgcagtggcctgtctactttgttagtgaggccctccgggacgctaagacccgataccctcaggcccagaagatgctttacgctattctgatggcctcgaggaaactgcgccattattttcaggcacatagggtcactgcggttacgtcttaccccctcggtcaaatcttgcataatcgagagggtacaggacgggtgggtgccggtgcgggggtcacgttgacctccccgacaggagacgtccttagatatctggtccgccttgactttcgagcgaccaataatatagcagagtatgagggactccttgccggactcagggtggcagccggactggggatccgccgtctcctggtgttaggcgattcccagctggtcgttaaccaggtctgtaaggagtaccggtgctctgacccgcaaatggacgcctatgtacgccaagtgcggcgtatggagcgccattttgacggaatagagcttcggcatgtgcccagacgggataacatgatagccgacgaactctcacggctcgcgtcctcgcgagcccagaccccaccgggcgcctttgaagaaaggcttacccagccgtcggcgcgacccgaccccttaggggagacggatgcgcctgaccgacccccgaggcccgtcggagtccaggcctcgggacccgaagggagcgctccaaactcccttagattgatcgcttggatctctgagatccaaacatacctcacagataagactctacctgaggaccgcgaagggagtgaacgcgtacaacgcatttccaaacgctatgtgctggtagaagggaccctctatcggcgcgcggctaacggaatcctcctgaagtgcattcctcaggaacaaggcgttgagcttcttgctgacatccatgagggcgagtgcggagcccattccgcctcgcgcaccctggttggcaaggcctttcgtcaaggattttattggccgacagctctcaatgatgcagtcgatctggtccggcgatgcagagcgtgtcagttccacgccaagcaaatccatcagccggcccaggccctgcagatcataccactgtcatggccatttgctgtctgggggcttgatatcctgggaccgttcaaacgggccccgggcgggtttgagtatctgtatgttgcgatcgacaagttcactaagtggcccgaggcttatccggttgtcaagatcgataagcactctgctcttaaattcattaagggcatcacggcccgttttggagtgcctaaccgtattattacggataatggcacccaattcactagtgaactcttcggcgactactgcgaagacatgggcatcaagctctgcttcgcctcacctgcccaccccagaagcaatggccaagtggagcgcgccaatgcagaaatcctcaaaggccttaaaaccaagaccttcaatattctcaagaagcacggcgattcatggatcgaggagttgccagcggtgctctgggcaaaccgaaccacaccaagccgagcgaccggggaaacgcctttcttcctcgtctactgcgcagaagcggttctcccatccgagctcaccctgaggtctcctcgggccaccatgtactgcgaggctgatcaagatcagcttcgtagagatgacctcgactacttggaagagcgaaggcggcgcgcggccctccgagccgcgcgctaccagcagagcctgcggcgctaccatcagcgccacgtccgggcccgatcactctgcgtcgacgacctcgtcctacgccgcgtccaaacgcgtgctggactgagcaagctctcaccaatgtgggagggtccgtatcgagtgatcggcgtcccccggccgggctccgtacggctggccacgggcgacggcactgagctgccgaacccgtggaacatcgaacaccttcgtcgcttctacccctga

SEQ ID NO: 70172 - DNA, 490 bp, Oryza sativa
  Clone ID: PAT_MRT4530_70770C.1
agaatcttggggtaggtgagatctggctgaaggtattatctgggacggtgaaaacttttgctttttttccagggctactacgcgcagagaactatctatatatataaaccatagtctgagcacttctgttgaaagacatctttttggtcttgtataatgacatgggctcacctttgatcacagaggtgatgcttattctctatgggatgaaagcttttacatacaacggtacttataaccactgatatatataacttatgaggggggtacttgacgctgtatttcgttcgtgcgatcatatatataccggctgagaggcgctctcgggtactaccatgaccttaatgatgactacagaacattacgataatgtttcacacatcccaggtatcttcctagcacatattctatatgacaatctagcataacacattagccatagcttcatgaccctgcttctactgaaagcacaaccatgtcactaccctgg

SEQ ID NO: 70173 - DNA, 466 bp, Oryza sativa
  Clone ID: PAT_MRT4530_70771C.1
gcacgaggcaccaagccacactcttccatggccgccgccgccgcgtcgcccacgtcgtcgtcttctctcccgcccaagcctcccaactccgccgccatgcttgtcgagcagcagccgctgtcctaccacgacgtggacgccgcctccacgcccagctccagcgtcagtagcagcagcacggcgagcgtcggtggccgctcctccacgttctcgctcgactcggccgccaccgccacgcccacctcctccccgcctcgcccgcaccgcgcggccgacgtcgcctgggcgcccatccgcgccgccgccgcgccgctcggcccgcgggacttcaccctcgtccgccgcgtcggcgccggggacatcgggaccgtctacctctgccgcctcgacggaaaacgcggcgccggctcgccgtcgccgtgcgagtacgccatgaaggtggtggaccgccgcgcgctcgccaaga

SEQ ID NO: 70174 - DNA, 405 bp, Oryza sativa
  Clone ID: PAT_MRT4530_70772C.1
atcatgttatcgcggggcgcaaatgcttaaagggtcaattatcctttaaattttataattcctgtgccctaattgatgtaagggacaatactaccactccttggaaaacaagttaaaacctcacacacaatttctgtgtcctcacagaatgtgacattgacaacactacacggtattcacaaactgcacatgtctccgcatcctaggctcaagctttttcagtagactttctataggttttccaatgtaacctctctatgtaagattctgctttttctttcatatgccaccgttgtccctcaatttaaatattttctctctccgactgaaaagaaccgagccttgttccactgaattttatgtctttatttatgtacctaaccttcctttgtttctcccttatat

SEQ ID NO: 70175 - DNA, 4668 bp, Oryza sativa
  Clone ID: PAT_MRT4530_70773C.1
gtggtagaaatgaggaaattaggcaatacaaagagcaaaagtcagagttgctcttccaatcatgagcacagtcgtggcattttgaggcgtagtttcagcaaatcaatgacatagctgcgatatggaagcttagactgcgtgaatcttgttctgacactggccatatcaaatgagaaatggcttaaggggagattcgttcatcccgttaaccttaccgaagcatatccgccagtaagctactaatggcccctggacgctatcagtggatctcagcagcgagcccgggagcggaacaagtagaaggtctggcacgtattatacaggcagcacgtctgctctctcgctacaggcctaccctccgctgatggtgtaggattaaatattgtgatggcggcaaaggaacattgtatatgtgagtacaaccacccagatgtatttatgatttgtgcaaaaaaaaaaaaaaaaaggagccttaggagagaaaaatcagcagaaacagaaataaggaagctggaatgtgaaataaagagtttgaaccgtttggtcaacctgatggaatctgatacacgacacttgagaacgacggttaaacttcgtgatgaaaaaataagaagattggaattattagctgataaccagatatcatctgatggctatctgatggatgaaaatgctgcaatgttccaagagattcagctactgcaagaacaaatcaatgataattctcaattaactcagtttgctttggaaaacaagagattaattgagcaagttagaatgcttgagaagttcagcaagcaaggggagcgagaaatgttattaacagagatatcccttttgcgtaatcatttccttcatattcttgagcagaagtatgcaagaccccctaaaaatatggaagctcagggtgatgtgactatcaaggagctggagacctgcaggaaagaattggatgcatgcttagaaaataatgttctgctagcacgtgaagtaaataaactgcgctgtgaactgaagcagtaccagaagtgtggtacaggtcaagttgctcctgaggtcgtggagagctctgtgataccagggatcaatcagaagcaacatgatcaagcaggatggtgtggttcatatttggcttcaattgatgttgaaaggcaattcgtggatgttgggatcacaactgatattactgaatcacttgaactcactccaccttcagaaatttatagtgaaaaccaggactctccttctcgtttgcatttctctgatccggagatatgtgatttgaagaactctacaaaagtgctagagtacaattcttcacgcaatctacttgacaaaggcattattttgagtggacaattggagaatgaatgtggattaaattctgtacaaaatgatgaaataagtctagtaaaagaaaatgctgagaagatgtatggtcatgacgagatctcagtgtatcgtcaaaatgaaatactgcattcaagtgaacaattattacaggacgaattgacacatattaaaagcttaaatgaaggtctcaaagagaagctaattattatggctgaagaaagtaccaagctttcagagattattgttgctaaagatgtagaaattgcaactttgtcagaagaatgggagtctgcaattgttgatctgacaagcttcttgacagatggttgcagttctttagatgatgcatatcagaatattgataatatgattagctcttttccttacaacaatcattccgtcagtgaacatgtggagaaggctatgaaagttagtatcgagaaggaaaaaataatttctaggcttcaaattgagctacaagctgcacagagaatgggcagggaggtgaaagaaaagttgcacattctaagaggtgctactcttgctataactgaagctcagctgttggataatgatgaatcccaggaagcactaaaactattagatttaatgcgtcaaaaagattgcacagtacaagaactgaatgacaatgtgaaacagaagagttgcttatttgcagaagcaacagaagggtattctcgtcatgagtgtcacttaccagataatgtgggtactgtagctgaaataagtcacaaccgagatggatctgaagtgaatcaagctaacacacactaccaggcaaagcttgaagatgtgttgcatcttgttgaagacaagtcaaataaggttctggccttattttcaaattttgaggaagctcaagaaaccatggaagaagctgaaactatgctctcatctctgttgaaggccaatgaggagctaaaacttgaaaaagacagttgcaggcaagcagtggaattgttgtttgctgagagaacttctttgatcaatgatttgcaggagcttgaagcgtcaaattcatttacagcacagaggtatgacaaattgcatgaacaggtaaatggatgtgtagcagagatgacaaaccttgctactataattaaagaatcttttcatcaagtacaaagagttactacagtagaactatttgcattctgctcggaggttatcagttttggccaggacttgaggaaatggatatatgaatcaaggtcttatcttgttaacatgggagcacttctagaagaacaaggcaattcttatgctgagcagaaccggcgcactaattcaagtacttatgcgggagtatctcaacaagttgagtcatgttcacgtcagttgggtggtatgaatggtgatatttttccaggaacatatatggtcgtagatggaaaggaaaaggcatctgtgcatgtagttccctttggcagtaatgcagaactggaagataccaatgtcgaaaggacatttgatatggattatgcatccctaagaagagagtttgacaggaaaagtgatgttgcagaaggattatcttttgatcttaaactactgcaagagtctacatcacaagcgaaggacatgaaagacaaagctgatgaaatatcagatgcccttgtcagtgttcaaagagaacttgaaaagaaaacttctgcaatggaaagcatactgaaacaacaaaaggtgctagaggaagagctggctgaaaatggagctgcactcctaatcttaaggtctgagttagaacattctgaaagtttgtcatcagagttgttcaaggaaaacaacaatctcaaagtgatgttggaagaggaagctatgatgattagtgaaacaaaagcaatgctggaagacaaatctaaggtcatcgagggattggagcacgaaatactattgcttaattcttctgaagagggacgcttgatgtcacaaatcaaagagttaaatgataatcttaaaattataagtattgacaaaggaaatctcgaagaagaaatactcaagttaactgacaagcttgaaatggctgtggctttagctgaggagaatgaagctgcttctattgaagctcgtcaagctgcagagataagtaaggtatatgctgaggagaaagaggaagaggttaggattcttgaacgttctgtggaagaacttgaatctactataacagttctggaggaagaagtatgcaaccttaaagaggaagtgaggagctatcaaatatataaaaaatctgaagctgaacaagctcaagagatgttcattgtagatagcacatcaaaatgtgatgctacagagcaattgtgtccagggagatgccaattagaaaagaggttgaaagcggagattattgcacatcaggatgctagaagaaagattgaatgtctcacaatggaagctagttgtaaagatgaggaggtaaggcaatacaaagagcacatagctgagttggtcctgcattcagaagcacagtctttgctgtttcaggagaagtatcaggaaatggagcacatgatttctaaacagaagtttggtctacatgaatctaattctgatactggccataccaaattcgaaaagccttcaggacggactagaggatctggttcacctttccgatgcatatctagcattgttcaacagatgaactctgaaaaggatcaagaaatctcagtggcacgccagagaattgaagaactagaaggattgatctgcatgctaacatcaagactggccgccgttgatagcatgacacatgatattataagggagttacttggtgtcaaattagacatgacaaactatgctaacatgcttgatcaggaagagttgcagaaattgctaatggcttcccagcaacaaattgaacagtcaaaggcaaaggatgtggaacttgacatgctaaaagaacaatttgatcatctcattcaagaaagagacagcttgtttgatgatatggaccaaagaaaggcggacttgttggagagccaactgctcatagaacagcttgagcaacgggagcaaatgcttgaagcccagaacggaattttacagatggagaaagataaccttcaacagaggatcatggaaatggacgaggaaatccaattgctagttggctcaaatcaagcgattgctgagacaacgttccaaatgcaccacctctctgacgctacaggcctacttttttctgaagatgtagggttaaaaatggtgatgactgcaagaaacattgtatatgagatttccgtcgtatgtacagtactaccgtacatggtagcaacggcttattga

SEQ ID NO: 70176 - DNA, 371 bp, Oryza sativa
  Clone ID: PAT_MRT4530_70774C.1
aagggcaaatgaatttggatcacaactcaacaaactccaccttgggacaaattcctttttggagcatgaaacaatccttcaccctgaacccaaaaagacaaaaacactttcggggccaaatagccttttggactaaaccactataccaactaagcttgggcaaagctcaaacttagcaataggaacaggctttggcatcatttcagcgggattatcatggggacttatcttggataccttcagcttaccttgggggactacattgggaacataaggggacttgaaatcaatgggctttggcctctcatgaaacatctgatctttaggggggcatatagcactttgactggcacaaaacaaggtaatgcaag

SEQ ID NO: 70177 - DNA, 2886 bp, Oryza sativa
  Clone ID: PAT_MRT4530_70775C.1
atggtggagatgcagtggctgctacttctgttcatgctcttggtgagcctacggctaagcttcagtcagacaaatcctcaagatgtttctgcactccaggcattgatgaagaattggcagaatgaaccgcaaagctggatgggatcgactgatccctgcacctcctgggatggaatttcctgttccaatgggagggtgacagaaatgagattatcaggcattaatctgcaaggcacattaagcaatgcaatagaccaactttcttctttgacatatctggatctgtctaacaacctaaatcttggaggtccacttcctccaagcattgtgaatctgaagcagctcacaactctgattttacttggatgcagtttcactggtgatattccagagcagatcggagcattaaggcaactcacattcctggccctgaactcaaataagttcactggtggaatccccccaacacttggccttctctctaagcttttttggttggacttgtcagacaatcagctgtcggggaaaataccggtttcatcaggttcaaacccagggctggatcagcttgttaatgcagaacatttccatttcagtgagaaccagttgacaggcccaattgacgaaaagcttttcagtgaaaaaatgaaccttatacacgtgatatttgacaacaataactttactggaccaatcccaggatctctcgggagagtctcatcaattcaaattatccgactagatcataaccaattcagtggtccagttccaggaagtatagcaaacctatctcgtctgatggaactgagcttagcaagcaaccaactgaatgggacagtgccagacctcaccagtgcaaatgctctcacttatgtggacctaagcaacaataacttcatgagctcaccagcaccgcgatggttttcaacattaacatccttgactaccttatttatggatagtgatcatcttactggaacaatccccagtgccctgttcagtttcccgcaattgcagcaaatatcattagctaagaattcattcagtggggaacttaatatgagcagtaacatcagttcactactgcgggttgttaatttgacaaacaatcagatcttcaatgctgaagttgacccaagctacaccggcagcctcatactatcaggcaatcttatatgcttcaacaatatcagtttctgcacactcaagcaaaagcagcaagtgccatactcaacaaacctaggtccatgtggtgccatttcatgccccactgaccagtcagcaaatccggtggcttcacagaactgtgcttgcgccagccccttccagggtttgatgatcttccgagcaccagccttctctgatgtgaccaatcccaagtcattccaacctttggaatttactcttgttcagaaccttagcctagctccaggatcagttgccatttccaatgttgagttcagtccaggggagccactaacattcacagtgaaggtttttccagagagcggaacaagcttcaatcactcagaggttatcagaatcagttcttctttggtcaaccaaacctacaaagctccagcatattttggaccatatagcttcatagcaagcacatattttgcaagccccagtggtaaaaggtcgtcaatgggcaaaggtgcaataatcggaatagcggttgctggttttctccttcttgttggccttatcctagtagcaatgtatgctctaaggcagaaaaaaatagctaaggaggcagtagaacgaactactaatccttttgcatcatggggacaaggtggtaaagataatggagatgtgccacagctgaagggagcaagatactttgcatttgaggaactgaagaggtgcacaaacaatttctcagaaacccaagaaataggatcaggaggatatgggaaggtgtacaaaggaatgctcgcaaatgggcaaatggctgcaataaaacgcgcacagcaaggatctatgcaaggtgcagctgaatttaagaatgagatagaactactttccagggttcatcacaagaacctggtgagcttagtaggtttctgctatgaacaaggggagcagatgttggtttatgagtacattcctaatgggaccttaagggagaatctgaagggtaaaggaggaatgcacttggattggaagaaacgccttcaaattgcagttggctctgctaaaggtctagcgtatcttcatgaacttgctgatccaccaattatccatagagatatcaaatcaaccaatatccttctggatgaaagtctaaatgcaaaggttgctgattttggtctttcaaagctggtatctgacacaaaaaagggccatgtttctacccaagtgaagggcacactgggttatttggatcctgaatactacatgactcagcagctatctgagaagagtgatgtatatagctttggagttgtcatgctagaactgataacgtccaggcagcccatagagaaaggcacatatattgtccgtgagatcaggacagcaatagatcagtatgaccaagagtattacggattgaagagcctaattgatccaacaatccgggattcagcaaaaatggttggctttaggagatttgtgcagttggctatggaatgtgtagaggagtctgctgctgaccgcccgacaatgaatgatgtggtgaaggaacttgagattataatacaaaatgaaggggcacagttgctaaactcagcatctttatcggctcagcagtttggatatgcaaagggtagagatccagatccttatggagatcatgtgcctatcaatgatgacagcagcagcagtgcttttgattacaacagtgtatattcatactcagttgttgaaccaaagtag

SEQ ID NO: 70178 - DNA, 402 bp, Oryza sativa
  Clone ID: PAT_MRT4530_70776C.1
ctagccgtcgctgtgccgctccctgctacagccgtgctgctgctgctcgtgcgtgccaagttgctgctgtcccgctaccgtagccaccatctgtcgtcgctgtgccatcgccttaaccctagccgcgtgtctctgccgtagctgtgtgtcgccgccgccgccggggtcgccgaccgtggagctgaccagctggcacacgacgtcgccggagttcaagttggtgtcgagagccttgcgcacgagcaccatcttcccggcgagcaccgatccctgcagctgccgcctcctcgccgccgccgtcatgctgctcgcctgcggctgcaccacgtcgcggaggccgtacttgcggctcagcgagctctcgtgcccctctgcgtcgtactgctcgtagtgcagccccat

SEQ ID NO: 70179 - DNA, 1909 bp, Oryza sativa
  Clone ID: PAT_MRT4530_70777C.1
ccccgcgcggcagctcttccccaccagcccggctttttagccgcctcctgcacgacatcagcaggggctttgtcccgggtcgctgctgcttttctgtgagattgttcgctggggatggacggcggtggccagggcgtcgcgcggcggcacggcgcggtggcggaggaggatcccgaccgccgccgcggcgaccgctcggggaaagaaggtgacgacgacggcgtcgacgtcgacgagaaggcgcctccgcctcgccggaccagcaggcgggtcgcgtcgctcgacgtcttccgtggcctcaccgtcgctctgatgatactggtggacggcgccggcggcgagtggccggtgataggccacgcgccgtggaacggatgcaacctcgccgacttcgtcatgcccttcttcctcttcatcgttggcatggctattcccctctccctcaagaggattccagaccgcggtcgagctgtgaggagagtagtgctcaggacactgaagctgcttttttggggaattctgttgcaaggcggttactcccatgcccctgatgatttgtcttatggagttgacatgaagcacgtgagatggtgtggtattctccaaaggattgctcttgcatacttggtggttgcagttctagagatcgtaacgaagaatgcaaaggttcaggaccagtcaagttcgggcttctcgattttcaggatgtacttctcccagtggattgttgcatgttgcatccttgtgatctacctgtcccttgtatatgggatttatgttcctgactgggatttcagagtgtcagatgttaaaaatccaaacttcggcaaaatcttgacggtgacatgtggtacacggggaaaattaagtcctccttgcaatgctgtaggttatattgaccgtaaagttcttggtatcaatcatatgtaccacaggccagcatggaggaggcacaaggactgtactgatgattccccacatgagggaccttttaaaactgattccccggcgtggtgttatgcaccatttgaacctgaagggttactaagctcactgtccgcggtgttgagtacgatcatcggggtgcattatgggcatgtgcttgttcatatgaagagccacacggacagactaaagcagtggtctatcatgggcataactctcctcattcttgggcttactctgcacttttcacatgcaattcctttgaacaagcaactgtacaccttcagttatatctgtgttactgccggtgcggctggaatcgtgttctgcatgttctacttcctggttgacatcctgaatctgcactacccattcgcacccctgaaatggaccggcatgaacgcgatgctggtgtacgtgatggcggcggcaggcatcttcgaagggttcttgaacgggtggtactacgagggcaccaacaacacactggtttactgggtgaggaagcatgtgttcgtgaaggtgtggcattccacccgtgtgggcatcctcctctacgtcctcttcgcgcagatcttgttctgggcccttgtcgccggcctcctccaccgtgctcgcctctactggaagctctagcactgcactggtacactacactacactacagcgtttacacaggggctgttcggattgatgtcattttcaaccgaactattttttttaaaattaccaaaaagaagtgttgcatttagtttgttgccaaactttgataaatacataagaaatcctaccaaaattttgataacattgttaacttgtcaaaatttggtaaggtttattttcgctacaatctgaatagcctagtcttcagatttctcgttgatggaattgtgcatttagccgtgattaaaatttgaaaccacaagtgcaattgggatcttgtgcagtctcaatcctgactcct

SEQ ID NO: 70180 - DNA, 615 bp, Oryza sativa
  Clone ID: PAT_MRT4530_70778C.1
atgacggttgtgacggttggaaagaatcgtgaagcaaaggcagcaagcacacatgtatcgacggatcaggaagaagtggctctgttggagtttgctgccaaacttgctaagaaacaatcgtttaaggacaacaaaagcgatttctttaaacgtcttgcaaagatgacgaatgatcattttataccgctagatctcaacaatcaatatgttcctttgactaattccaagattgttgatgagaagttttgtcttgcatcccagtttacatgctcgggtgcccgtctcattggccatgacggcttattcacttcattattcacggctagtgaagccaccggtacaggtgcaccgagtgtatcgaagaagaggaagtacacgacacccaaagacctaggttcttcacttaagtgtttggcagaacatggttgcaaggacattgagcattatatatttacagttgcattggaggacccagctgctctgaaagggtttcttgctatgaaaagctatgaagacaagagaaaacacctcattggtttgtggaaaaaaggaatagtgaaggtacctgcagtggagggcataaatccagaattgctacccccagatttccagtga

SEQ ID NO: 70181 - DNA, 2117 bp, Oryza sativa
  Clone ID: PAT_MRT4530_70779C.1
atggatggcggcggcggaggcgacgccttcgggtccgcgaccgcgccgctggcctggcacgacttcctggagcgcatgcgccagccctccgccgccgacttcgtcaagtccatcaaggggttagctccgccacaaattttcggtgctaggcatatgctcgatctcagttcgtggtctagggatccgagacgacttcgtcaagtccatcaagggctttatcgtaacgttcgcgaacagagctcctgaccctgaacatgatagtgcggctgttcaagaattcctggaaaatatggaaggtgctttcagggctcacaccccctgggctggaagttctgaggaagaactagaaagtgccggtgagggcttatctttatcgtaacgttctcgaacagagctcctgaccctgaacatgatagtgcggctgttcaagaattcctggaaaatatggaaggtgctttcagggctcacaccccctgggctggaagttctgaagaagaactagaaagtgccggtgagggccttgagaaatacgttatgacaaagctgttcaatcgggtatttgcttctgtcccggaagatgtgaagagtgatgaagaactttttgagaagatgtctttgttacagcagtttatacggcctgaaaacttggatatcaaaccagaatatcaaagtgaaacatcatggctgcttgcacagaaggagctgcagaagataaacatgtataaggctccaagggataagcttgcttgcatcctgaactgctgtaaagtcatcaacaacctacttctaaatgcgtctattgtatcaaatgaaaatcccccgggagctgatgaattccttccagtcctcatctatgttaccataaagaaaaaatataagcctattattggtgcagtgcgatacagacgtcaatcacggttggtgtcagaagctcagtatttctttacaaacatcttatccgctgagtctttcatctggaacattgatggggaatcattatcaatggatgaacgagatttccaaaagaagatggacttggcaagggaacgcatgttgggattatcagctagctcagagaatcaggacaaccaaaacaatcttgatgtacgggagcaaaaatcacaaacactgaaagctagcagggattctgatgtcaatctctctttgaaagataatttccaaggtcctggactggaaatgagaagggacagtgatgcaagtagtaacccagttgagcgtgtgcaatcgatttctgatttggagaagaaaggggcagccgagcttctcaaggatgatgacttgaacaaaaaaattcaagagtacccattcctttttgcccgctctggtgatctgactgttgctgatgtagaaaaccttttaaactcctacaagcagctagtactaaagtatgtagcgctttcgcaagggatgggtatcaaccttgaaaaccctcctgttcagagcatgcaaactgtttctgatcttgtggaatctgaggagcctaaaaatgtgaagaatgcagtaaatttcagcgaaggaagcagcaaaaccagtgatgacataaaaaatgatactctttattcagaagtagacaacacgggtacccaacaaactgcggttgacccaagttatcagaaggcacagcaggatgaagcatcagatcaacctgaacatgcatgagttgttggtcaagtatggttggccgtcgaaatacacgggaaaacgttgtcaacggcgggtcattctcttatatcaaggggtgacaactggttacagagaagtgggtgcattgctgtgctcctgaagccaacaaaatgtaaatgctggaaactagaatatagagattcaagtcccctggaaactagaatatagagattctcttatatcagcgtcgaggaagatcaagattcattctgctgaagcaaagctccttgtcccgacgttcgttcattgatcctttggttatggactcttcaagtttgattttcggttaataccattttggtaaaccattttacttttgtagttcaaattaaaatatccatatgtgaaattagatccaagagaaaatggcatgaaacataatttgatcgtctaaaaaaaaaaaaaaaaaaaaa

SEQ ID NO: 70182 - DNA, 768 bp, Oryza sativa
  Clone ID: PAT_MRT4530_7077C.1
ttgcgctgcaggcggttgccggaggatgacctcttcatcaccggcgtggctggctcaccgccggtggtggagggtggcgcggcttgcgcggccacggtggtagtgccattgtcgtcggccgtggcgtcttcttccttctcaggctttcctggctcggttggctcgagctgggagcggccactcctggacctgagacactcgtcctcttcgtcttctgatgggctcaacttgatattggcaagatctacgtttctcttcttcagatacatcatgaattcgcggaagtttgcctccgtaggacggtagtgcccgctatgtggccagacagcctttaggattccattatctacaactagtctcccggcagcagatgtggctccaccagcaaggaagctggagtgctggaatgtgcccttgctcttcgtgccaatgtatagaactcttgttgtgctcaacacgaagatccatttcgaattcttggggccctcagaagtgtcgacaatcttgcggctcatcttgtacagcagtttcttgttctaaattactacctcatagaactccctctctttagggccaagatacctgatgcattgctgcaacagcttccatctagggcagtggtcctccatacttacgtcttttccttcacccacatccaaccagtagaagaaaggttgtttgctttcgcagtgaagccaatgttggtagtagtaatggaggttgtgaccataccgatgccgagggtcaatagcttcgagccagtgctgc

SEQ ID NO: 70183 - DNA, 1014 bp, Oryza sativa
  Clone ID: PAT_MRT4530_70780C.1
atggccggcggggtgtcgtccgtggaggtcgtgaaggacggcgccactgggctggagaagctcgtcctgcgcgaggcccatggctgctccgtccaggtcgaccccctctcctcaaccctagctttcagttgcaatgtggataaattgtttattgggggtggacaccatgatgctattgttagctgtggttttgattggccttttgccattattttaagtattctcggcaacgttatattagataaccttacaggttccttattatctttttttttcctcagaaatggtcaatttgggaaccatggagttcttgaacaacatggatttgcaaggaaccgattatggagtgttgatgaaactccccctccttttccagctaccacttcaaactgtcatattgacttgatactcaagcagtccccagaagatttgaagatctggccgcatagttttgagtttaggctgcgagttgctcttagccctacaggagatctgatgctcacatctcgaataaaaaataccaatgcagatgggaagccattcaaatttggattttcatataacacatatttttcagtctctgacatcagtgaagtacgggttgagggtttggagaccttggactacattgacaacctgcaatgtggaaaacgttgtactgaacaaggagatgccgttgtattcgaatctgaagcggagaaggtatatttgagtgctccacccaagattgtgatcattgaccatgacaagaagagaacttttgagttaaggaaagagggacttcctgatgttgttgtttggaacccatgggacaggaaagcaaaaacgatactggattttggggaggaagagtacaaatgcatgctatgtgtaggggctgcaaatgctgagaagccaattacattaaggcctggtgaagagtggcaaggaaggcaagagatatctgttgttccatccagttacagcagcggacaatgggatcctgaaataattcatcggatacaggacatctga

SEQ ID NO: 70184 - DNA, 152 bp, Oryza sativa
  Clone ID: PAT_MRT4530_70781C.1
gaggagcggcacggagaggagatcgcttggcgcgagctctctagctccagtccacctcaccggtcagtggctctcctctttggcgtgcactgcttgccggtcaccggcgccaaccgccatcatcaccaagatgcatcatcgatcaacgggct

SEQ ID NO: 70185 - DNA, 207 bp, Oryza sativa
  Clone ID: PAT_MRT4530_70782C.1
atggtgatcggcttcgtcaatctccaggatggatttgccgttccagtcttcaaagatgctcatagagctccctctaggttcgggaggggcggatttgccgccctcagctccgagggggtgataatgacggcagagcttgaggacggcagatctggtggtgtcgcccttggcaccgggaggggtgaggacgacaatagcgggtggtga

SEQ ID NO: 70186 - DNA, 302 bp, Oryza sativa
  Clone ID: PAT_MRT4530_70783C.1
ggcaacaaccctcccggttttatttacgtttttgggccaaaacgggcgctcaaaccttatacccgattttttgggccccacctgcagggggatcgaccgatcgatccatcgtttggttttcccccccaaaaaaggaaaccaaaattttttccccggggggaaacaaaaaaagaaatcctggaaaaaggggccccactatgcggggggtaattcgatcacggacgggctttggggatgctggcgaggccggctccctgtttggcgggggggtttttggggaagacaacgccctactttacccg

SEQ ID NO: 70187 - DNA, 210 bp, Oryza sativa
  Clone ID: PAT_MRT4530_70784C.1
atgcgccgaagtattattgaactgtcgttctgtgattacaaggtgtcaggtcatatttatacccgaagtcagggccggcccttgccctatgcagccaaggcgaccgccggggcttcagctgagaagtttttcaaaattgaagttgttgaagaactatttgagatcaactatgtcacaagaaaggtcaaatggcttggctatgtgctcaat

SEQ ID NO: 70188 - DNA, 237 bp, Oryza sativa
  Clone ID: PAT_MRT4530_70785C.1
tcacatgcacataacgaaatcgctttctcttctactctattacaacactacaaaaaaaaaaatgggcggcctttttagagggttcggggctgcggacgcataactgcctaataataccttttcttaagagtcacctacttgcacttaacgggccgttactgtacaaccttgtgccagggaaaaccttggcaatacccatcttactcgatttgtagcaaattccactatcgccagttg

SEQ ID NO: 70189 - DNA, 6084 bp, Oryza sativa
  Clone ID: PAT_MRT4530_70786C.1
atggccgagcacgcaaaggcgcacgacctctctccgagtgcgagtggcgacgacggggagccaaaccctcgccgtcgagcttgttctccaccgccccccccacgccgaagtcctaagcggggggaggtgcctgagagggtcgaaagatccgcgacttcaccgatcgcgggcggtggagaagaacggcgagatggggaacgtcgcctcctcgtctatggcgacggcaacacgccccagggcgtgctccaagctgcgggcgcgctcttacgtcacccgcctgtcgtccctgacccggagtctccagctcaacgatggctggacgacgtggccaaactggtcatgacggcacagcagcgcctggatgttggtgggcgttcctccgcctccaaggccactggtgcagctaccaccggctccgcgtcgtcaagacgaagggcgcgacgagcggcagctgccgttcgccactcggccgccactcctttgtcgactcctactccccaggaagatctgcgtgggaggccggacgcccgcaccagtatcgagcgccggcgtaatgaccgaagtgctgcccaagcaacggagggcgcttcctcgtccagagtgtcacctcgacacggacgtgggaatcagccctccgtgcccccggttggtggtgtcggctgtagagcctttgtggcgagtctacggaatgtccgttggcccccaaggttccagcccaccatcgccgaaaaatatgacggcagcgtcaaccccaccgagtttctccaggtctacacgaccgggattgaggccgctgggggtgacgacagggtcatggcgaatttctttcccatggccctgaaggggcaggcgcggggttggctaatgaacttgccacccgcgtcaatccactcctgggaggatttgtgccaacagttcaccatgaactttcagggcacatatccgcgcccaggcgaagaagcggacttgcacgcagtacagcgaagggatgatgagtcgcttcgctcgtacattcagcggttctgtcaagtccgcaacactataccatgcatccctgcacacgcggtaatctacgcgttcagggggggcgtgcggcacaaccgcatgctcgaaaagatcgcctccaaggagccccagactaccgcggagctttttcagctcgcggaccgagtggctcgcaaagaggaggcctggacttggaacccctccggttccggtgtggcagcttcgaccgcccccggatccgccgttcaaacagggcggcgtgacaggaggaggaagaagaggtcggtccattccgacgacgagggtcatgtcctcgctgtcgagggcgcttcgcgggccacccaaaaggggaggcctgcgagtgacaaaaagaaaaaagctggtgctcccggcagggagcgcccagccggcaagtggtgcaccgtccacaatacctccctccacgacctcatggattgccgcgcagtcaaaaatttggcggagcgaacgaggaagtgggaggaggacaggaggcaggagcgccgtgagggcaagtccccggcggttccctccggtaatcggcgaagtgaggccaagcagaaggcccccgttgagaacatcgatgatggcgatgatgacctaggcttccaagagcctggggccaccattgccaccgtcgatgggggagcgtgtgctcatgtttctcgacgaagcttcaaggctatgaagcgagagcttctagccgcggcccctactcatgaggcggcgcgtcgggcgcggtggtcggaggttgccctcaccttcgaccagaccgaccacccaccgtgcgttgcccggggagggcagattgcgatggtggtttcccccaccgtttgcaatgtgaggttgggacgtgtcctcattgatggaggagcggccctcaacatcctctcccctgcggccttcgacgccataaaggccccggggatggtgctccggccgtcccagccaattatcggtgtgacgccggggcacacgtggccgttaggtcacatcgacctaccggtcaccttcggtggtcccgccaacttccgcacggagcgggtgagctttgatgtggcggacctcagtctgccctacaacgcggtcctggggaggcccgcgttggttaagttcatggcggcggtccattacgcctacttacagatgaagatgccgggccctggtggccccatctctgtccatggcgacctcaaagtcgcgctcgcttgtctagagcagcgcgcggaccacctcgccgcagcgtccaagcccggggatgatgacgagaggcttggcgcccccgccaccctgaggcagcggatgatcacatgcgacgaggtcccggtcaaggaggttgccctgggcgacagcccgtccaagaccacacggatcggtggtcttctggacgcggatatgcccggggtccccagggaggtgattgagcaccgtcttgccgtgcggctgggcgcaaagccggtccggcagaaagtacggcgacaggccccggaacgtcaggccttcatccgagaggaggtggcgcgacttctggaggccggattcatccgcgaggtcatccatccggagtggctggcgaacccggtggtcgttcccaaggcgaacggcaagcttcggatgtgcatcgactacaccgaccttaacaaggcatgtcctaaggatccttaccccctgcctcgtatagatcagattgtcgactccactgcggggtgcgaccttttgtgttttctagatgcatactctggttaccatcagattcgcatggctagggaggatgaggaaaaaactgcgttcattacccccataggaacctattgttatacctcaatgcccttcgggttaaagaatgcaggtcccacttttcaacgtactactcgaatttctttgggtagccaattaggacgtaatgttgaggcgtatgtcgatgacttggttgtaaaaacgcgcaaccaggaaacattactcacagatctagcggaaacttttgagagtctccgctccgcccacataaaactaaatcccgacaagtgtgtgtttggtgtacctgcgggcaagcttctcgggttcttggtctctgcccgaggcattgaggccaaccccgagaagatacgggccatagagaggatgcgcccccccagtaaacttagggatgtgcaatgcgtcaccggttgcatggctgccttaagtcggttcatattgaggctgggagagaaggcgttacccttatttaagcttctcaaacgctccggaccgttcacctggacggaggaagccgagaatgccctcactcaattgaaggtatatctaagctctcccccagttctggtcgctccggagccaaacgagcccttgctactttacttagcggcgaccccgcaagtagttagtgcagcattagttgtggagcgcgatgaggacaatcctcacttcacgcttccacaccctgtgccgacttggcccgggagagagcagggaggagaggcccccgagccgaacggtggcccgaggcccccgacgaccggagttggccctctgcccgcttgtcagacggtgctaggagcccccgacccccaggaaggccctgaggccactgtgggaaggccgcacctgtcgccctttgaccctgaggctaaccctgtgctgactcgacccgggaaagagcagggagaaggggcccccgagccgaacggaggcctgaggcccctgacgaccggagttggccccttgcccgctagtccgacgacaccaggagcccccgacccccaggacggccccgaggccactgtgggaaggccgcccctgtcatcctcggaccccgaggtcatcagcacagaagacgagtgcgcctcacaaggccgcttgaacgaggagcgccccggggatgcggcccctagcaaagaggatcggccccaccgaaaggtgcagcggcctgtctactttgttagcgaggccctccgggacgccaaaacccgataccctcaggtccagaaaatgctttatgctattctgatggcctcgaggaaattgcgccattatttccaggcgcaccgggttacggtggttacgtcttaccccctcggtcaaattttgcgtaatcgagagggtacaggacgggtggtgaaatgggcgatcgaactttctgagtttgatttgcactttgaaccacgccacgctatcaagagccaggccctcgccgattttgtggcagagtggaccccggctcctgagcccgtttcaatccccgaggctagcacggactccccgcacctgcctcacaccgcccactgggtgatgcagttcgacggctccctgtctcttcagggcgccggagcgggagtcacgttgacttctccgagcggagacgtcctcagatacttggttcgcctcgactttcgagcgaccaataatatggcagagtacgagggactccttgcgggactcagggtggcggctgggctggggatccgccgtctcctagtgttaggcgactcccagctggtcgttaaccaagtctgtaaggagtaccggtgctctgacccgcagatggaggcttacgtacgccaaatacggcgtatggagcgtcatttcgacggggtcgagcttcggcatgtgcccagacgggataacatgattgccgacgaactctcacggctcgcgtcctcacgagcccagaccccaccgggcgcctttgaagaaaggcttgcccagccgtcggcgcgacccgaccccttaggggagacggacgcgccagatcggcccccggggcccgtcggagtccaggcctcgggacccgaggggagcgctcccagctcccttagattgattgcttggatcgctgagatccaagcgtacctcacagatgagactttacccgaggaccacgaagggagagaacgcgtccatcgcatctccaaacgctacgtgctggtagaagggaccctctatcggcgtgcggccaatggagtcctcctgaaatgcattcctcgggaacaaggcgttgtgcttcttgccgatatccatgaaggcgaatgcggagcacactccgcctcgcgcaccttggttggtaaagcctttcgccaaggtttctattggccgacagctctcaatgatgcggtcgaactggtccggcggtgtagagcgtgtcaattccacgccaagcaaatccatcagccagcccaggtcctgcagaccataccactttcgtgtccatttgctgtctgggggctcgatatcctgggaccgtttaggcgggccccgggtgggttcgagtatctgtatgtcgcgatcgacaagttcactaagtggcccgaggcttatccggtcgtcaagatcgataagcactctgcacttaaatttattaagggcatcacggcccgatttggggtgcctaaccatattattacggataatggcacccaattcactagtgaactcttcggcgactactacgaagacatgggcatcaagctctgtttcgcctcacctgcccaccccagaagcaatggccaagtggagcgcgccaatgcggaaatcctcaaaggccttaaaaccaagaccttcaacatactcaagaagcacggcgattcgtggatcgaggagttgcctgcggtgctctgggcaaaccgaactacaccaagccgagcaaccggggaaacgcctttcttcctcgtttacggcgcagaagcggttctcccttccgagctcaccctgaggtctcctcgggctaccatgtactgcgaagctgatcaagatcagtttcgcagagatgacctcgactacttggaagaacgaaggcggcgcgcggccctccgagccgcgcgttaccagcagagcctgcggcgctaccatcagcgccaagtccgggcccgatcactctgcgtcgacgacctcgtcctacgccgcgttcaaacgcgtgttggattgagcaagctctcaccaatgtgggagggtccgtatcgagtgatcggcgtcccccggctaggttccgtacggctggccacgggcgacggcacagagctgcctaacccgtggaacatcgaacaccttcgtcgtttctacccctaa

SEQ ID NO: 70190 - DNA, 759 bp, Oryza sativa
  Clone ID: PAT_MRT4530_70787C.1
atgttgtgtgaagaagggcaaacatgcacgttgctaagctgacgcgtggtggacaagaatgaccgatttgtgaccggtctgacactgatcatgtcatcggcagacagccacgttcccacgacgcgcctgcccccggcagaagtggaggtaggtatagagagcttgggatttcaccctgagcccccggccgaaccggcaaaggggggcctgtgcggtctcccggtgaggagccccgcgctccgtcatctggcgcgccagcttttcctgttcagccagatggccgagcaagcaaaggcgcacgaccactctccgagtgtgagtggcgacgacggggagccgaacccacgccgtcgagctcgtactccaccgccccctccacgccaaagtcctaagcggggggaggcgctcgagagggtcgaaagatccgcgacttcaccgatcgcggatgatggaaaagaacggcgagatggggagcgtcgcctcctcgtctacggcgacggcagcacgccccagggcgcgctccaagctgcgggcgcgctcttacgccacccgcctgtcgtccctgacccggagtctccagcccaacgatggctggacgacgtggccaaattggtcatgacggcgcggcagcgcctagatgctggtgggcggtcctccgccaccaaggcctctggtgctgctaccaccggctccgcgtcgtcaagacggaggaccttgcccattgcatgcaagcttgagtattctatagtgtcacctaaa

SEQ ID NO: 70191 - DNA, 321 bp, Oryza sativa
  unsure (1)..(321): unsure at all n locations
  Clone ID: PAT_MRT4530_70788C.1
atcgcgttgcgggtcccccggggtacaacgttccgtatgccacgtgttgcgtagcaccccgccatcatggtggcctatggcccagtaccccattcgtccgagtgtcagtaaatggaaacggaatacatantatcccgtacagttgtacaggtaacccaatgtcccctagtggttaggtcgtcaaaagttgaggggaaatgtcgagtacccgcactcggcactgtntccatcgaagttatgaaagtgcaagaaaggatatctnaaatctcgtcgttaactnaattcagaatagaaagattcaaataaaaaaaaaaaaaaaaa

SEQ ID NO: 70192 - DNA, 1454 bp, Oryza sativa
  Clone ID: PAT_MRT4530_70789C.1
ggccatgtggtttggttttgtttagcatcccgtctctctcctcctctgtttccatcatcatcatcatccagaggccaccaaccctcctcgattattcagagcagccaattagtcttggcgtcttgacgtgttcggagaatttcctctcatttatatgcagtagttagacatgctctggagaagcaaagcgaggtaggaagagggatttggtcgaattttacgtacttagccgtgggcgaggcgtttacagggttgcttcggctcggggtgggttgggttgggttgggttcgatggagaagtggagcagggggctctcctgccgggccgccatctgcggcatcgtcgtcctgctctgcgccaccgcgttctcctgctccctcgccgccgaattccgcaaagtcaaggagaaggacatgaagctggacggtagcctctgctccctgcccaagagctccgccttcgaattgggcgtcgcggccatcgcgttcctctccgtggcgcagctggtgggcaccacggcggcggcgaccaccatgtgcgccgcgtccaagcgcagcaagtcgtccaccaccaggcgccgcgcggcgtccgtcgccatcctcgtcctctcatgggtgagcttcgcgctggccgtcgtcctgctggcgaccgcggcgagcatgaaccacgggcagcggtacggccggggctggatggacggcgactgctacgtcgccaggaacggcgtgttcggcggggccgccgcgctggtcgtcgtcacggcgctcctcatcctcggcctcacctccaccaccaaatcatcctcatgcgccacctcggcagcatccgccacaacgacaatccgtctcgacgcggcggccacggacgccgagcaggcgagcgggcgatcgaagcagtgacccgccggcctggccgggggcggaacacgcggggcgggacgggccaaccggaggagaggcgggtggacggtgctccgcgctgttcgtcccgcaaaggccaagcggcgtggggggcaatctccgcttgctggcaaaaggccaacggctggtgatgggtgggggcgggtataccggtgggttagaagatattttagctggacaaaggtagtacatagcattactgacaaaattactgaccaagaggtccaagaccgtgcaaaatgtaaatgaaaccagatcaaacagatccacgcaaagaaagtaaaggttgtacatgaattaattacagcatcttaagacatagccgagttcgaacatggtgattggtggatgtggcagagtcgaatgtgagtcgtacgatttagtcgtatgtatagcaggattctatttttttttagctcgcctatgccagattttcgtgatggttttattgtatttatatatttgttttttagataacaggagatgtattactgtagtaatatttatatatacctagcaaaaaaaaaaaaaaa

SEQ ID NO: 70193 - DNA, 3306 bp, Oryza sativa
  Clone ID: PAT_MRT4530_7078C.1
atggccgtcgaggcgcgcggattcagggtgggggtggtcgagctcaccggcggcaagggactcgccgggtggtcgaggtctccgatcatccgacgcggagagttgcttgggttttctgtttctccatggttggtaaataatagcaattccatcctggaattctcctcctcccattcccgagtttccgacgagacgctttggcaatggcggtggcgccagatcacgcgcccgtattcgtggcgctgccgccgcggattccgcgggatggacatggggaggaatttcccgggcttggacttgcctgtccttctcttttcctcccttgttcttggggtggggttggcggattggggaatcggcttcgagctgattggttttgactgcgccatccgatttcttcgcttttgtggaggggggcagcacggctgtgcatttcgttctcttgtcgtggatgcccccggaatttatccccaattctcgctatacttgctcgtctacatcgaaggaagcacgcaaatgatgaggcattgtaggagagaatggctcctcgccctgtgcctcatctctgtgcagctcctcattccaacaggctgcgagggggttctcgtcgcggcaagcaacatgtcgccacctgctttgacaccactcctcatcaatcaagtagaccaattggtagaacatgcatgggtcaagtgtggattggacaagagaactcttgaagatgttagacgccacttcaactacaaccatgtattggcaattctccgtagaatgtctgggcaagacattaaggacacctctcctgacattgatggagggaccagtgtattatcactagaaaggagggacgctatactgaactgtttaagcaagcagaatttcatgagtatcgctggacaggatggtttaaaaatcttgtccgctgattatatcaaagcacttattgcctcacttagaacagaccttgctcaggaatcttcaactacaaagtcaatacctgaacaagcaggaaaacctgtcccagggaaaacttctacaccaaaacctgtaaacaaaccaaccgacagtgtatcatctccaccagatcgttcatataaatcagctcctacagaaaaggaaaaccctcctactaaatcagtagcggaaaagaaaaaggacagcagtggcatgccaaatgctttcattggtttgtccattgctggcatagctcttatggctcatctctgtttgtgctgcttcatgtgccatgggacttcctcatctgacttgagggatgataaaccacttctgactctaaatccgagcaacttgtccgctgcttctaaatcgtcccaaggaaatccaattgatgtcaataagcttggggtagtgtcgttgaaatcagaggctggtcaaaatggagatgtgaaactaatttcgaaggaaggcacaaacaatgtgaatgtggtgcacccagtgagttctgtgtcagaatcaacattgatgccacctccggaaggcgcaaacaacgtgaatatggtgcacccggaaggcgcaaacaacatgaatgtggtgcacccggaaggcgcaaacaacgtgaatatggtgcacccggaaggcgcaaacaacgtgaatgtgaatatggtgcacccagtgggttctctgtcagaatcaacaccgatgcagcctcctgtgatgccacctccaattccgaagcttctttctccaccagcaccccaagctcccatgccaccattaaaggcttctcctgttcctcccccagaaccttcaccacctcctgctccaaaagctgcacctccaccgccaccaccaaaatctactggccctggcccacctcgcccgccaccgccagccatgcctggttcttcgaaaacacgcccaccgccacctcttaagccaggcgctaaggtgggtgctgttgaaaattctaatgaagctaaaacaaagctcaaaccattcttttgggataaagtaactgccaatcctgcacgatcgatggtgtgggaccaccttaaatcaggatcattccagtttaatgagcagttgatggaaaacctttttggttataattcaactgacaagagcagtgacaccaagaaagatttatcatcgaaagatgccactcaactcataaggatacttgaccccaaaaaggcgcagaacctagctatatcattgagggcgcttggtgtttcacctcaggaagtatgtagtgcagttaaggaaggaagtgaacttccatctgatttgatacagaccttaataagatggtccccaagtaatgatgaggagctcaggcttcgattatacagtggggaactctttcaacttggtcctgcagagcaattcttaagagtaatcatagatattccttatattttccagcgcttagatgcattgcttttcatggccaatttaccagaagaagcttcaaatgtgaagcaatcctttgccactttggaggtggcttgccaggagcttagaaacagccgtctttttatgaagttactagaagctgtcctcaaaaccggaaatcggatgaatgttggcactttccgtggtggagctcaggcttttagactcgacacgctcctcaagttgtctgatgtcaaaggaactgacggaaagacaacactattgcattttgttgttcaggaaatcattcgttccgaaggtgtccgtgctgaacgggctgcaaaggagcagaacagtggcgtttccagtgtgaagactgatgatctaggtgacaaaagtgagcaaactgaagacggttacaaacaactggggctgaaagttatctccagcttaggagatgaacttcaagatgttagaaaggcagctatcctagacgcggatcaattgactatgtcggtagcaagtcttggccacaagctcatgaaaaccaatgaattcttgaacatggacatgaaaagtttggacgaagacagtgggtttcaccgcaagcttacgcacttcgtacagcagtctcagactgatattactttcttgctggaggaagagaagaaaatgcggttattggttaaagacaccgtcgactatttccatggaagtgcaggaaaggatgagggcctccggttatttgtgatagtaagagatttccttgcaatgctggacaaggtgtgcaaggaggtgaaggaagcatcaaaagttgctccagtaaaagcaaaagccaaacagccctcccaatcattgcagtcattccgtgatccacgggttaatctttttccggcgattcaacacctgagggcagatagctctagctcaagttctgatgatgaaagttag

SEQ ID NO: 70194 - DNA, 243 bp, Oryza sativa
  Clone ID: PAT_MRT4530_70790C.1
ggcacgaggtagaactaaagtaaagaacctgcaccttaggccctagctctgtttttaacggatcaacctgtgaccttgtcataagagtgtatgaagtaattgcagtaaatcagttgtttcacttgcgtcaatcatgttgattttgttctagtggcaatcagttgtttcactacgtcaatcgtgcattataaaagttccatcctgcagttctgttatgtcatttggcattggcattgcatgtta

SEQ ID NO: 70195 - DNA, 918 bp, Oryza sativa
  Clone ID: PAT_MRT4530_70791C.1
atggcgccggcggcggcgccagcggcggcaacagggggcggtgcgggtggaaaaggccggggcgcgtcctccggcgccgcgtggctctacgccatcacctacggcggcggcatcgtctccggggacatcatctcctgcacggtggccgtcggcgacgggtgcgcggcggcgatgaccacgcaggcctccactaaggtccttttttctttcaattgttcgcatgcgaaaaatgttctgagcaggtgctacatttcgcaagagttggagaagatgcactctttgcagattattccagatcctgtaacctgcttctcaatggctcgataccaccagaagcaagtgtttcatgtctttcccaattcaaacttagtcgttgtagactggtttacaagtggtcgttacgagagtggagaaaaatggaatttcagcttccacaagagcatcaaccatattcttttggaagatcagcctctatttattgactcggttgtattggaacagagctcaaattttagtattgctgaccgaatgcaggaatacaatgtggttgcaatggttattttgctgggaccaaagttaaagcacatacaagatcagatgcaagaatggaatttcagcttctacaagagcatcaaccatattcttttggaagatcagcctctatttattgactcggttttattggaacagagctcaaattttagtattgctgaccgaatgcaggaatacaatgtggttgcaatggttattttgctgggaccaaagttaaagcacatacaagatcagatgcaagatgagggcactgggatggttgctcggataaccgcagtgagcacagaatctgtgtacagcttcctgagacatcatctggcagcactggaaccattccttggcgcttgcccatatcctgcatcatga

SEQ ID NO: 70196 - DNA, 294 bp, Oryza sativa
  unsure (1)..(294): unsure at all n locations
  Clone ID: PAT_MRT4530_70792C.1
cccacgcgtccgcccacgcgtccgcccacgcgtccggcgccgccagcgangttgactgagtattctanaactgangttagggggatgattgtaagntgaacgagattgtgattgagtngttgttgattgtatatagttgtttgagaatggggtaaaataagaaatgaagattnaaggnattttatttaattatttataaatgtgtgttgtaaaataatttgtantaaaaattttagatataaatggangaaggtggataannattttattntaatnaatnaaatattggagtgg

SEQ ID NO: 70197 - DNA, 256 bp, Oryza sativa
  unsure (1)..(256): unsure at all n locations
  Clone ID: PAT_MRT4530_70793C.1
aacacaacattatcnaacacaaaaagagggagagggaggaggtatggtacggaagcgcacgtgagaggttggagtgattgctattaatagatgaagcggctatgcgaaggaggatgaaataggacaataatatagggattatcagttgaaagagaattagcatttaaagaatagaaacttaggagggagggggagttcgaaaggaaaaaaaagaggataatgtgaagatagttattgaaatcagtttgagttagaa

SEQ ID NO: 70198 - DNA, 356 bp, Oryza sativa
  Clone ID: PAT_MRT4530_70794C.1
taccttgggaaccccaacctgggtgcacgcgcagagcatcctcgccatctgggcgggtccagtggtgcttcatggattcgtcgagggctacccgcgtcgggcggcgcccgctctgcgagggccctccgaccaaggtgttacccaaggtggcgcccttctgaccccacctcggccctcggcccggacgaacccctgacacccgtttcgccccgagcttcaaggtggaaggagccttcaagaacgggccgcctcgccaatgttcctcgcatggttcggcttccttcgtccaggccatcgtcaccggggcaggggggggcccattcgagaacctcctttcgacccacgtcgccgagccg

SEQ ID NO: 70199 - DNA, 4470 bp, Oryza sativa
  Clone ID: PAT_MRT4530_70795C.1
ttatagaaacaaaattggcataggattgagggaaaccgaaccggatacaaatacaatatctctaacaccccccgcagttggaacgtgggcggagtgaacgttcaaactggagcggaactcacaaaacaccgagcttggtagacccttggtgaagatgtcggcgtactgtgacgaagtaggtacatgcagcacgcggactgtaccaagggcaaccttgtcacgaacaaagtggagatcaatctcgatgtgcttggttcgttgatgttgtacgggattggtggagaggtacaccgcactaacattgtcacaataaaccaaggtggcccgtgtcggaggagtgtgtaactcgtggaggagctgtcgcaaccagcatgtctcggggactgcgttagcaacagcgcgatattcagcttcagcactggagcgtgaaactgtattctgtcgcttggaagaccaggagatgagattatctcctagaaaaacagcatatcccgaggtggagcggagagtgtcaggatagccgacccaatcagcatcagagtaggccaccagatcggtggacgaagagcgagatttgtgtaagctgtagtccatagtaccacgaacatagcggagaatgcgcttgatggcagcgagatgcgtctcgcgggggtcgtgcatatgaaggcacacctgctgaacagcataagcaatatcgggcctagtgaaggtgaggtactggagagcaccagctaggctgcgataatcggtagggtctgccacaggttgtccatcagaagcagatagctttgcgcaagtgtcgactggcgtggaacacggtttacagtgaagcataccagctcgctctaggatctcggaacaatactgtcgctgtgagagaatcagaccaatggaattccaagtgacgctgatgcccagaaaatgatggactccaagatccttcatggcaaactctgactgaagctgtgtgatggtccactgaagtatcggcgccgaggaggccgtcaggacatacagactgcggttcagacgacatactgatttgggatgagcagggtcggtgaaacctaacggctgggaacagtagacagtctcctgtagtgtgccatgcaggaaggcattcttcacgtcaagctgtcgaatggcccagttctgagagacggctaagctgagaacagtgcgaaccgttgccggttttaccacaggactgaaggtctcatcaaaatcaatgccaggacgctgagtgaaaccacggagtacccatcgagcctttaacctgtcaagcgtgccgtcggacttgaacttatgacgaaagatccactttccggtgaccatgttagcaccaggaggaagcggtaccaagtcccatgtattgttggcgcgcagtgcagcgaactcttcctccatagcagcacgccagtgcggatccgcgagcgctactcggtatgtgcgcgggatcggtgaaagagcggaggcgtggaggttgagccggtcggtcggcaggtggaagccgtacttgctgctagtggccatgttgtgagagttgagtgccggtgaagctccaaggacaggaggtagatgacggccgccggggactcgagcactgcgtggacgagtgggtacgggcggaagagttggtgctgatgtagtactgacaactggcggtggagagggcgccgtggaggccggcgagccggcagtggtggtcggtgagccggccggggaggccggtgggtcgacggagggtgctgacgagtcggcggagggagccggcgagccgggtagtgggtgccagcagtggtggccgtcaatggtggccgacgaggcgggcggtgatccacccggtgaagaagtccgagccgctgctgtagtccgtcgagtgctagtgggagtgggcaacgatgatgctgtaaaatcatctagaaaggagaggtcagtagcacatgtcccgttagacaacttggcaaaaggaaacgagtgctcgtcaaacacaatatgacgcgagatgataactcggttaaaactaaggtccatacaccgataccctttgtgatctctgggatagccaagaaagacgcatgctgtggaacgaactgatagcttatctggagcagtggcggagaggtttggataacacttacaaccaaaaacacggagatgattgtaggtgggatggataccgtaaagggcaaagaaaggtgtatggaattggagggtcttggtggggtgacggttaataaggtgtgtggcggtgtggagagcctcaacccagaaggaggaggggagactggctaatagttctctatatggtgggataacagaggaacgagcaaggcgggtgagggcttcagatccaagatgaccaaggcagtggtgccataggacggaggactcccgggcggcgagggcgtagtggagctcggtagggcggacgaggtagaggtccccgaagctattgcaccaaacgatcacgttcctggagtggaaatccttcacatcaagaccatctttgtcaaattcgacagaaacatcattatcacgagcaaaacgatgaacaacaataagatttttaatgatctcagggctaacgagaacattattaaggacgaaagaacggtgtggaaaagataaatgagtggagccagtggcagtgatgggtagaggagaaccatcgccaacaataatatgagacagtgtattagggttaggttgggaggaaaaggagagggtaccggcatcggacgtcatgtgagaagaagcacccgagtctatataccagtcgctagacggaggttgggacagtgataccgtgttgaaggcgttgatgaggccttgttgatcccattgcgtgttggcgctgccgttccatgatgctggtgtgcccggagtggagggcattgcggcgaagaccggctggtagctggtggaggcggcgagggactgggccggtccggcatgtcccagcacagagggtgcggcagggtgctggggcacaccattgtggctggcggcaaccatggagccagcgaagtgcgatggtgcgccgggacgaggtccaagaagaccggaaccggagccgacgacacgtgacgggatcatgccgacaggaacgggccacatctggagagtgccgttccacgggttgagcggggacggccaggaggccgcttgcgccgagctgccaggtgggcgaaattgaggttgctgttgcccaccgttgccgccgttgttgttatgacggcggccacggttgttcccaccttgacggccgttggagttgcggttgccggtgttgctgttgttgccgtagccggtaatgtgtgctggattggagttggcggcccccccggaagtgcggccgcttgtggcagcgatgagggtggtagccggggtgtgggagcggttcttggtgagttcatccagcaggagttgcgagcgcacctcggcgaatgacgggaagggcttccgcatggtgaaagcagattgcaagtgtgcaaaattttcatccaaaccttggatcgtagccagcgtgagtgtgcggtcgccaacgggttcgccgacatcggcaaggtcggcagccatggctttgagacgacgacagtagtcggtgacggatagatcgccttgttggaaattgtaaaactcggcgttaaggttgagagcacgagcttcacgatttccaagaaattgatgctcgaggctgcgccacaccaatcttgccgtagtcgtatgcgtcatgactgactccaggaggtcagtggagatggtgccgtacatccaggagaggacgacacagtccatgcgcatccagtcggggtggtctggtcggtagttgtcagtgaggacatgatcagcaagtgcatacttgctgaggatgacgagaagaagaccacgccaccaagtgtatgtgccggagttgacgtcgagggtgaccggtacaagcgacttgatgttgaggacggatatcgcctgtgcatggaggttggcggtggccttatcatcaaggtcgacgttgtagaagtggtcggcttgcggtgctgttggtgacggggcgacgaaggatagagagccgtggccgtgtggtggaggcgcgccagagccttgcgggatggcgtcgtgctgcggctggaggccggcggagctggtgtggagcccggcgaagaaggccgcagccgacgcggaggagatggtggctgctgcagtggagttgaccggggcactggctgacggattgtccggctgcgaggatgtggacgccgagagcttctcgatgaaggaaatcaacgctttccatgcggctgtggaggagattgcagccgccgattcggtgacattggcagcagtggtggggtcgatgccatgccgagcgtcaggttggaagaccgcgcggatggcgtcggcgacggcggtcgatgcggcgtcgacggcggtcacgggagtgatggacggtggcggcagatcgtcggccat

SEQ ID NO: 70200 - DNA, 415 bp, Oryza sativa
  unsure (1)..(415): unsure at all n locations
  Clone ID: PAT_MRT4530_70796C.1
ggagaaaattatagataatctgttgatgatgctctaaacagtactatcaatgcaatttactcgtaaatgaacaaaccctatgtctcacaaaattttcttcccaaaaggcctacaggaacgcgctantcttgattctggagcgattcccgcagcctaaccagaagccccatccaatccaggtcgaccagcgcggcggatccagagccgtagctcctcggagtccctgtctctgtggacgctctcaccctaatccgacgccgggcctctccgatcttccttcgccttgtgctgtggcttctcttccccctctatatatccctatcagcgagatgctccactcatggcggcatctacaacgggcttnccggttttcgtatggatcaacaacaaccagcattgganggaaaggggagac

SEQ ID NO: 70201 - DNA, 466 bp, Oryza sativa
  Clone ID: PAT_MRT4530_70797C.1
aaaacaattaaattccagttcgggggctggagcccccccctggcagcttattaggtttcccgtaaaagggagggttaacaggggaccgtaaaacgggacctttgatgggttaaacaataagttttggctgttaccacctcccagtccttgaaaaatcttttgtccaacaccaggatggatgctccagggaaccaccaaaagttgatagctttgccttaaaacctgcaagtgcggtttacctaaccacccataacataaatgggcccatggtcaagtgcttaacaatctgggccaaaatccacccctgtcttctaaaggaaagctaaaccttcctccttgccgaaccttgacaaataaagcttcaggttttcaatgtcctgcatgccactgaaaatgccctctaccctagtggacccaaccggttcatgtgatgaaaaaaacacttcaccaggatagaccaaacccc

SEQ ID NO: 70202 - DNA, 1481 bp, Oryza sativa
  Clone ID: PAT_MRT4530_70798C.1
ctactgccgagcagttactcctcctccccatcctcttcttctcctccaatagcccctgccccgcggggcctgcggcggcggcggcggtggctggggcggcgggggtgggggtgggggcggcggcgtggccgaggcggcggtgccgggacgtgttctggctggtggtgttcctgctccacctgctcgtcttcggcggggcgctcgcgctgacggggctcaaccgcttcggccaggcggaccgcttcaacatcgaccgcttcaccaacctcaccgtcacccccaagtccgagctcacggagtcgtactggccctactacggcgccgcgggggccgtggggaccgccctcgcgtgggcgtggctggcggcggccgcggggaagaaggacggggggagggtggtcatgagggccgccgtgcacagcctcaccgcctacctcgcggtggtcagcgtgctctgcttctgggggaagcacttcttctggggcgtggcgttcgccgtcggcggagcgctgcacttcctctacgtcatgtcagttcttgataggttccccttcacaatgcttgtattgcagaaggcagtaagaatggtatgggaacttcctgatgtgatgaggatagcatatgcatttgtgttagtcatgctttgttggatggcattatggtcctttggagtgtctggcattcttgcttttcacatacctaatggagggcaatggtgggctcttttgattttctcagtcagtttattttggactggagctgtccttagtaacacagtccatgtcatagtatcagggatggtttttcttgttctcattcatggtggtcaagctgctgcatcgatgcccccaaaaccacttctaaaatcacttcagtacgctgtaacaacttcatttgggagcatttgctatggatcactttttacggctgctattaggactttacgttgggagattcgaggaattcgttctaaaataggcaacaatgagtgtttgctgtgctgtgttgactttttgtttcatatcgtggaaactcttgttcgcttcttcaacaaatatgcatatgtacagatagctatcaatggccagagtttcaatcgctcagctagggatgcttgggagttgttccaatcaactggcgttgaagcacttgttgcttatgactgttcaggtgctgtccttctgatgagcaccattttaggtgggttaattacaggaacatgtacgggtgtttggacatattttaaacaaagtgataaagctattatggttggctcaacctctatgctgatgggcatgatactggttggggtaactgttgtagttgtcgaaagtgcagttacatcgatatacatatgctatgctgaggatccccgtttaattcagagatgggatcctgatttttttgatcaaatgtcagaagcactacaccagcgactgcaataccgaagtgcgcgagctcaccaaatactgaacagccgg

SEQ ID NO: 70203 - DNA, 573 bp, Oryza sativa
  unsure (1)..(573): unsure at all n locations
  Clone ID: PAT_MRT4530_70799C.1
acttgctttacttcgtcttcctcctcctcctcgcgctagctcgatcgatcgcccgccatgtcgtccaagaagatcgtgatcaaggtggacttcgtccgggccaagtgcaaggccgtcgccatgaccgtggtggccaagatcccaggggtgaagtcgctggcggcggacgatgagaaggggacgatgacggtggtgggggaggtggacgtggtgcaggtggtgggcgagctccgcaaggccaagttcgcggcggaggtcgtcagcgtcgagccggagaagaagcccgaggcgcccaagaagcccgacgaccctcccaagaagcccgacccgccgccgccctgcccaccgccgccgccgccgtgctgccccggctgcaactcctgccgccccgcctgccagtgcgccgccgcccccggcggcggcgtcgtcctctacgaggtggaggccgatggctacggctgcatcatcgcctgatttttttttctccttctctgattaattaattaattactactactcgaccattgggaccattntctctttttttctttttgaaattaaattaagattaag

SEQ ID NO: 70204 - DNA, 5298 bp, Oryza sativa
  Clone ID: PAT_MRT4530_7079C.1
atggccgagcaagcaaaggcgcacgacctctctccgagtgtgagcggcgacgacggggagccaaacccgcgccgtcgagctcgtactcccccacctcctccacgccaaagtcccaagcggggggaggcgctcgagagagtcgaaaaatccgcagcatcgccagtcgcgggtggtgcaggagaacggcgagatggggagcgtcgcctcctcgtctacggcgacggcagcacgcctcaaggcgcgcttcaggctgttggcgcgctcctacgtcacccgcctgtcgtccctgacccggagtctccagcccagcgatggctggacgacgtggccaacttggtcatgacggcacagcaacgcctgggtgctggcggacggtccgccaccaccaagacctccggcgccgccactaccggttccgcgtcgtcaagacggagagcgcggcgagcggcggccgctgcacgccattcggctaccactccctcgtcggcgcctccgactcgggaggatcagcatgaagagccggatgcccgcctcgacattgagcgccgacgtagtgatcggcgtactccccgcgcaacggagggtgcctcttcgtccagggtgtcacctcgacatggacgtgaggatcagccctccgtgcccccggttggtggtgttggctgtagagcctttgtggcgagtcttcggaatgtccgttggcccccaaggttccggcccaccatcaccgagaagtatgatgggagcgtcaaccccaccgagtttctccaggtctatacgaccgggatcgaggccgctgggggagacgacagggtcaaggcgaatttctttcccatggccctgaagggacaggcgcggggttggctaatgaacctgccacccgcgtcggtccactcctgggaggatctgtgccagcagttcaccatgaactttcaaggcacctatccacgcccaggtgaagaagcggacttgcacgcagtacagcgaggggatgatgaatcccttcgctcgtacattcagcgtttctgccaagtccgcaatactataccttgcatccctgcacacgcggtgatctacgcgttcagggggggtgtgcggcacaaccgcatgctcgaaaagattgcctccaaagagccccagactaccgcagagctttttcagctcgcggaccgagtggctcgtaaggaggaggcctggacctggaaccccttcagttccggtgtggcagcttcggccgcccccggatccgccgctcagacagggcggcgtgacaggaggaggaagaaaaggtcggtccattccggcgacgagggtcacgtcctcgccgtcgagggcgctccgcgggccacccgaaaggggaggcctgcgagcgacaaaaagaaagaggctggtactcccagcagggagcgcccagccagcaagtggtgctccgtccacaacacctccctccacgatctcgcggactgtcgcgcagtcaaaaacttggctgagcgaacgaggaagtgggaggaggacaggaggcaggaacgccgtgagggcaagtccgcggcagttccctccggtaaacggcgaagtgaggccaaacagaaggcccccgccgctgacatcgatgacggtgatgatgacctaggtttccaagaacctggggccaccattgccactgtcgacgggggagcgtgtgctcacgtttctcgccggagtttcaaggccatgaggcgagagcttctcgccgcggcccctactcatgaggcgacgcgtcgggcgcggtggtcggaggtggccctcacctttgaccagaccgaccacccaccatgcgttgcccggggagggcagattgcgatggtggtttctcccaccatctgcaatgtgaagttggggcgtgtcctcatagatggaggagcggctctcaacatcctttcccccgcggcctttgatgctatcaaggccccggggatggtgctccagccgtctcaaccgatcatcggtgtgacgccggggcacacatggccgttaggtcacatcgacctaccggtcacctttggtggatcagccaacttccgcacggagcgggtgaacttcgatgtggcggacctcagtctgccctacaacgcggtcctggggaggcccgcgttggtgaagtttatggcggcggtccactacgcctacctccagatgaagatgccgggccccggtggccccatctctgtccgtggcgaccttaaagtcgcgctcgcttgcatggagcagcgtgcggaccacctcgctgcggcgaccaagcccgagggtggtgacgagaggcttggcacttccgcccccaccgccccgaggcagcggattgccacatgcgacgaggtcccggaagacgcgctcgtctccttcctgcgggcaaacgctgacgtcttcgcatggagaccagcggacatgcccggggtccccagggaggtgattgagcaccgtctcgccgtgcggccgggcgcaaggccggtccggcagaaagtgcggcggcaggccccggaacgtcaagccttcatccgcgaggaggtggcgagacttctggaggccggattcatccgtgaagtcatccatccggagtggctggcgaacccggtggtcgttcccaaggcgaacggcaagcttcggatgtgcatcgactacaccgaccttaacaaggcatgtcctaaggatccttaccccctgcctcgcatagatcagatcgtggactccactgcggggtgcgaccttttgtgttttctagatgcatactctggttaccatcagattcgcatggctagggaggatgaggaaaaaactgcgttcattacccccgtaggaacctattgttatacatcaatgcccttcgggttaaagaatgcaggtcctacttttcaacgtactactcgaatttctttgggtagccaaataggacgtaatgttgaggcttatgtcgatgacttggttgtaaaaacgcgcaaccaagaaactttacttttagatctagcggaaacttttgagaacctccgctccgcccgcataaagctgaaccccgataagtgtgtgtttggtatacctgcgggcaagcttctcgggttcttggtctctgcccgaggcattgaggccaaccccgagaagattcgagctattgagcggatgcgcccccccagcaaacttagggatgtgcaatgcgtcaccggttgcatggccgccctaagtcgtttcatatcaaggctgggagagaaggcgctacccttgtttaagctcctcaagcgctcggggccgtttacttggacggaggaagctgaacatgccctcactcagttaaaggcatatctcagctctcccccggttctagtcgccccggagccaaatgagcccctgctactttacttagcggcgaccccccaagtagttagtgcagcattggttgtggagcgcgatgaagacaatcctcatttcgtgcacccccactctgtgctaacttggcccgggagcgagcggggaggagaggcccccgagtcggacggtggcctacggcccctgacgaccggagccggccctctgcccgcttgtcagacggtgctaggtgcccccgaccctcaggagggccccaaggccactgcgggaaggccacacttaacgccctttgaccccgaggctaaccctgtgctgactcgacccgggaaagagcagggagaagaggcccccgagccgaacggaggccagaggcccctgacgaccggagttggccctttgcccgcttgtccgacgatgccaggagcccccgacccccaggacggccccgaggccactgagggaaggccgcccctttcatcctccgaccccgaggtcatcggcacagaaaacaagtgcgcccccaaaggccacttgaacgaagaaccccccgggggtacggcccctagcagagaggatcagccccaccgaagggtgcagcggcctgtctactttgttagtgaggccctccgggacgctaagacccgataccctcaggcccagaagatgctttacgctattctgatggcctcgaggaaactgcgccattattttcaggcacatagggtcactgtggttacgtcttaccccctcggtcaaatcttgcataatcgagagggtataggacgggtggtaaaatgggcaatcgagctttctgagttcgatctgcactttgaaccacgccacgctatcaagagccaggccctcgccgattttgtggcagagtggaccccggctccagagaccgtctcaatccccgaggccagcacgaacccctcgcagctgcctcacaccacccactgggtgatgcagttcgatggttctctgtccctccagggtgccgtcgatctggtccggcgatgcagagcgtgtcagttccacgccaagcaaatccatcagccggcccaggccctgcagatcataccactgtcatggccatttgctgtctgggggcttgatatcctgggaccgttcaaacgggccccgggcgggtttgagtatctgtatgttgcgatcgacaagttcactaagtggcccgaggcttatccggttgtcaagatcgataagcactctgctcttaaattcattaagggcatcacggcccgttttggagtgcctaaccgtattattacggataatggcacccaattcactagtgaactcttcggcgactactgcgaagacatgggcatcaagctctgcttcgcctcacctgcccaccccagaagcaatggccaagtggagcgcgccaatgcagaaatcctcaaaggccttaaaaccaagaccttcaatattctcaagaagcacggcgattcatggatcgaggagttgccagcggtgctctgggcaaaccgaaccacaccaagccgagcgaccggggaaacgcctttcttcctcgtctacggcgcagaagcggttctcccatccgagctcaccctgaggtctcctcgggccaccatgtactgcgaggctgatcaagatcagcttcgcagagatgacctcgactacttagaagagcgaaggcggcgcgcggccctccgagccgcgcgctaccagcagagcttgcggcgctaccatcagcgccacgtccgggcccgatcactctgcgtcgacgacctcgtcctacgccgcgtccaaacgcgtgctggattgagcaaactctcaccaatgtgggagggtccgtatcgagtgatcggtgtcccccggccgggctcggtacggctggccacgggcgacggcacggagctgcctaacccatggaacatcgaacaccttcgtcgcttctacccctga

SEQ ID NO: 70205 - DNA, 1266 bp, Oryza sativa
  Clone ID: PAT_MRT4530_707C.1
atggcacaagacgccggcaacgccgtcctccccgcctcacgcttcacagcggagaagcacatgagcttcgtccgcaagtacatgccggaggacgccgccgtgacggcaacggagtcatggctgcgaccgcgatacctggaacggtccgtgcacctcctgtccttcgccatggcgggactgatcccaccattcaccagcttcttccacgacgtgttggacttccacgagatccacaccctacacctcacccccaacgccgtgataatcctggccatcttcgtgcatttgtgcgagatgttcatcagggtgaggctgtccatgcggctgttccaatacttcttcatcccacagctgcagcagcccacgatggtgggaggatgctacttccagccccacgtaggggtgatggggcagtacatcgagagccacctccgcaagcaatgggatgactataagagagactggggcctgtggagctggggcttgacggcggtgatggtgttcggcgactacttccgccaccgcatcgtgcctcttcaagagcagtcccgtggtgcgtgggcgtataccaggtacaacgacccgatgcgcacccacgtgggcgaacgccgggagtggagcgaggaggacgcgagggcggtgggacgcgaccgggatagcatcctggccgtgatgatggcggtcggcacggccaggggtcggggccgcagggcaactgccgggggtggccgcgacgacggagcggggaatagcagcgcaggcgcgggcggcagtcaggtcggcggctctagcggcggcggtggcagctccagggtgtctagctcaagccacggggccagcacaggcccggccgctgacccgatggcgaagtggaaggtctctgggtccgagccgccttcccctccataccggctcgccacagctcaggacgctctcgccaccctggagcgcctgacacaaggccaggccggggagatcggggcccttcgtcttgccaacgacgtggggcctggcctccatcacgacgccatcgagcggctagagcacgtgggacgccgggtgggcatctcaaggcgctgggacgagaagctaccagccaccaggccggcgctcgcacatcggctggacgagacggctatcaacctggagaaactgcagggggaggttgacgcggatgttaggtcgtcgtccgcttcgctagcgcgggctgcggtggaggtcatcctggcgagttaccaagtccgcaactccgagttcctcccctga

SEQ ID NO: 70206 - DNA, 1512 bp, Oryza sativa
  Clone ID: PAT_MRT4530_70800C.1
atggagctcgccgcagccggtaggaccgccgccattgcgctgcttctcgcgcttgccttcgcgtcgagcttcattagcgccgccgatggcgcgaggagtgcccgccaccaccacgccaagcacgccaagcgcaacgccgcgcacccgccgtcgcaggcgccgggccccgcggcgaggcacgccccgggaccggcgaggcaccacggcgcgccggctcctcacccggggcggcgctctcccccggccccggcgccggccaacccgccgtcgtccgacccaatgcctggcggggcgccgagcgccgcccccgcggccggcgcggccaccgtgtacgacatcgtcaaggacttcggcgcggccggggacggcgtgacggacgacaccgacgcgctcaagacggcgtgggacaccgcgtgcgcggacgacggcgcgggcgtcgtgctggccgccgccggtcgctcgttcctgatccacaccaccgtcttcaccgggccctgccagggcagcgtcacgctgcaggtcgacgggacgatcgtcgcgccgagcgagccggcgacgtggccggcgaacaacaagcgcaactggctcgtcttctaccgcgccgacggcgtgtcgctcgtcggcgccggcctcatcgacggcaagggccagaaatggtgggatcttccctgcaagcctcacaaggggggaaacactcatggaccatgtgacagcccagtggcgatgcggttcgccatcagcaacaacgtgacggtgcgagggctcaaggtgcagaacagcccggagttccacttccggttcgacaactgcaacggcgtgcgcgtcgacggcctgtccatcagctcgccggcgctgagccccaacaccgacggcatccacgtcgagaacacctcggacgtcctcatcaccaacaccgtcgtctccaacggcgacgactgcgtctccatcggcgccggcacgctcaacgtccacatcgagaacgtcacctgcgggcccgggcacggcatcagcatcggcagcctggggaaggccgggaccaaggcgtgcgtggcgaacgtgacggtgcggaacgcggtgatccggcactcggacaacggcgtgcgcatcaagacgtggcagggcgggtccggctccgtgtcggcggtggcgttcgagaacgtgaggatggacgcggtgcgcaaccccatcatcatcgaccagtactactgcctctccaagagctgcgagaacgagaccaccgccgtgttcgtcaacggcgtctcctactccggcatccggggcacctacgacgtgcgcggcccgcccatccacttcggctgcagcgacgccgtgccgtgcaccaacatcacgctctccgacgtcgagctgctgccggcgtccggcgacaccgtcgacgagcccttctgctggaacgtctacggcaacgccgccacgcccaccgtgccgccggtgtcgtgcctcagctccggcttccccaactacaccgagaaaaaggacctccagtgttactga

SEQ ID NO: 70207 - DNA, 263 bp, Oryza sativa
  Clone ID: PAT_MRT4530_70801C.1
aaatgcttgctggggcaagatcaacatggagggtacattgcccgttccatatgaacaaacataaaaacacccaaaccccatattgccattttgccgatcctagcctaacttgacgaggacatcgccaatagcacattttttcaacgcctaatacttttccgcctcttctacactctttatcttggctgcatggtcaaacccgtcaatagtggcaaagagcttgcctgataggtccttgaagccctttttttggtacttgggct

SEQ ID NO: 70208 - DNA, 420 bp, Oryza sativa
  Clone ID: PAT_MRT4530_70802C.1
atggcggggtggtggcatagcgtgggggcggggcgagatggctcgagaggagttgcgggtaggtgtactgaggggtacggagtcggtggctttgatcaagacggccgggagagggatggcggcagtgcggctgatggtggcggtgaccagaaaggggtgtggcagacatggacacgattagggcgtggttggctggtacggggttgcagggagcatctccgaccctaggcgttggctaggggtgtggtgacgatggcctggacacgatcacggcggtgggcgcacggtgtccacggcggggctcagccggaggggatagggagggggatgggcatggtacgcggggtggctagcgatggtagcaattttgaggcttgggtggctcctaggaacattttggagttcggctggtggggctag

SEQ ID NO: 70209 - DNA, 349 bp, Oryza sativa
  Clone ID: PAT_MRT4530_70803C.1
tttgtttttgtgtgtgataatttgtactatatagttgatcatgattcgtgggaatcattaggttcttaactgcttgttttctagatgatatgtgctatatatgctttgtattgtgtcaataaacatatcaatgctttattagatatattaatttgaattgatgccagtaaataatttttttcaagaattgcaccgaagtatgaccaaggattaattcttaacttttttttgacatggattaattcttaacattgatgttaattaatcaatatcatttttgagtgtactctcttcgccaaaaaatataaggatgtatggacttcttaaaaggattaaaaaaaaaaaaaaa

SEQ ID NO: 70210 - DNA, 763 bp, Oryza sativa
  Clone ID: PAT_MRT4530_70804C.1
gaaaacggacaagttacaaattcagctatgaatccaactaatgtaacatacgaattgttagaagaaattacagatggattctccgaggagcgaaagcttggtgaaggtggatatggaacagtttacaagggagagcataaaaatggagataaaattgcagtgaagattcttcatgatacgcaagattttgacggcaagaaattacaaaatgagtttgggaaccttatgatagtcaaccatccaaacattgtacagttagttggatactgctatgaaataaaacatacacccggactggccaaaggaagactagctttgattgcaaccatagatagagcactttgctttgagtatatgcctcgggggagccttgaaaactatctttctgatgaagatgatggtcttgactggcccatacggtacaaaattattaaagggacatgcgagggtttaaaacatcttcatgtggaaatgaacccacctatttaccatttggacctaaagcctgccaatattttgctagacaacaacatggtgccgaaaattgcagattttggtttgtccaggttcatcactgaagagaaaacaatgatcacaaaaaatcttgttgggactctcccatacatgccacgagaatacatagagaggaaagaaatatcaaacaagttagacatattcagcttgggcgctgtaatgctagatataattgcaggacctacaggacgcttcagaagcacgaaaatgccttccctagaatttacca

SEQ ID NO: 70211 - DNA, 690 bp, Oryza sativa
  Clone ID: PAT_MRT4530_70805C.1
cggacgtgcggacgcgtgggatccgagcggcggcacgcgaatctcggcgatatgggcgcggccggcgcgggcgcgggcgcgatccggcgggcggcgtgcgcggcggcggacagggcgtgcgcggcggcgaggggggcgcggcgggcgctggcgcggttcgcgccgcggccgtcggcgttcggcgccgcggccgacgcggaggccgcggcggtgcgcgccgtgcgcaacctccgcacgttccggttccactacgccgcgctgcagtgggcgctcctcctggcgtcgctcgcgccgcggcacagggcgtccatgctcttcctcatggcggcctccaagggcctcctcctctacggggggctcctccgggtgttccccaactcggcgctgctccgccgcctcctcgaccgccgcctcgtcgccctcgtcttcgtcgcgctcgtcctcgccgacctcgccgccgccggcgccatcgccaacctcctcgccgcgctcgccgtcggcgtcccggtcatcgtgctccacgcctccttccgcgtccgcgacgacctggaggggccctcgctgccgtccccggcggcggagaacggcgaggaggagacggcggccgtggtggagaagaaggaggacggcgacgtcgaggcagggccgacgcggcggtccatggcggcggcgccaagatcgccgaagtga

SEQ ID NO: 70212 - DNA, 369 bp, Oryza sativa
  unsure (1)..(369): unsure at all n locations
  Clone ID: PAT_MRT4530_70806C.1
nnnnnnnnnnnnnnnnagggaaaagggnnaannaacanaggagnacagcaggaaanaacaanaaaaagagagcanggaannaaagccgcngcnccaannaaccanacgcagcannngannacaggaanaccaaaaaacnacnaccgangacaggnannaannannaaaaagcacaggnncagannanngcgacaaaagnnnnnganacccgnaagannggacgcnnganagccaaaccacacncagaacccnaaanangcanacggaggangnccaancggaacnncagccaccaccagaagcagancagngcgnggaggccnngacgngaaggcncncagaggcacccccgccgagcacagcaacacc

SEQ ID NO: 70213 - DNA, 1365 bp, Oryza sativa
  Clone ID: PAT_MRT4530_70807C.1
atgggccgactcctggttcggccgaacctcccctggcaccgttggatccaggttttggctggacggcgtggatcactccccaatgatggtttgagggcaattctgaccattccaactgccacaaccgtcattggcagactatataaggatttcaccttctcacttcactcacacacctcaagcaatagctctctcatttctctcaagtttagtttagtagtatctagctggtggaataggaataaagtagaaatcaggagtccggaagagttcgggatcaaatcaactggcacgcctttgaacccaagagcaagatttaggacctgcactggagttaagcagacctcccagggcagtgtgtttttttcgcatcaacagttatgtaggaaaaaccgtgcaccctctgcccaccctcaagatggtgctcatgttggggccaatcctagcgctgcccgactttaccatgttcaccattgggtgagtaaacttctcagatttgattttatagtgaagtacaagctaggtcgcctctatgtcgccttcgtcgccctgtcacaccacgcacacaacgatgacatgccagccctccatggcatgtccccacaaagcttcaacctcgtcaacgagctccaagtggagatgaactccgacctagtgctttacgctctcatggatgaactattggctagctctctcgccgcatcgtgggcgctagttgacggccttggcacattccgatgctggctatatgtgccatcctcgtcgcccctcctagtgtcgattgtggacggtattcatgtagacagggatgagggcatcaagaagatgttgcaccaattcaacaagaacttccgcacgccgcaagctcgctgggtgattcaggatgaaatcgctgtgtgcctcccatataaatgcaataagacaaatcaactacacccagctggtcgactgctaccattgccagttcccactgcctggcctactactgttgccatgatttcgttgagggaccggctgcgacactggcttcggtcacaccctttgttagaatacatgtacaacatctcctaccggacggctcttaaggaaacgccattcaagatcgtctactatcgtgatccgccgaccatcctttcgtacgaggccgtggacaccaaggtggctgtggtggcatacagcaaggctgcacatgatgaactcctggccgacgtccgcagcaaacttgaacatgcacatatggtggccaagaaggcatacgatcgtggccatcggcccctgtgccattttctgttggtgattgggcatggccatgcctgcgccaccacatgccgacatcactcaccgaaggccagaaggggaaactaa

SEQ ID NO: 70214 - DNA, 505 bp, Oryza sativa
  Clone ID: PAT_MRT4530_70808C.1
accgttttcaccaccaccgcgccgccctccccttcggtctgcgccgccacgccaccaccgtggcggggggatgggatgtcatcggccggccgccaccgccggggggagggccgcgcttccctcgctctccttcttcctgcgccggcctctccgcctccacctctcgttccccacatctccggcggccgtcgcgtcgctttctttccaagcagctcgaggagatgatgcatcatcagtatttctgcaaacaccctcggttgctggtgttctaagccttgtgataatagcatcctttcaagtgcttggctctgctgaaggccataagacggctgtaccggcgatcttcgtgttcggggacggcatgctggacgttggcaacaacaactacttgccgtctgacgccccccaggctgactacccctactatggcatcgacttccctggctctgagcccactggaaggttcagtaatggatacaacatggctgacttcattggtaattaa

SEQ ID NO: 70215 - DNA, 179 bp, Oryza sativa
  Clone ID: PAT_MRT4530_70809C.1
cttccacagccacgtttacccacggaggagaagtgtagttcggggcagttcacgtcccagtcccagtaccacagagctaccaccagaacgcgtgttataaagccggcagaatccgttttaggtcggcttgcggataaagaataactaataaatataatgccacacccaattgtgtgtgg

SEQ ID NO: 70216 - DNA, 2240 bp, Oryza sativa
  Clone ID: PAT_MRT4530_7080C.1
ttaggctgcaccgtgctgcagcagcgaggtgggagtcccggcggcggcgtagagcggcgccggcgacgggagcggcgcgcaggggctctgccggggggtcgccgtcgacccgagcctcagtggcccggcgccgccgcgcggagtcaggctgatctgctccatcacccggaactggagctccggcgggtagtcgcggacgcagccgatccgcggcccggcgccggtggtccaccggagcgacagctgcttcccgagctggtacgagttcatggtcatcctggagttgagccggcggaggatcttctcctgcggcaccaccaccgcctcctccgcctcctcgccgccgcggaacaggttcaccttgcagaagtccaggcggtcgccgaacgacccggcgtcctgctccgccacgcccttggccagccggctcttgtccagcgtcagcctcggcggccgcttgcgctgcaggcggttgccggaggatgacctcttcatcaccggcgtggctggctcaccgccggtggtggagggtggcgcggcttgcgcggccacggtggtagtgccattgtcgtcggccgtggcgtcttcttccttctcaggctttcctggctcggttggctcgagctgggagcggccactcctggacctgagacactcgtcctcttcgtcttctgatgggctcaacttgatattggcaagatctacgtttctcttcttcagatacatcatgaattcgcggaagtttgcctccgtaggacggtagtgcccgctatgtggccagacagcctgagaaaggtggataactgaatcagaaaaggtgtctttgctgctgtgcagaccaagaaataaaaccacataatctgcagttccatgcacctttaggattccattatctacaactagtctcccggcagcagatgtggctccaccagcaaggaagctggagtgctggaatgtgcccttgctcttctgcaagaatgtatccatttcatcagtgataggtgacgtttcactattatggttcatgtactgaatatgtactattgacaagtgacaaatgccaatattcactaactgcttaatgctcaaaaaaggtaccgtgccaatgtatagaactcttgttgtgctcaacacgaagatccatttcgaattcttggggccctcagaagtgtcgacaatcttgcggctcatcttgtacagcagtttcttgttctcaattactacctcatagaactccctctctttagggccaagatacctgatgcattgctgcaacagcttccatctagggcagtggtcctccatacttacgtcttttccttcacccacatccaaccagtagaagaaaggttgtttgctttcgcagtgaagccaatgttggtagtagtaatggaggttgtgaccataccgatgccgagggtcaatagcttcgagccagtgctgcaaagcgagcttctgagccttttcatccttcgacagacctttacctaccttcgcagctttcgttctagcccgagaccaccttgagagggcagattctggcttctcctcctcaaaaaaggatactgaattgtgcttgagcagtgcgaaatctatcagtttccaccagcgttgttcaacaagaacagcgcaatcagcaagttgccgcctagtcctgaagctcttgtataccttctgcactcttactgctgcggcctggtgcttcgggctgatcatcccaaccactggagaatgtggtggcaagtattccattgacccatatcttggtaggatagtgcgtttatgggtgcaactcttctccttgccgggtttaggactcatcaaggatactgtagtttcaacatgaaatggatcaccctcactttttttgaagttaaaggattcttttatgataggcctttgggaactcagggagtcgagtaatgccggtggtgactcaaaggtctcaatggtgctgagattgtcagagctgagagaccgaacaaacatctggtctgtgtcctcttccgtaggcaggtagtcatctggcgggtatgagattgacaggcccatttcctgactgaaaaaatgcaataacgtgacagttttttttgtttgctttccgccctatagtttcttctgataagccttacttctgtcgctctggagctctagctcaaagggtacagcaccatccacccaacagaacctcctgatgagaggtctgcgaggaagaaagctaaaaggaatcggacgcgtgg

SEQ ID NO: 70217 - DNA, 315 bp, Oryza sativa
  Clone ID: PAT_MRT4530_70810C.1
cctaaataatattattttcttttttaacaagttgtacttaaaaggaaatttggattcatgctccaggcgactgggtgccacttctggtgcacctgcggaccctttgagaccatcgctaacaaacaacccaccatgaggggaggccaaaccttgtttgttaaaacataagcccttgtctttatgcaaatcccaagggaaccggctctccgaaagttgggggacaaaccaccccttcttattttgcaaaggcaacacgctggtcttgatcttgggcgacatataacccatccactttgtcatctcctggaaaacaca

SEQ ID NO: 70218 - DNA, 651 bp, Oryza sativa
  Clone ID: PAT_MRT4530_70811C.1
atcttaagccattgaaacaacagcagctcaatcccaacatatttactcttcttaccttctccattgcatatataatagacacagctagctttgttgtaccattgaatcaatcatcaattttgcagcaatagctagacaatcagcgagacaaagtcacaaaaccatggcttctgcagatgctatcctgtcttcgcaggtggccggtgaatgcctgaagatcaacaagctggcagcagcaagcccagtgaaagtagtgcaggtgcagaagccgagcaaagagacgaagaacatcagcggtgcacctgtagctgccgctgccgtcagggtggttgtgagcaagcaagtgatgaagccacggtttgccgtggagctggatgggctcaactgcttcgagacacttgtccctcgctgatgatatcatgaagcgcacacacgagctgctagctgtgttccatctgatttgttgattttctggtcttatttttgcggggttatattatatttgttcaaattttctatgagttggatcctttcgcacacgcgattatgtattttctttctttgaagtgatatgtgtaatttgctcttacgagtgattccgactgtgaagtattatttgatatataaagatatacgtgctattgatatctc

SEQ ID NO: 70219 - DNA, 414 bp, Oryza sativa
  Clone ID: PAT_MRT4530_70812C.1
atggctatatgtcattggtttaaatttgcacactcatgccactactgtgttgactgtgtattgactgttaattctaagtacacaggagagtcgcaaggacagattgaggttcattgtgtcgtcaaatatggatacatggatacatgggtcacacctccaggtgtcggccggatctgggcgatgcttgtgcgatcaacgaccgcggagatcacggtccctctttgcccatcccttcttacccttgtgcctcttgtcctcggcctccttctgagctttggccctctcatcccggattttcttctcggccgctgcctgagccttggcgcacaacctggtatgcacctttatgaagcgcacccgtattcgccggccttgagcatcccgcacggacaggtccagaagagcatcgtgtga

SEQ ID NO: 70220 - DNA, 135 bp, Oryza sativa
  Clone ID: PAT_MRT4530_70813C.1
cagctatgatgaataggtgcgatctagggtttcagatgttgacgactatgtcacatatcgtccttacctcggttgcgggtgttgctattgagcagcctaaacatcctatgaagcaccgaggactctctcacgaac

SEQ ID NO: 70221 - DNA, 911 bp, Oryza sativa
  Clone ID: PAT_MRT4530_70814C.1
ggcggctccgcccccgccccctcggcctcctctcccgcccttccaaaccctagcccgaggcctcctgccgcgcatcgcggcgcggcctgtgccccgccgcttctccaccgcgtcctgctcctccacgctcttccgcgtgggggaatgcggcgcccccggcgccaccgccatacccgaggcggagcgaggcgaggaggaggagcgtgagggggaggatggaggcgaggccgacgcggcggtggaggtggcggcggggaggcatgacacggacgcgtacgcggcggtggagctggcgctggactcggtggtgaaggttttcacggtgtccagtagccccaactacttcctgccgtggcagaacaaggcgcagcgcgagagcatgggctcaggatttgtaattccggggaggagaatcgtcacaaatgctcatgttatagcggatcatacctttgttctcgtgaggaagcatgggtcgcctactaagtacaaggcagaagtccaggctgttggccatgagtgcgacttggctcttcggaaagttgatagtgaggagtattgggatggaatgaacagtttggagcttggagacgttcccttcttgcaggaagcagttgctgtggttggctaccccgcaagggggggacaacatttctgtcaccaagggtgtggtctctagagttgagccaacacaatatgcacatggtgctactcagctcatggccatacaaatagaggcggctatcaacccaggaaacagcggagggcctgcaattatgggcgacaaagttgctggagttgcttttcaacaatttatcaggggcagaaaacattgggtcatattataccggtgcctgtaattaaacgtttcatctctggagtggaagcagcagcggtaacatattctggttttt

SEQ ID NO: 70222 - DNA, 147 bp, Oryza sativa
  Clone ID: PAT_MRT4530_70815C.1
taagagcccacgcttcatggggacagagcggaccttaggggcatcaagggcccatatggaggagaagcaggagaccggagatccgttgttctcgccttggaccttctgggccctatttataggcggaggagggtggaggcttacgtc

SEQ ID NO: 70223 - DNA, 506 bp, Oryza sativa
  Clone ID: PAT_MRT4530_70816C.1
gcacgaggcgacgatggtggcgctcatcaggatcaccggcggccggcacctgctgctcgtgctcctcacgctgctcatcttgacgacagcgctgcaagagggacacttgatggcctccgccgcgaggttgctgaactggtgctcaaatcaagagccaggaataatatgcggccacccttatcgacacggagctggtgagcggcaggcgaggagccaggccgggacgggcaggggcagaggcggctggcaggcagtgtgcgagggcggaggcggctgccgacagcggatggtggcggaggcggctgccagtggtgggcgtgggcgggcgcgaaggcgtctgccggcagcgggttggggcggaggcagcggcaggcgacaggcgacgggcgggggtggaggcggttgctggcggtgggctgagaaggctatgccgatctccgtcccaccgagctgatggcaaaatggcatccccttggcacaatgcctaaaaaaaaaaaaaaaaaaaa

SEQ ID NO: 70224 - DNA, 2889 bp, Oryza sativa
  Clone ID: PAT_MRT4530_70817C.1
ttttgtttgaacaagttctctttcatctgttataaaccaaaatcagcatctgcctcatagattgacaggtgctcgagatatgagatcatatgtagttccacaaaattcgtcaacggatcatatctccaagaatgtgtcagacaaaaaactagatacagatcaattgcacagtatcatccatcataacctctctctctaactgtctacccctctgtacttctatcccgactgttgacaacatgcctacaatttgtttttttgtccaaccaaaagctatatttccttcctatctgtgggagaacaacaacacgatatgtaatgaggtatacaccaatgctagaagcttaattagtttttgcaggtcgtatcacatgatagaaatcaagcagccaatgagtgtttttcttcagcttctcactccctcgaactctcttcgtatggtctctagcaacatctcattccatgtatctacaggtcctggcatgcaccaatgtaggcaatcctgaggtggaggccttccatctggacctctttgcgtcttcttgtttgggtcagtacttctatatggaccaggatgcccatcaggcctcagggcaaagggctcagtgatgtccatcaatttcaacctggaaccatgtttcccagaattctgcactgcttttgtgaaccctgaaacctgctttccatacatggtgtccgtgaatccattcctcaccaccacatccaagggcttagtctttccagtgcatgatccaccggtattccaagccccaccttcataatgatctggtgaatatgtgcgcacgatagctatacctgtgaaatttggattggtagctagagcagttaggcatgtctcaacagatataccaaaagcatctttggtattgatctccccagtctcgctcgaattcacgccgccactctgaacaccgtgcacaacgggtacttccttgccaccctgcaacacttcctcttgtaatggaacaccaacggcagtaccattcatgttcccatcagtaagcttggatgaatcactaggtctgacaaagaggtactcgtgtagcgatgccccggtcagagacgagcccaccgatagcgatatcactactagggttagcacaagagccaccaccgacacgacgacggtggagagccaccgacggatcccgcccgcaccggccggggccttcctccccggcggactcatggcggcaccaagatccaaacgccacgaccactacgcatcaaagaaatcttcgagacgaggtggctcggcggcggggaggagaccacgagggatcgatgagaaaaatgggggaaccgatcgactccgccctcgctataattttcataatccttatcaggtcgaccatttccttgacaattctgcatctgcgtgatgatcgggcaagagttgtttgtgtatagtggtccagaagaatcaaaaacccaatgtccatggtatagatcacagctaccttcattagtcttctgaagattgtcggatgaatccgatgagacagggagatttctctcatcaggcactgacgcggtatcatcggtaacaactggatcttgtactttggtatcgatttcacccgtctcgctcgaattcacgccgccactctgaacaccgtgctccacgggtacttccttgccaccctgcaacacttcctcttgtaatggaacaccaacggcagtaccattcatgttcccatcagtaagcttggatgaatcactaggtcggccggggccttcctccccggcggactcatggcggcaccaagatccaaacgccacgaaggcgtaaccgatcattaggcagaggaaatagccgtcagtcaagtcctttccatttgctctgtcatacctgaaactgaaagcaacaagtagtcctgggaaaagaatgtccccaaatccgatcatgtcatagccattccatgtatcaaactcctttggcatcttcagaaccatgggaaggctaggtccctcatcgctaccacgagcaacctggagaccactgaggcagaacagcacaaccagcagccatgcagaccaggtggatttgaagaagaacaggaacagcaggacaagcgacgcggtgacgatgaacacgagcgcggttttggtctgcagctccacgatttcagagtcagcagcttcttctccacccagtgtaggagcattcttatcctcgtcgccgacgacgacgaaggaccaaacggacgcacaggccacgctgccgacggccatcagccagaggaaaggtatagcgccatcgaaactcggcttctccggcgcatacatcagaatgtcaacctttgccccaccgtccatgccggagaggatcttgcgaccggcagactgggataccatcacgaccgggatgccaatgttagggaccgtgtcgttctgggtgcacaccatcttctgcaaatcgtcctcgtcgttgatgaggagcagcgcggcggcgccgccggactccgccgtcttggccttctccaggaacgtgcactccccgcgctccgccacggcaatggagctagcaagcggcgcggatgacttggcgcagccggtcttcggggcggggaccacggccttccgcttgtcgccgtcggagccggtggccggcagcacctcgccgaacctcgccgtgatcccggtcaggctgctcctctcgtcgccgtccacccagtacgtcaccttcaccttctggaaggggttgtcgcagccggggaacttgggcgagacgccgtcctcgaactccgagtccgcgccggcggcgcccggcacgcgggacgcgagcaggaggacggagacgaggaggtaggcgaggccgcggccgcggcggcgaggggaggaggaggagggtgcagggaacgccat

SEQ ID NO: 70225 - DNA, 389 bp, Oryza sativa
  Clone ID: PAT_MRT4530_70818C.1
cacacttgcacacatgtatatatcctaattttcatcatggtaccaggctacattttgacagaaacagacacacccacaacttgcaaaaaagtgcaagcaacagacattgcaatgatgttttctcttacttctttcatttttagggtttgcttggactttgccatcacagaaaaatattccctctattcaattataaatggcaccagacagtactcatatttaaacttgaactccttgtttttttttccaaaaaaagaataaatcataaacacttaaaatggtgttatatctagactaatataaaaggcacgagttgtttggtgggattaacactgcgattagcgcttctcaatccttctcttcaccaaatcgccaaaaaaaaaaaaaaa

SEQ ID NO: 70226 - DNA, 201 bp, Oryza sativa
  Clone ID: PAT_MRT4530_70819C.1
ttgcgccaaactggcaatagtgcgcgccagaaagggtttggtgtagtaaggagtgtgttgtgatatgtgcgtgaggcacccatgcctgatgcaaggtgtgcctgtgatatgtgctgaggacacaggaaaatatgaaacatgtggtgcaatatgacaagggggactggggatgtgcacaatacaatggggtgtggccccaag

SEQ ID NO: 70227 - DNA, 5910 bp, Oryza sativa
  Clone ID: PAT_MRT4530_7081C.1
atggccgagcaagcaaaggtgcacgacctctctccgagtgtgagcggcgacgacggggagccaaacccacgccgtcgagcccgtactcccccacctcctccacaccaaaatcctaagcagggggaggcactcgagagagtcgaaaaatccgcagcatcgccagtcgcgggtggtgcaggagaacggcgagatggggagcgtcgcctcctcgtctacggtgacggcagcacgcctcagggcgcgcttcaggctgttggcgcgctcctacgtcacccgcctgtcgtccctgacccggaatctccagcccagcgatggctggacgacgtggccaacttggtcatgacggcacagcagcgcctgggtgctggtggacggtccgccaccaccaagacctccggcgccgccactaccggttccgcgtcgtcaagacggagggcgcggcgagcggcggctgttgcacgccattcggctgccactccctcgtcggcacctccgactcgggaggatcggcatggagagccggatgcccgcctcgacatcgagcgtcggcgtaatagccggcgtactccccacgcaacggagggcgcctcttcgtccagagtgtcacctcgacagggacgtgaggaccagccctccatgcccccggctggtggtgtcggctgtagagcctttgtggcgagtcttcggaatgtccgttggcccccaaggttccggcccaccatcaccgagaagtatgacgggagtgtcaaccccaccgagtttctccaggtctatacgaccgggattgaggccgctgggggtgacgacagagtcatggcgaatttctttcccatggccctgaagggacaggcgcggggttggctaatgaacctgccacccgcgtcggtccactcctgggaggatttgtgccagcagttcaccatgaactttcaaggcacttatccacgcccaggtgaagaagcggacttgcacgcagtacagcgaggggatgatgaatcccttcgctcgtacattcagcgtttctgccaagtccgcaatactataccttgcatccctgcacacgcggtgatctacgcgttcagggggggcgtgcggcacaaccgcatgctcgaaaagattgcctccaaagagccccagactaccgcagagctttttcagctcgcggaccgagtggctcgtaaggaggaggcctggacctggaacccctccggttccggtgtggcagcttcggccgcccccggatccgccgctcagacagggcggcgtgacaggaggaggaagaaaaggtcggtccattccggcgacgagggtcacgtcctcgccgtcgagggcgttccgcgggccacccgaaatgggaggcctgcgagcgacaaaaagaaagaggctggtactcccagcagggagcgcccagccagcaagtggtgctccgtccacaacacctccctccacgatctcgcggattgtcgcgcagtcaaaaacttggctgagcgaacgaggaagtgggaggaggacaggaggcaggaacgccgtgagggcaagtccgcggcagttccctccggtaaacggcgaagtgaggccaaacagaaggcccccgccgttgacatcgatgacggtgatgatgacctaggtttccaagaacctggggccaccattgccactgttgacgggggagcgtgtgctcacgtttctcgccggagtttcaaggccatgaggcgagagcttctcgccgcggcccctactcatgaggcgacacgtcgggcgcggtggtcggaggtggccctcacctttgaccagaccgaccacccaccgccccggggatggtgcttcagccgtcttaaccgatcatcgttggtacgcggggcccacatggccgccaacttccgcacggagcgggtgaacttcgatgtggcggacctcagtctgccctacaacgcggtcctggggaggcctgcgttggtgaagtttatggcggcggtccactacgcctacctccagatgaagatgccgggccccggtggccccatctctgtccgtggcgaccttaaagtcgcgctcgcttgcatggagcagcgcgcggaccacctcgctgctgcgaccaagcccgagggtggtgacgagaggcttggcacctccgcccccaccgccccgaggcagcggattgccacatgcgacgaggtcccggaaggcgcgctcgtctccttcctgcgggcaaacgctgacgtcttcgcatggagaccagcggacatgcccggggtccccagggaggtgattgagcaccgtctcgccgtgcggccgggcgcaaggccggtccggcagaaagtacggcggcaggccccggaacgtcaagccttcatccgcgaggaggtggcgagacttctggaggccggattcatccgtgaagtcatccatccggagtggctggcgaacccggtggtcgttcccaaggcgaacggcaagcttcggatgtgcatcgactacaccgaccttaacaaggcatgtcctaaggatccttaccccctgcctcgcatagatcagatcgtcgactccactgcggggtgcgaccttttgtgttttctagatgcatactctggttaccatcagattcgcatggctagggaggatgaggaaaaaactgcgttcattacccccgtaggaacctattgttatacatcaatgcccttcgggttaaagaatgcaggtcctacttttcaacgtactactcgaatttctttgggtagccaaataggacgtaatgttgaggcttatgtcgatgacttggttgtgaaaacgcgcaaccaagaaactttactttcagatctagcggaaacttttgagaacctccgctccgcccgcataaagctgaaccccgataagtgtgtgtttggtgtacctgcgggcaagcttctcgggttcttggtctctgcccgaggcattgaggccaaccccgagaagattcgagctatcgagcggatgcgcccccccagcaaacttagggatgtgcaatgcgtcaccggttgcatggccgccctaagtcgtttcatatcaaggctaggagagaaggcgctacccttgtttaagctcctcaagcgctcggggccgtttacttggacggaggaagctgaacatgcccttactcagttaaaggcatatctcagctctcccccggttctagtcgccccggagccaaatgagcccttgctactttacttagcggcgaccccccaagtagttagtgcagcgttggttgtggagcgcgatgaagacaatcctcatttcgtgcacccccattctgtgctaacttggcccgggagcgagcggggagcagaggcccccgagtcggacggtggcctacggccccagacgaccggagtcggccctctgcccgcttgtcagacggtgctaagtgcccccgaccctcaggagggccccaaggccactgcgggaaggccgcacttaacgccctttggccccgaggctaaccctgtgctgactcgacccgggagaaagcagggagaagaggcccctgagccgaacggaggcctgaggcccctgacgaccggagtaggccctttgcccgcttgtctgacgacgccaggggcctccgacccccaggacggccccgaggccactgagggaaggccgcccctttcatcctccgaccccgaggtcatcggcacagaagacaagtgcgccccgaaaggccacttgaatgaagaacgccccggggatacggcccctagcaaagaggatcggccccaccgaagggtgcagcggcctgtctactttgttagtgaggccctccgggacgctaagacccgataccctcaggcccagaagatgctttacgctattctgatggcctcgaggaaactgcgccattattttcaggcacatagggtcactgtggttacgtcttatcccctcggtcaaatcttgcataatcgagagggtacaggacgggtggtaaaatgggcaatcgagctttctgagttcgatctgcactttgaaccacgccacgctatcaagagccagaccctcgccgattttgtggcagagtggaccccggctccagagaccgtctcaatccccgaggccagcacgaacccctcgcagctgcctcacaccacccactgggtgatgcagttcgatggttctctgtccctccagggtgccggtgcgggggtcactttgacctccccgaccggagacgtccttagatatctggtccgcctcgactttcgagcgaccaataatatggcagagtacgagggactccttgccggactcagggtggcagccggactggggatccgccgtctcctggtgttaggcgattcccagctggtcgttaaccaggtctgtaaggagtaccggtgctctgacccgcaaatggacgcctatgtacgccaagtgcggcgtatggagcgccattttgacgggatagagcttcggcatgtgcccagacgggataacatgatagccgacgaactctcacggctcgcgtcctcgcgagcccagaccccaccgggcgcctttgaagaaaggcttacccagccgtcggcgcgacccgaccccttaggggagacggatgcgcctgaccggcccccgaggcccgtcggagtccaggcctcgggacccgaagggagcgctccaagctcccttagattgattgcttggatctctgagatccaaacatacctcacagataagactctacctgaggaccgcgaagggagtgaacgcgtacaacgcatttccaaacgctacgtgctggtagaagggaccctctatcggcgcgcggctaacggaatcctcctgaagtgcattcctcaggaacaaggcgttgagcttcttgctgacatccatgagggcgagtgcggagcccattccgcctcgcgcaccctggttggcaaggcctttcgtcaaggattttattggccgacagccctcaatgatgcagtcgatctggtccggcgatgcagagcgtgtcagttccacgccaagcaaatccatcagccggcccaggccctgcaaatcataccactgtcatggccatttgctgtctgggggcttgatatcctgggaccgttcaaacgggccccgggcgggtttgagtatctgtatgttgcaatcgacaagttcactaagtggcccgaggcttatccggttgtcaagatcgataagcactctgctcttaaattcattaagggcatcacggcccgttttggagtgcctaaccgtattattacggataatggcacccaattcactagtgaactcttcggcgactactgcgaagacatgggcatcaagctctgcttcgcctcacctgcccaccccagaagcaatggccaagtggagcgcgccaatgcagaaatcctcaaaggccttaaaaccaagaccttcaatattctcaagaagcacggcgattcatggatcgaggagttaccagcggtgctctgggcaaaccgaaccacaccaagccgagcgaccggggaaacgccttttttcctcgtctacggcgcagaagcggttctcccatccgagctcaccctgaggtctccccgggccaccatgtactgcgaggctgatcaagatcagcttcgtagagatgacctcgactacttagaagagcgaaggcggcgcgcggccctccgagccgcgcgctaccagcagagcctgcggcgctaccatcagcgccacgtccgggcccgatcactctgcgtcgacgacctcgtcctacgccgcgtccaaacgcgtgctggactgagcaaactctcaccagtgtgggagggtccgtatcgagtgatcggcgtcccccggccgggctccgttcggctggccacgggcgacggcacagagctgcctaacctgtggaacatcgaacaccttcgtcgcttctacccctag

SEQ ID NO: 70228 - DNA, 360 bp, Oryza sativa
  Clone ID: PAT_MRT4530_70820C.1
atggacaggttcgccgcccttgtctccggccgccgtgccgcatccgccgccgcagccgcggccgccgaggtggaggtggaggaggagagggaccaggcgtacctccgcatccggctcgaggagatcgtcatcgtcaagaacgacgcccacgacgacgccctttccgccgccgcctccgcctccgcggcgcgtgtcgccaacaacggcggcggcgccgtcgccgcgtcgtcgatggagaagaggtgcgcgtgcggcgacgccgccattgacgccgcccccgcgctcggctgggggtcggcgacagcggcggcggcgcggggcgcgtggacgaccgtgacgaggatcgtcggcctcgactag

SEQ ID NO: 70229 - DNA, 1346 bp, Oryza sativa
  Clone ID: PAT_MRT4530_70821C.1
atggtggcgagcgagacgaaccagaaggcggcggcggcggggagcagcatcccggagggggcgcggcagctgctgcacgagctggcggcggggtggggcgacgtggcggactgccgggcgctggaggtggtgccgctcaggggggccatgaccaacgaggtctaccaggcgcggtggccgccggcggcggaggcggaggcggcggggaggagggtgctggtgagggtgtacggcgagggcgtggagttgttcttcgaccgggaggccgaggtgcgcacgttcgagtccatgtcgcggcacggccacggcccgcgcctcctcggtcgcttccccaacggccgcgtcgaggagttcatccacgccaggacactctcagctgttgatctgcgtgatccagagatttcagccattatagcctcaaagctgagggaattccacaaccttgatatgcctggtccaaaatctgtactcatttgggacagactaaggaactggctcaaaactgccaagaatttgtgcccctctgacgaagccaaagagttctgcttggatagcatggagaacgagatcactgcgttggaaaatgagctttcagaggattaccagtgcgtaggattttgccacaacgatctccagtatggaaacatcatgattgatgaagagaccaaattgctgaccatcattgactatgagtatgcaagttttggtccagttgcttatgacattgcaaaccatttctgcgagatggctgcagactaccattcagaaaagcctcacatactggactacactaaatatccagatactgatgagcagaagcaatttgtgcagagctacctgagctcttcaggcgaggaacctgacgcagagaaggtcaataatctgataaaaagtatcgagaagtacaccttggcaagccatctcatttgggccctctggggaataatttcggagcatgtcaacgatattgacttcgactacatggggtatgcgaggcagaggttcgagcagtactggctcaagaagcctgcaatcctaacatgtcaggtcgttgaataagcacctgcataacatcaccaggttctaccttgatggatatccaccggccgctgcacatagcttgtttatacataggggatgtgaaaggcttaaccagagatcagtgagatccaggcttctgttgtccttgtatagctgttgggttgttcatagtctggatgggagacaaattaataaatcttactacaaactctcaagggatgtatcctccttgtttgtatgtcatttaaatgattataaagaatattaaaaaaagatcaataagatagattaatatgtgatagatc

SEQ ID NO: 70230 - DNA, 485 bp, Oryza sativa
  Clone ID: PAT_MRT4530_70822C.1
ctccgtcgtatccgaccaaatccagcgcaaaatccatcatgcgcctcccccccctcgcggcggtcgtcgtcttcgcgtcgttctctcggagccccccctcgcttagattggataggatcgcgccaatcgcggtctcgtcctccatggcatctgcccccccccccctagatttccgtaggaggtagctatctagcttgctgccgcccgtcgcatgaccacgaccctcggatcgtggtggccgttggctccccgattagcttctcccattgccgctcctgtaggctgtagccccagccgatatgcttgcgttgattttgattctgtgccgcctagcgacccgcctctcttcatctagggttcaaccttcgagccggcttctcagttgctgcaagtggaggcggcaagctagagacagcaactgcatatcttgcaagaaaatcggttttatggccataccgatgattttcttgcaagctgtgcagttg

SEQ ID NO: 70231 - DNA, 246 bp, Oryza sativa
  Clone ID: PAT_MRT4530_70823C.1
tcattgacggtaacaacgacgatagcgttttcttgcagtggcgtcgatgaaagccggctccacgatgacgggtgaccgctgttctccgcccacggtctccaccggcatcccttcagacgccaccaccctcccccccccaacccttgccgacctgctccacccaagccaccgtgacgccgctccaccggcttcactggcgttcggctctccaccgccggccccgtcactctgcgaccccctcgccat

SEQ ID NO: 70232 - DNA, 456 bp, Oryza sativa
  Clone ID: PAT_MRT4530_70824C.1
atggcccgggagatagccgccgtcgctgtcgattcccggctctggctggaccgccggccaactggcctgcctgcctcccccgtccgtccggccgccgtcgccgtcgacgtgccgcgcgcttctcggccgcacgcgagttacacgcaagcgtgcgcgcactggtgttacattacatgcatatgcggcccccacgcggcacgctcgggacacatgggtcgcggccaatcccgatccgcgccgccgctaggcgccatctccggcgggtcgccgtcgctgcgcgtgcgtccaaacggcggccgccccgtcgccgtcccgtacgtgggccgcgctggcctcgccgatcgaccccgatcgcctaacccacctcagccacagccctcccgcgaaattcatcctaggatagaacttggcaaaatcgatcaaaatctcccggggaaaattcctctcccggcttga

SEQ ID NO: 70233 - DNA, 420 bp, Oryza sativa
  Clone ID: PAT_MRT4530_70825C.1
atgccaccggcggcgtcgatagggacgacggctagcatccggtgcggggcagggagaagggcgttcggccacgggcggcatagacaggggtggccagtggaccgaacggttgctatcgtggaggggcgcaaccaggaagcagccgttgaggagatccaaggcgatggcgatgaagacagtgctattggcgggagcgcgcttgggcggcgctccctgaaccactctcgtgacatcgaaaagctcgtccacctagagataaattattcagtctatggccgtatcttacgtcacgaaggacggcttttgactgccgctgaccacacctgtgaggagtggcaccctgaagacaataggacgacagcagttgcaaggcagtggggctcgaacatggcgtccttggagcagcaccgtttgtcatag

SEQ ID NO: 70234 - DNA, 1317 bp, Oryza sativa
  Clone ID: PAT_MRT4530_70826C.1
gcacgagggcgagctactagcttgctaggtgagctaggctaggtagtagttggtggtggcgcagccatggccgccgccgccgccgccgccgcagctgcggcgagcaccgctcgcggcgggcaccggccatggacggcggcgagccgtggtgttagtgctcgccgttgttcggtcgcccctgcgcaggtccgcgcgagaggcccaaccgagtggtggcctgcggcggcgaggaggaggagggcgccgcggcggcatgccgtcgcggccaaggccggcgcggcggacgcgcggccgtcgtcgtcgtcggatgccgtctcctactcctccagcatctccaccgacatgccgctctacgagcccaccggggtgtcgttcgacgagtacctcctcgaccgcgcccgcgtgttccgcgccatgttccccgacgagagcaggagccagcgcctcagcgacgaggagtggagagtccagatgctgccgctgcagttcctcctcctcaccgtgcacccggtcgtcgtcatgcagctgcgccaccgcgacggcgtgctcgacctccgaatccagccgttgaaccgtgtgcgcgccatgtgtttgtttgtttgtctgtttgggccggagggcgcggcgcagacggagtgggagctgcgtgggctggagcgcgactacgcgccggcgagcttcgacctcggcgtccgcgggtcgctctacgccgacaggagccgcggccgccgcgcctgccggctgaggggccacctcgagatctccatcggctgcgtcctgccgccgccgatgcgcctcgtgccgggcgccgtcatgcgcggcgtcgccgagtcggtgctgcagagactggccgagaagatgaagcaggacgtcgacgtcggcatcgtcgccgacttccagagattccggcgggagaaggccgccgccgccgccgccgcaacggggaagagaacgagggagaggaagatcggcgacgccagcagcagcgcgcagagcgcccggcgagcgccggacatgacgctgtcggcggcgtcgaagggggtcagcgcgccgccggggctccccgtccccgggaacgtcggcgacgacccgttgccgaaccccggcgtgaacgggccgacggcggacggcgcgttcgccgccggcgtggtgcctccggccatggagctgccaatgtgctattatgtcagcgagactgagcaaatggttgacagatttcttcagactttcagagaatgttgcccgagagaaagaggaaaaatgctcaccttcctgagaagacgcattgccctgaacctgaaaccacgaaagaattag

SEQ ID NO: 70235 - DNA, 129 bp, Oryza sativa
  Clone ID: PAT_MRT4530_70827C.1
atggaattggggacgaatggcctttacctagcctctgttatggctgcactggatagtccagttgttcagctgtctatcaagaatgcatctcagccagctcttccgaacaggcccattaccatttgctga

SEQ ID NO: 70236 - DNA, 140 bp, Oryza sativa
  Clone ID: PAT_MRT4530_70828C.1
ataaagtaacacagtcggacgtccatggtagagtgaactgtgaaaaccagggtttcccaaaccgtcgggctcggggttaccgcgccccggcgtttttctatatcgtaccccgcggcaagaccggttaccgtggttactag

SEQ ID NO: 70237 - DNA, 661 bp, Oryza sativa
  Clone ID: PAT_MRT4530_70829C.1
tagccatggatgggggcaagagagagagaagcaatgatctaaatcaagctattagtcaaagattatctaaagtttatccatacttatctaataaatatttctgttgtacacggtgtttgctctcaatagatatatctctaactatactcctttactcttaaatacaaatttttcatctacttccaatagccatcaaaattttaagtttgagttagattgtcttttaagagatggttttgtggatattgttaaggaaatttggttaaatgttgttaatgataatactacttcagagcgttggtaggctaaaattcgtagacaatttttaagagggccaaaaagactagtgacatttataagaaagagaatgtcttgttagaataatttgattttcttgataatcaactctgttaactcaagaggaccttgattctagactttatttgagggatagggtatcttgtttgctaagggaagagaaaattaaatagtatcaacgagataagactaaaatattttgaaagggaacttgaatactaaatattttcatttggtagcaaatggtcttttggcccttcctgaagcttcttccttaacgttagatgaaagccaaataagtgatatttcacaggtttctcaattagaaaataatgctttagta

SEQ ID NO: 70238 - DNA, 4038 bp, Oryza sativa
  Clone ID: PAT_MRT4530_7082C.1
atggccgagcaagcaaaggcgcacgacctctctccgagtgtgagcggcgacgacggggagccaaacccgcgccgtcgagctcgtactcccccacctcctccacgccaaagtcccaagcggggggaggcgctcgagagagtcgaaaaatccgcagcatcgccagtcgcgggtggtgcaggagaacggcgagatggggagcgtcgcctcctcgtctacggcgacggcagcacgcctcaaggcgcgcttcaggctgttggcgcgctcctacgtcacccgcctgtcgtccctgacccggagtctccagcccagcgatggctggacgacgtggccaacttggtcatgacggcacagcaacgcctgggtgctggcggacggtccgccaccaccaagacctccggcgccgccactaccggttctgtgtcatcaaggcggagggcgcggcgagcggcggctgctgcacgccattcggctaccactccttcgtcggcgcctccgactcgggaggatcagcatgaagagccggatgcccgcctcgacattgagcgccgacgtagtgatcggcgtactccccgcgcaacggagggtgcctcttcgtccagggtgtcacctcgacatggacgtgaggatcagccctccgtgcccccggttggtggtgttggctgtagagcctttgtggcgagtcttcggaatgtccgttggcccccaaggttccggcccaccatcaccgagaagtatgatgggagcgtcaaccccaccgagtttctccaggtctatacgaccgggatcgaggccgctgggggagacgacagggtcatggcgaatttctttcccatggccctgaagggacaggcgcggggttggctaatgaacctgccacccgcgtcggtccactcctgggaggatctgtgccagcagttcaccatgaactttcaaggcacctatccacgcccaggtgaagaagcggacttgcacgcagtacagcgaggggatgatgaatcccttcgctcgtacattcagcgtttctgccaagtccgcaatactataccttgcatccctgcacacgcggtgatctacgcgttcagggggggtgtgcggcacaaccgcatgctcgaaaagattgcctccaaagagccccagactaccgcagaactttttcagctcgcggaccgagtggctcgtaaggaggaggcctggacctggaacccctccggttccggtgtggcagcttcggccgcccccggatccgccgctcagacagggcggcgtgacaggaggaggaagaaaaggtcggtccattccggcgacgagggtcacgtcctcgccgtcgagggcgctccgcgggccacccgaaaggggaggcctgcgagcgacaaaaagaaagaggctggtactcccagcagggagcgcccagccagcaagtggtgctccgtccacaacacctccctccacgatctcgcggactgtcgcgcagtcaaaaacttggctgagcgaacgaggaagtgggaggaggacaggaggcaggaacgccgtgagggcaagtccgcggcagttccctccggtaaacggcgaagtgaggccaaacagaaggcccccgccgctgacatcgatgacggtgatgatgacctaggtttccaagaacctggggccaccattgccactgtcgacgggggagcgtgtgctcacgtttctcgccggagtttcaaggccatgaggcgagagcttctcgccgcggcccctactcatgaggcgacgcgtcgggcgcggtggtcggaggtggccctcacctttgaccagaccgaccacccaccgtgcgttgcccggggagggcagattgcgatggtggtttctcccaccatctgcaatgtgaagttggggcgtgtcctcatagatggaggagcggctctcaacatcctttcccccgcggcctttgatgctatcaaggccccggggatggtgctccagccgtctcaaccgatcatcggtgtgacgccggggcacacatggccgttaggtcacatcgacctaccggtcacctttggtggatcagccaacttccgcacggagcgggtgaacttcgatgtggcggacctcagtctgccctacaacgcggtcctggggaggcccgcgttggtgaagtttatggcggcggtccactacgcctacctccagatgaagatgccgggccccggtggccccatctctgtccgtggcgaccttaaagtcgcgctcgcttgcatggagcagcgcgcggaccacctcgctgctgcgaccaagcccgagggtggtgacgagaggcttggcacctccgcccccaccgccccgaggcagcggattgccacatgcgacgaggtcccggaagacgcgctcgtctccttcctgcgggcaaacgctgacgtcttcgcatggagaccagcggacatgcccggggtccccagggaggtgattgagcaccgtctcgccgtgcggccgggcgcaaggccggtccggcagaaagtgcggcggcaggccccggaacgtcaagccttcatccgcgaggaggtggcgaggcttctcgaggccggattcatccgtgaagtcatccatccggagtggctggcgaacccggtggtcgttcccaaggcgaacggcaagcttcggatgtgcatcgactacaccgaccttaacaaggcatgtcctaaggatccttaccccctgcctcgcatagatcagatcgtcgactccactgcggggtgcgaccttttgtgttttctagatgcatactctggttaccatcagattcgcatggctagggaggatgaggaaaaaactgcgttcattacccccgtaggaacctattgttatacatcaatgcccttcgggttaaagaatgcaggtcctacttttcaacgtactactcgaatttctttgggtagccaaataggacgtaatgttgaggcttatgtcgatgacttggttgtaaaaacgcgcaaccaagaaactttacttttagatctagcggaaacttttgagaacctccgctccgcccgcataaagctgaaccccgataagtgtgtgtttggtgtacctgcgggcaagcttctcgggttcttggtctctgcccgaggcattgaggccaaccccgagaagattcgagctattgagcggatgcgcccccccagcaaacttagggatgtgcaatgcgtcaccggttgcatggccgccctaagtcgtttcatatcaaggctgggagagaaggcgctacccttctctcccccagttctagtcgccccggagccaaatgagcccctgctactttacttagcggcgaccccccaagtagttagtgcagcattggttgtggagcgcgatgaagacaatcctcatttcgtgcacccccactctgtgctaacttggcccgggagcgagcggggaggagaggcccccgattcggacggtggcctacggcccctgacgaccggagccggccctctgcccgcttgtcagacggtgctaggtgcccccgaccctcaggagggccccaaggccactgcgggaaggccgcacttaacgccctttgaccccgaggctaaccctgtgctgactcgacccgggaaagagcagggagaagaggcccccgagcccaacgaaggccagaggcccctgacgaccggagttggccctttgcccgcttgtccgacgatgccaggagcccccgacccccaggacgggcccgaggccactgagggaaggccgcccctttcatcctccgaccccgaggtcatcggcacagaaaacaagtgcgcccccaaagcccacttgaacgaagaaccccccgggggtacggcccctagtagagaggatcagccccaccgaagggtgcagcggcctgtctactttgttagtgaggccctccgggacgctaagacccgataccctcaggcccagaagatgctttacgctattctgatggcctcgaggaaactgcgccattattttcaggcacatagggtcactgtggttacgtcttacccctcggtcaaatcttgcataatcgagagg

SEQ ID NO: 70239 - DNA, 2042 bp, Oryza sativa
  Clone ID: PAT_MRT4530_70830C.1
atggcctcctccgcctccgtttctcccgccgccgcctcccaccaccgcctcctcctcccctgctccccgcgccgcctcccccgcccccgcccccgccctcgcccgcgcctcctccgctccgcccgcccccgcctcgtcgcctgccacgccgacaccctcctcccctcctcgtcccccgccgccgccgccgccgcgtgcgcctccaccgcctccgccaacgggttctccgactggctgcgggagcacgggctgccgccggggaaggtggccatcctcgaccgacccgtcccctgcttccgggagggcaaggacctgccgctgcactacgtcgccgcggggcaggatctcgaggctggggatgtggcgttcgaggtgcccatgtcgctcgtcgtcacgctggagagggtgctcggagacgagtccgtcgctgaattgctaacaacaaacaaattatctgagctggcatgcttggctttgtatctcatgtatgagaaaaagcaaggacaagattcattttggtatccttacattaaggagcttgatcgccagcgaggaagggggcaattagctgttgaatctccacttctgtggaccgaaagtgaactgaactacctgaagggtagccccatcaaggatgaagttgttgcaagagacgagggaataaggcgagagtataatgagctcgacacactgtggttcatggcaggttcattgtttcagcaatatccttttgacatacctaccgaggcttttccatttgagatcttcaagcaagcttttgtcgcagtacagtcttgcgtggtccatttgcagaaagttagtttagctcgaagatttgcgctagttccattgggcccaccactattgacctacaagagcaactgcaaagcaatgctgacagctgttggtgattctgttcggttggttgtggatcgaccatacaaagcgggagaaccaataatcgtctggtgtgggccacagcctaactctagattgctcctcaactacggttttattgacgaagataatccatatgatcgtatagtgattgaggcatccctaaacatagaagatcctcagttccaagagaagagaatggttgctcaaagaaatgggaagctggctatccaaaatttccatgtctgtgtgggtaaagagaaggaaacaattgcagaaatgctgccctatttgaggctaggatacatttcagatccagatgaaatgcaatccatactttcttcagaaggtgatacatgtccagtcagtccatgcacagagcgagcagtacttgaccaacttgttggatacttggagtcacgattggctgattatccaacaactttggatgaggatgatgctatgttggcagatggcaatttggaaccaaaaaaggaagtcgctactaggcttgtaagattggagaagaaattgttgcatggttgtctccaggctgctaatgagttcataaatgatttgcctgaccacactgtgtcaccttgccctgctccatttgctcctgaattgaaataagaaaagtaaagcatgcagcgagcattaattcttgcaacatgggtgtcacttctaatggtgttctcattaatgatcacatccagttgaagtgcattagaagtgcttctttgcaggaaatctgaagcctggctgacgggtgtaatagggatttcactgcccgcatgcagatttggcgattagttgcattgcacacaagtgtgcacggatgttttgttaacctagtggcttttatattcactgagtagattctgtacattctgatgattgactgagatggtaatgccaatgtacatgttcagtctcatttgtcaatagagattctgtacatgttatatttttgggtgttggcatgatttccgccgttctcttttcatggcctgtttgatttttagctgtctgactacacagcagagaattgtatgcaacagtttactgtgatggctgccaaggaatcgcattcatttgaaatgctccaccaaaaaaaaaaaaaaaaaaaaaaaaaaaaaaaaaaa

SEQ ID NO: 70240 - DNA, 250 bp, Oryza sativa
  Clone ID: PAT_MRT4530_70831C.1
ccgcgccaacgctcggtacagcaagccttgtgctagctagccccgccccacccctccgccaccgactagttgctgtggctggcggcaacatgacttcctctcctttaccggtgcctcacctcaggctctgttgagaacaggaggggtgagggggaagatgcgaagaaggggacgaatcgaggagggcacggacgatgagccaagcaggaggagaagaacaagcttccgagcaccttcacgtccagcgagg

SEQ ID NO: 70241 - DNA, 538 bp, Oryza sativa
  Clone ID: PAT_MRT4530_70832C.1
atggacggtgcatacatcgtcagcgaaccagataaccaactcgtagtcgacaacagagtagtcttcctcctgaagtacgaactcgtcgagatcagagatgacgctagatccctcttgccgacttcccctaaagaagaaggcgatggtgagatcggcagcaagtacgccgcggcgaaagaccggtgcggcccatggcccccacaggtcatatgccgccctctgcggctgccacgtcggcgcggccccacgggctgaaagcccacgggaaaacgtcaaagggagccacgtgggtcgtgggcccgggcttccacctccgcgcgatcctaaggccggggccgcaccggcgatcgctcccggccggccaccaccgccgacgagccagctgatacgcgtgaaggttcgtgcaacggtgacgaggggaaacgaaaaaccacatgccgatcgattgatcagtctgcggaaaaatgtgtatgtgaatttgtacctgtggtctgtgtatgtgctacaaaactttgggcggaagaaatttgaaataata

SEQ ID NO: 70242 - DNA, 2443 bp, Oryza sativa
  Clone ID: PAT_MRT4530_70833C.1
tcagtggagaatggcgctggcggcggagatacttggggttgggggaaacgagggaggtaggttggcaccagcggcggatctgctcctgccgctaccagatgatgcgttcacgaagtcgtggacgatggcgatggaatcgcgtagccgctgctctaaccccaggttgagtaccttcttcaccctccagaacctgccgctggcggtggagccgtcgtcgacctccgcacgaccgcagacgctgtcggtggagccgtcgtcgtcgagccagcattgagctccgctcctccaaccgcgacgagctcgaagagcacctccatgtcgccgccgccgacgcaacaaccagcaccgcattgccctccctccttcggcacccccgcgcaccgccaggtccgccgcctctcctccttcctcgcgccccacctccgccgcaccgacgcgtcgtgcaacttcgtcgccgccgccaccgtgcctcgccgccgccgccgccatgcggatccccaccacggagacggagacggggacggggacacggattcccagccacaggcggcgcaagggatcgtccgacggttcgcgggccagggccgacgcatcccgtcgcggaccaacgccgaccaaggagacggagattcccgggcggccgctgaagcgatcctcctcaaccctatcgttggacgacgccgccggcgcctccaatccgacctcgacctgggcgatcctgaatcggtacggcgcccggagggattccttccgcggcgacgaccgcgaccgcaccacgtcggcggtctcctacacctccggcggcgaccagatctccgtctccttcgagctcgtgaagccgccggagacctccctcctcaccctcgactggccgcaggggccccgcccgtcggcgggaaccacatcctacccatacgtcatcgccgcgcacgacaacgtcgtcctgttccagatcatctcccccgacaagtacgctcgcccttccgccatcgactacttcgtctacaatgccaacagcagcagcagcagcaaccaccacccctccttgacgcggctgcccgtctcctactggaggaggagagacacccttcgcccgcgcatcatgagcagggaaggcacatgtattctgtcctgcagcaacaattctccttcgttcgttgtggctgagctcgagagaagatcatgccaatcttccgaaaccaacatctacctctttgcttctggctccgcgtccgggagagtcttcaggaatgtgccgatccgccatggcgacggcctcgctcacctgtgctggtggacaactgatgcagtgttgtcgtaccacaatcgctacatgatctgggtggactacttggtagcagggatgatcgtcgccaaagtggcacatccaggaagggttgacccaccggagcctgttctatggtacgtgccgcttcctgtcgatccagttgatgggaacccttatgacattgaccgtgggcgaggatgccctcaagcctcccgtagtgtgtgtgccacccaccatggcatcaagttcgtcaatgttaaccaacatggcggcggcagcagcagcagcagcagcagcagcagaagcttcagcatcaccctgtggtcgtggcgcgaggaggatcaaacatggggagaagatgcaacattggatgctgaccaacttcgggacctcgattctgagaaccgccttccaaatatccaacctgaattccccgttgttgacatggaaaacccttacgccgtttgcttcttgttgaacgagcgctaccacactgctgaccccaatgccacaacgtggatgatcaaggtgcacatgaagaagaaggttctactagattgtaccggatattccaacaaaggaagcccttctactgccagaaggatgtctgaggggctctccttcatctccagcgaaatgccatcttacctgtctagaaaaaccatcaaaaggtttttggaaggaccgctatggccagcaactcatgatgcgatcgagatcgaagagaatgggaagatgggatttccaaaaaaacaaaaaaagtatactggcaggggttcggaaaaagaaactccgaacctcctgcgaaaaaagaacgagagagcaacagtgttgacagttgtgccccggtacaccgacgcggaggacgagcggcatctggagaacgccatgaccagcaattcatcagctgaaaagaatcctacgaattcagtgcatgatttcggcttttcagtgtgctacctgcaggacctactaacggtcatgctctgtgacgaagcccactacaaaatggtctccaaacccgatccaggcatccagctgaaactgcagaaacatggagtagcatacacgcagcgttcgtcggatgcaaatgcagcgaccaacactccaggtcagcagtgcagaagagacgacagcagatgtaaaatcacaaag

SEQ ID NO: 70243 - DNA, 181 bp, Oryza sativa
  Clone ID: PAT_MRT4530_70834C.1
aagagggcagcgacaatgaggtcacctttgaagctcgagggcgagcctcggcggagggcttggtgaaggcgactgcggcgaaggagaagggtaggggtgtcagtgatggtgaaggggaggagcccgatgcgagggctgtgctaactggtggcaatggtagctgcgacgatgaccagctgct

SEQ ID NO: 70244 - DNA, 205 bp, Oryza sativa
  Clone ID: PAT_MRT4530_70835C.1
atcatacatctgttcacttaagccaatattcgagccttttgtcatgttacatcaaattgcattcttcacttaaataaataaggttactcaaaaaaatgctttcgaagcaacaaatctgacaaaactgcaaaagttcacccttaagaagagggatatatatatagcattggttctgcgcttgtgcgtgctgaagtgctccgcatga

SEQ ID NO: 70245 - DNA, 246 bp, Oryza sativa
  Clone ID: PAT_MRT4530_70836C.1
atgagcatgataacggtgaaggtgaagacgctgacggggaaggaggtggaggtgagcatcgaggcgacggagacggtggcgaggatcaaggagcaggtggaggcggcggaggggatcccgccgccgcagcagacgctgatctacggcggcaggcagctcgccgacgacatgaccgccgagatgtgcgacctcaggcatggctccgagctgcacctcgttcttgctctcaggggtggactactttga

SEQ ID NO: 70246 - DNA, 548 bp, Oryza sativa
  Clone ID: PAT_MRT4530_70837C.1
tttccgggttggaccacgccgttccgccaagccgttccgccaaggcgttccgattaaattaagccaggtagggattggaaaccggcacgaggcaagtagtaccaagtaccaactaccaagttccaatattaattcgattcttatgttgaggcgcggccaaactgccggggaatcatccttctgccaccggagactcccgaaatgaggcgaggggaatcgaaggcggcgacgaggggcgcaaatcgatcgtcgtcgtcgtcgtcgtggaagagcagatatattggatatggcttagttcttggcttcgtgttgatgctgctctacttgatggtcaatgcgcagttcagcaacagcccaaatgcttatttaggcccagcaacaactagtaaaactgaatcgattcctgctacaacatatcaagggaatcaagcatggcaagtttatgggagcagaggactggaggaaggccacagggaggaggtagctagcacacacacggaacgatcaacacgtcaagagaaagatgacgaaagcgagaagcaacaaac

SEQ ID NO: 70247 - DNA, 303 bp, Oryza sativa
  Clone ID: PAT_MRT4530_70838C.1
gcacgagggcagccagttcatcctcgattcctcccccgaatttccttcgcgatctcacgccggcgtgccctagctagctatcgaatcccgtcacctcggcggcggcggcgagatcggagctccgggttaacctcctccaccgcgaggcgtggaacctctctctctctcgctctctccacctgaggatcgaaacccctggcaccggctcgggccgcggaatgggcggccgcggtgagtagctaggtctgcggcggcggagttgttgttgttggtggtggtggtggtggaggaggagttggcggc

SEQ ID NO: 70248 - DNA, 489 bp, Oryza sativa
  Clone ID: PAT_MRT4530_70839C.1
atgcgcacctatcccctcgctgctcgccggacgccacgtcggtccccttgccggctgccacgcctgtgcgccacaccctcgcctctcgacggcgtcctcgccgcgcccgtgcgcctgtgcgtcgtcgcctcattggcagacctgagggagagccggagagggatattggagaggatgggactcggaaggccggaggggaggggagagggcgaccggcgccggcgagatccaaagaagtgcgtcgtgtgctcgtgcgccctggcccctagcaccgcctccaccgcagtcaagcaggtgcggcggcagatagggaagcggcggctggcggtggcggcaggagagggggagagaggcagccggcgcgacggcaacaatgggagaggagaggaggtggccgatgtgacggtgatgcgttcgaagggggaagagaaaagggggaaagaaaagagagaggaagagagggaagaggaagaggggaaggagaaagga

SEQ ID NO: 70249 - DNA, 6084 bp, Oryza sativa
  Clone ID: PAT_MRT4530_7083C.1
atggccgagcaaggaaaagcgcacgacctctctccgagtgtgagcggcgacgacggggagccgaatccacgccgtcgagctcgtactcccccacctcctccacgccaaagtcccaagcggggggaggcgctcgagagagtcgaaaaatccgcagcatcgccagtcgcgggtggtgcaggagaacggcgagatggggagcgtcgcctcctcgtctacggcgacggcagcacgcctcagggcgcgcttcaggctgttggcgcgctcctacgtcacccgcctgtcgtccctgacccggagtctccagcccagcgatggctggacgacgtggccaacttggtcatgacggcacagcaacgcctgggtgctggcggacggtccgccaccaccaagacctccggcgccgccactaccggttccgcgtcgtcaagacggagggcgcggcgagcggcggctgctgcacgccattcggctaccactccctcgtcggcgcctccgactcgggaggatcagcatgaagagccggatgcccgcctcgacatcgagcgccgacgtagtgatcggcgtgctccccgcgcaacggagggtgcctcttcgtccagggtgtcacctcgacatggacgtgaggatcagccctccgtgcccccggttggtggtgttggctgtagagcctttgtggcgagtcttcggaatgtccgttggcccccaaggttccggcccaccatcaccgagaagtatgatgggagcgtcaaccccaccgagtttctccaggtctatacgaccgggatcgaggccgctgggggagacgacagggtcatggcgaatttctttcccatggccctgaagggacaggcgcggggttggctaatgaacttgccacccgcgtcggtccactcctgggaggatctgtgccagcagttcaccatgaactttcaaggcacctatccacgcccgggtgaagaagcggacttgcacgcagtacagcgaggggatgatgaatcccttcgctcgtacattcagcgtttctgccaagtccgcaatactataccttgcatccctgcacacgcggtgatctacgcgttcagggggggtgtgcggcacaaccgcatgctcgaaaagattgcctccaaagagccccagactaccgcagagctttttcagctcgcggaccgagtggctcgtaaggaggaggcttggacctggaacccctccggttccggtgtggcagcttcggccgcccccggatccgccgctcagacagggcggcgtgacaggaggaggaagaaaaggtcggtccattccggcgacgagggtcacgtcctcgccgtcgagggcgctccgcgggccacccgaaaggggaggcctgcgagcgacaaaaagagagaggctggtacttccagcagggagcgcccagccagcaggtggtgctccgtccacaacacctccctccacgatctcgcggactgtcgcgcagtcaaaaacttggctgagcgaacgaggaagtgggaggaggacaggaggcaggaacgccgtgagggcaagtctgcggcagttccctccggtaaacggcgaagtgaggccagacagaaggcccccgccgttgacatcgatgatggtgatgatgacctaggtttccaagaaccaggggccaccattgccactgtcgacggaggagcgtgtgctcacgtttctcgccggagcttcaaggctatgaagcgagagcttctcgccgcggcccctactcatgagacgacgcgtcgggtgcggtggtcggaggttgctctcacctttgaccagaccgaccacccactgtgcgttgcccggggagggcagattgcgatggtggtttcccccaccatctgcaacgtgaagttggggtgtgtcctcatagatgggggagcggctctcaacatcctttcccccgcggcctttgatgctatcaaggccccggggatggtgctccagccgtcccaactgattatcggtgtgacgccggggcacacatggccattaggtcacatcgacctaccggtcacctttggtggatcagccaacttccgcacggagcgggtgaacttcgatgtggcggacctcagtctgccctacaacgcggtcctggggaggcccgcgttggtgaagtttatggcggcggtccactacgcctacctccagatgaagatgccgggccccggtggccccatctctgtccgtggcgacctgaaagtcgcgctcgcttgcatggagcagcgcgcggaccacctcgctgctgcgaccaagcccgagggtggtgacgagaggcttggcacctccgcccccaccgccccgaggcagcggattgccacatgcgacgaggttccggaagacgcgctcgtctccttcctgcgggcaaacgctgacgtcttcgcatggagaccagcggacatgcccggggtccccagggaggtgattgagcaccgtcttgccgtgcggccgggcgcaaggccggtccggcagaaagtgcggcggcaggccccggaacgtcaagccttcatccgcgaggaggtggcgagacttctggaggccggattcatccgtgaagtcatccatccggagtggctggcgaacccggtggtcgttcccaaggcgaacggcaagcttcggatgtgcatcgactacaccgaccttaacaaggcatgtcccaaggacccttaccccctgcctcgcatagatcagatcgttgactccactgcggggtgcgaccttttgtgttttctagatgcatactctggttatcatcagattcgcatggctagggaggatgaggaaaaaactgcgttcatcacccccgtaggaacctattgttatacatcaatgcccttcgggttaaagaatgcaggtcctacttttcaacgtactactcgaatttctttgggtagccaaataggacgtaatgttgaggcttatgttgatgacttggtagtaaaaacgcgcaaccaagaaactttactttcagatctagcggaaacttttgagaacctccgctctgcccgcataaagctgaaccccgataagtgcgtgtttggtgtgcctgcgggcaagcttctcgggttcttggtctctgcccgaggcattgaggccaaccccgagaagatacgagctatagagcggatgcgcccccccagcaaacttagggatgtgcaatgcgtcaccggttgcatggccgccctaagtcgtttcatatcaaggctgggagagaaggcgctacccttgtttaagctcctcaagcgctcggggccgtttacttggacggaggaagctgaacatgccctcactcagttaaaggcatatctcagctctcccccggttctagtcgccccggagccaaatgagcccctgctactttacttagcggcgaccccccaagtagttagtgcagcattggttgtggagcgcgatgaagacaatcctcatttcgtgcacccccattctgtgctaacttggcccgggagcgagcagggaggaaaggcccccgtgtcggacggtggcctacggctcctgacgaccggagtcggccttctgcccgcttgtcagacggtgctgggtgcccccgaccctcaggaaggccccgaggccactgcgggaaggccgcacctatcgccctttggccccgaggctaaccctgtgctgactcgacccgggagaaagcagggagaagaggcccccgagccgaacggaggccagaggcccctgacgaccggagttggccctttgcccgcttgtccgacgatgccaggagcccccgacccacaggacggccccgaggccactgaggggaggccgcccctttcatcctccgaccccgaggtcatcggcacagaagacaagtgtgccccgaaaggccacttgaacgaagaacgccccggggatacggcccctagcagagaggatcggccccaccgaagggtgcagcggcctgtctactttgttagtgaggccctccgggacgccaagacccgataccctcaggcccagaagatgctttacgctattctgatggcctcgaggaaactgcgccgttatttccaggcgcatcgggtcactgtggttacgtcttaccccctcgggcaaatcttgcataatcgagagggtacaggacgggtggtaaaatgggcaatcgagctttctgaattcgatctgcactttgaaccacgccacgctatcaagagccaggccctcgccgattttgtggcagagtggaccccggctccagagaccgtctcaatccccgaggccagcacgaacccctcgcagctgcctcacaccacctactgggtgatgcagttcgatggttctctgtccctccagggtgccggtgcgggggtcacgttgacctccccgacaggggacgtcctcagatacttggtccgtctcgactttcgagcgactaacaatatggcagagtacgacggactccttgccggactcagagtggcagctggactggggatccgccgcctcttggtattaggcgactcccagctagtcgttaaccaggtctgtaaggagtaccggagctctgacccacagatggacgcctacgtacgccaagtgcggcgtatggagcgccatttcgatgggatagaacttcggcatgtacccagaagggataacatgatagccgacgaactctcacggctcgcgtcctcgcgagcccagaccccaccgggcgcctttgaagaaaggcttacccagccgtcggcgcgacccgaccccttaggggagacggatgcgcctgaccggcccccgaggcccgtcggagtccaggcctcgggacccgaagggagcgctccaagctccctcagattgatcgcttggatctctgagatccaaacatacctcacagataagactctacctgaggaccgcgaagggagtgaacgcgtacaacgcatttccaaacgctatgtgctggtagaagggaccctctatcggcgcgcggctaacggaatcctcctgaagtgcattcctcaggaacaaggcgttgagcttcttgctgacatccatgagggcgagtgcggagcccattccgcctcgcgcaccctggttggcaaggcctttcgtcaaggattttattggccgacagctctcaatgatgcagtcgatctggtccggcgatgcagagcgtgtcagttccacgccaagcaaatccatcagccggcccaggccctgcagatcataccactgtcatggccatttgctgtctgggggcttgatatcctgggaccgttcaaacgggccccgggcgggtttgagtatctgtatgttgcgatcgacaagttcactaagtggcccgaggcttatccggttgtcaagatcgataagcactctgctcttaaattcattaagggcatcacggcccgttttggagtgcctaaccgtattattacggataatggcacccaattcactagtgaactcttcggcgactactgcgaagacatgggcatcaagctctgcttcgcctcacctgcccaccccagaagcaatggccaagtggagcgtgccaatgcagaaatcctcaaaggccttaaaaccaagaccttcaatattctcaagaagcacggcgattcatggatcgaggagttgccagcggtgctctgggcaaaccgaaccacaccaagccgagcgaccggggaaacgcctttcttcctcgtctacggcgcagaagcggttctcccatccgagctcaccctgaggtctcctcgggccaccatgtactgcgaggctgatcaagatcagcttcgcagagatgacctcgactacttagaagagcgaaggcggcgcgcggccctccgagccgcgcgctaccagcagagcttgcggcgctaccatcagcgccacgtccgggcccgatcactctgcgtcgacgacctcgtcctacgccgcgtccaaacgcgtgctggattgagcaaactctcaccaatgtgggagggtccgtatcgagtgatcggtgtcccccggccgggctcggtacggctggccacgggcgacggcacggagctgcctaacccatggaacatcgaacaccttcgccgcttctacccctga

SEQ ID NO: 70250 - DNA, 391 bp, Oryza sativa
  Clone ID: PAT_MRT4530_70840C.1
cgaaggaaaggggggggccctttccaccaacttgcacttttttggtcgcgggacccaaggtttggttgtaaaccaaaggccccaggaaaaaattaaaaaaccctaaaccaaaacccctcccccttaaaaaaggtctccccctacatttgggcttgcaccccaaagggcccgttccctaaataaaaaaggccccttttgcttttaggggaacctggatcccccaaaaaaaccagatttggcaccccctaagggccccgggggcccccccccccacgggttgaaaagagccccctttacttttttaacctggttggaaaaacaaaccttacatgggattggggaatcccaacccttcgccttgttaaaaaataaaaaataccccccctttttt

SEQ ID NO: 70251 - DNA, 258 bp, Oryza sativa
  Clone ID: PAT_MRT4530_70841C.1
ctggtgggttgtgagcgcatgattttgatggtcgtgctcatgacaattaaggaccggttcacgattttcagttgttaaacattaacggtgccaaccacaagccaacgtggacaacggctttactttttgtatagtatggttcattgtggagcaccagattgtgaagtggcggagataagcccacgggggtcactggggagtccatgccttgtttataagggagtgattatgatccaagaacggtgcactactttgaat

SEQ ID NO: 70252 - DNA, 320 bp, Oryza sativa
  Clone ID: PAT_MRT4530_70842C.1
gcacgagggagagagagaactagtctcgagttttttttttttttttttaaataaaaataaataatgtttcatagagcaaggtgaagacagcatgaggtccactagcctctgcatctctatcaacacagcaccaatcaaatatataagcagaaagacctctggttcctaactaaaaacatccaaacccaatatacacgaggtgacacgacaagtcccaaatcttcagcacttctctgaaagctgataaaattcagagaaaaaactgagtgcataatgtacagatgctctttatttcaacctctatttcggataataacact

SEQ ID NO: 70253 - DNA, 713 bp, Oryza sativa
  Clone ID: PAT_MRT4530_70843C.1
ctcgacgacgcgtgagaaagaaaaaacgctagaaaaaaaatcatccatcgccgcttgcgactccgggcggcgccgccgccgccaccgccaccgccgccgccatctgctgccgccgctctactccccagatctacacacaccagcctgcttcgctcccgttccatgcccaaaacttgcagatcacttgcgcctcaaacaagctagggtagtcgtcggggggaggggggcgcttgctgctccctccgccggcaccatctccagtcccggtgccgtctctccctgctggatccggagtcgcgcctccactttcttcatcctggtcgagccgagccaccttgggatctaccgttgctgcctttatactgtaatattaattgaatttaccatggataaggattggatgaaaacatctagatctagtgctgaatataatatcggggttgataaatttatagaattcgccttatccaattcagagaacttgatcaccaaccaacaaagtttaaatcaagaaactttcatgctgcaatgccattggcatccaaacaaaatgacacatttgcagatgacataataagcaatgggaggatccgatgagggagatgactatgaagattactgtagctctgaagattatgatgagactgaacctggggacaatttgccaccttatgctgacttggagcatgaagggcaagttcatgaaatgctag

SEQ ID NO: 70254 - DNA, 231 bp, Oryza sativa
  unsure (1)..(231): unsure at all n locations
  Clone ID: PAT_MRT4530_70844C.1
aatttctgcagatctgtttttgagcaagatttacacataggtatgtctacaagttctggacaagccatggtgagtgtttcgacgggagtgatgaactgccttcttgccaagcttgccaccctgattgatgaagagcatgttaagttcagcaacattcctaangaggtgggcttcctcagggatgagctcaggaccatgaaagctttcctggagatacttgcagncaaagan

SEQ ID NO: 70255 - DNA, 545 bp, Oryza sativa
  Clone ID: PAT_MRT4530_70845C.1
actagtggatccccgggctgcaggttttttttttttttttttttttttttttttttttttttttttttttactcctaatggacactaatgtagcatcccttgagatagatcacgtgatacattatatcttacagaggtcatgctacccatcgataataataaggagatgtcaacagtttataaatccttttgttaaagctcaaaatcaaagccactaggtctatctactatatataacctctttggggaaatgtatacagcctgtccctaaactacatcagggttagcttctctaggacgtgcaggatgaagaaaggtccattcccgccccagcgactttatgaacaagtgactcctgtaattcaaatgcctttccaatttcaactcttcaaagtataatctgtcagctgatcatgaactcgtggaaactccgcgatggttccaggaactttggttggtactactccaaggtatatttctgccaatggagtaatacattgtggcatcatgcaaaatcactgcaaccctgaaagcacgctgcactt

SEQ ID NO: 70256 - DNA, 2931 bp, Oryza sativa
  Clone ID: PAT_MRT4530_70846C.1
atggcggccacggttccagcggcggccggtcccgacgacctcaccgcgtgcgaggcagcagccgagagctcgcaattgcttgggtggcccattgattctgctcaagattttgagcaggagatggaggggaatggcatcatggtgagcgcggcgaccggggcgatgaactcgctcctcgccaagcttgccgcgctgctggaggaggactaccagatgcacaaggggatgaagcgcgagatcgccttcctgaaagatgagctgagcagcatgaacgcgctcctcgaggggctggccgacacggaggcgacgctcgatccgcagacgaaggagtggaggagccaggtgagggagatgagctatgacatcgaggactgcatcgacgagtacacgcgccagctccgccatgggcggccgcagaggcccggtggcaatggcatcatggggttcttcagtggctatgtgcagaaggtgaaggaccttgtcggtcggcatgagattgccgagcagattcaggagctcaaggctcggattgtcgaggcaggacagcggcgaaagcggtacaagcttgattcagcagttaactgtaaaagtaatcatgttgtgccaattgatcgtcggttgcctgcgctgtatgcggagttggatgctctcgttggtattgacggtccgagggatgagatcattaagtcattggatgatggggagcagaggatgaaggtagtttcaattgtgggttcaggaggattaggcaagagcactcttgctaatcaggtgtaccaaaaaatcgggaaccaatttgattgcaaagcttttgtgtcactttcgcagcatcctgtcatgggaatgatctttgaaaccatactctaccaagtcaatgatgaggttggtacaatcagatcaggggataaggagcaggtcatcaatgaactgagggctttcctgaagaacaagaggtattttattgtgatagatgacatatggagtgcccaagcatggaagaccattagatattcgttgcttgagaataattgtggcagtagaatattagtgacaacaagaataggtactgttgcaaagtcatgttcctccccttgccttaatcttgtatatgaactaagagtgctgagcgaagatgactctaaaaggttatttttcagaagaatttttggttctgaagataaatgccctcatcaattgaaagatattgcagttgaaattgtgaggaaatgtggtggtttaccattggcaataatttctatggctagtttgttgactactaaatcatatgtaagagcagagtggttcaaggtgcgggattcaattggttcaggaattgagaaaaattctgatgtggaggagatgaacatgatattatctctgagttattatgatcttcctcatcatttaaggacttgtttattgtatctaagtatgtttccagaggattatgtgatcaacagggactatctggtaagaaggtgggtagcagaaggattcatcaaggctaatggtggaagaacttttgaggaagaaggtgaatgctattttaatgaacttataaacagaagcatgatccaaccagtacatacccagtacgatggtagagtttattcatgtaaggtgcatgatatgatacttgatctcattatatcaaaagcaactgaagaaaattttgttactatcgttactgacagaaaacaaatgttggtctcaaaagacaaagttcaccgactctcattttacaactatggtcaagaagatgtgacattatattccatggttactactcatgttcgatccttgaatatatttagatacagtgaacaaatgcctcctctttctaatttcccagccttgagaatgctggatctagatggaaataacaatttggaaagcagttatcttgaggatattgggaagttatttcagttgaggtacctacggattagagcaagtaatatttctctcccagatcaaataggtgagctgcagtttttggtaatactggatcttctcaactgtattggtataagcaaattgccagcaagcatcgtgatacttcgacatttaaaatgtttagttgttcatcgtgttgagttgccagatggagttgggaacttgcaagctttagagtatatgtcacttgtggttgtagactacagtacctctgtaagttcattacaggagctgggcactttgaccaaattgagaacccttggattggattggcgcataggtgatttccacaaggaaaaacttacatacgcggataattttgtttcatcacttggaaaactcggtagatctaacctacagtatttgactctcatcagtccatggtcccttgattttttattggattcttggtccccacctcctcatctccttcagaggttaggaatcacaggttggtatctcagtaggattccagtgtggatggcctcactggccgacctcacgtacctagatatcgaggttaaagtcagacaagaaaccctccagatccttgggaattttccagctttgcagtttctggaattatactcaaatgcagcagactacggtgataggtggctcactgtcagcaactgtggatttcggtgcctgcagaagttcaaatttgtccactggatgaatcttgtgtttgaggaaggagccatgccaatgcttgagactcttgaattccaaataatagcacatgaggcacggactgaatgtggatttggtcctcctgatctcggtatctgccacctctcttccatcaggaacctcatcatcaatatatactgcgagtgtgcaagaattgaagatgtggaggcattagaggctgctatctggcttgcagccagtactcttcctaaccatcctacactaactttacacagatttcgtgaagcagagatggtaaagaataaccagggtaacctgtag

SEQ ID NO: 70257 - DNA, 241 bp, Oryza sativa
  Clone ID: PAT_MRT4530_70847C.1
gaatcggcacgaggtcttctctcggtctccacgcgcttcacctccgtatttactcgcgcccttctctctctcctcgacctcattcgcctcgcctcgcgtctcgtctcgttcgcccctcgccaccacgcgacacgccatgggcgcggccgacgacgccaaccaccgccacgaggaggccagccccctcctgccaccgggcggcggcggcgccggcgccggcggcaagaagctcaaccagtct

SEQ ID NO: 70258 - DNA, 1251 bp, Oryza sativa
  Clone ID: PAT_MRT4530_70848C.1
ttgtggggacgctttgactcccgtgtcgctctctgaggcgaccgggaggagaacaggactcccagcgcttttcccctcgtcgcccacctcgccggcgccggcgccggcgccgcagccgccggcggcgcccccacccacctcctcccttttcacctccccctgtcacctttttccctttcccatttctccctgttccaccttttctgctcagatccagtcctaggctgctggctagttgcccggtcctgtaaatcctcaccgccgtcgtcgcttttcaacttgccaccgttcgagcaggtcaccggagagtgcaggtccgctgggttggcggcaaggcttcctcctcagtccccttcctagagagagggcggcacggtgggtctcgcctggctccggcgagcgacgcagtggaggtgatgtcgacggcgggagcggccacgcccagtggcagtcggcaaggcaggcgcctatggcgccggttggccgggggtggtggcagtggtggaggttgccggttagtggggcgctccggtgatgggcatggttgctgtgtggcggcaagttctccatcaccggtagtctcaatgggcggtggtgacaaggggctagcccaccgttccttcctttgtcaccgacggcgtcgcggacttggtgagtagctgttctggatggagatggagctagtcctctatcccctccttcgtccagcggcagacttggtcggcgacagcggcgcaaaggtggcagcgggctgggagtccgagaacggagtaggattctgaagtcaatggcggccctatgggctgcggaggcttaagaatccgacgaagcaaacacagttgctttcaactagtgtctggtcggctagttctgaccggaggacgatggatgagggtgggcttccccggctgcccgtggccatgaaaatgactctatggagattcgcagcgacaacgcactaggggcggtggcgacgtttcagttgaggatgtcaggatgcagggatttaccgaggttgtaggttttcttgctttttggttttgtgttctcctcttcgttgaggtgtgagtctagtactcttgtatccttttggctgtgtatatcccttgtggatatagaggccggattaatgaaaatccattatctaaaaaaaatctcttcgcttaaaaaaaaaaaaaaaaaaaaaaaaaaacaaaaaaaaaaaaaaaaaaaaaaacaaaaaaaacaaaaaaaacaaaaaaaaaaaaaaaa

SEQ ID NO: 70259 - DNA, 574 bp, Oryza sativa
  unsure (1)..(574): unsure at all n locations
  Clone ID: PAT_MRT4530_70849C.1
caactgtattattaagaaataaaaccaaataactcaaaaaaaatgtagggctaaaactactaaacttttgatgttactatgttctctaaaccgcaattttagtgcctactctgaattgctcataagagctggtctttcaaacaagcagggacaatcaatccatcatagttattttggcaaatattgttttgttaggaatcttttgcctcattgatatagattgagctgaaatttgcatctgtaatacaaagatgtaaaatggattgtgctgttttttgtaatggaaattccatataacatgcacactgaatgcaaaaagggaattgtatatttttgccactcaccctctggcatattttgatgtttttagtagaatgtaatagtctcactttgttttaatcaagttaatttcattttgatgggatctgacctaagccaggaaattggttaagctctgattacaatcaatgaatnggttgggttcagatttttacaatcaaagcactggattttggcctaaattcttattggtctccttcaggaccttttaagatcaatggagtgcccatccgcc

SEQ ID NO: 70260 - DNA, 405 bp, Oryza sativa
  Clone ID: PAT_MRT4530_7084C.1
atgggtcactcgttgtacttgtatgctgcagagcgatcgtgtgccaacgcgacgggtggttctgtacttctgggccctgtgctcggccattatactgctgggccccggcaagagggcggaatagtagcggtggcccggcctctccacgctggtcggcatcctcgtctcctccctctgcaatgcaatgaaaagctcgacggcgaggcgctgtgggtggggctcgacggtggggcgccgtgggtggggctcgacggcgacggtgcacagcgggcggcggccagcgaccgtctccgcccccctcgttggcagccgcatttttccctctccgtgcgcgcttgctggccggtgaggaaggatgatcgcgcgcacttgtcggggcgacgcggctacaaccagcagcggtga

SEQ ID NO: 70261 - DNA, 1431 bp, Oryza sativa
  Clone ID: PAT_MRT4530_70850C.1
ccggcccggacgacacgaaagatgatcatgttgtggctgcccgccgccgtctcgctcctcctctcgtcgtcgctgcatgtcgccggtgacgccggcggcggcgtcgcctccctctccgtccggcgctacgacgccatcttcagcttcggcgactccttggccgacaccggcaacaaccccgtcgtcttcgactggtactccatcttcgaccccgtcacccgccctccctacggctccaccttcttcggccgccccaccggccgcaactgcgacggccgcctcgtcctcgacttcgtcgccgaacgcctgggcctgccgttggtgccgccgttcttggcttacaacgggagcttccggcacggcgccaacttcgccgtcggcgccgccaccgcactcgactccagcttcttccacggcgccggcgatcccccgggcgccagcccgttccctctcaacaccagcctaagcgtgcagctgagctggttcgattcactcaagccctcactctgcagcacaactcaagaatgcaaggatttcttcggcagatcgctcttcttcgtcggcgaattcggcatcaacgactaccactcctccttcgggaggaggagcatgcaagaaatcagatcgttcgtcccggacatcatccgtaccatctccatggccgtcgagaagctgattggcgacggggcgaccacggtggtggttccgggcatgatcccgtcgggatgctcgccgccggtgctcgtcaccttcgccgacgccggcgcggcggagtacgacgcgagcaccggctgcctgagggagcccaacgaggtagcgacgctgcacaactcgctgcttctggacgccgtcgaggagctccgggagaagcaccccgatgtcgccatcatgcacaccgatttgttcagacacgtctcggagatggtccagaatcctgacaagtttgggtttcaaaaggatgttctcagcgtttgctgtggaggtcccggaaaataccactacaacaccaggataatctgcggcgatgaaggtgcgaccacctgtgtggatccatccaagagcttgtactgggacggcgtccacttaaccgaggcagcttaccactacatcgccgatgattggcttcatgccataaccttatctgcaagagctacctcctaaaattgatatggcacgaacgtcggatacacacatgtaatgctagttttttttttaaaaagaactacatgtaatgttagttgttggtcgattttccttcgtgaaggaacatcagccttgcagatgatccgagtaaaattgtggagaaaaaactcctctattcaattaaattggcggtctcatcgattcgttcaaaaaaaattatgaaaaaaactgctgaacggatggatatttgaataaaattcgttcttgttgtgtaccgaaaaaaaaaaa

SEQ ID NO: 70262 - DNA, 512 bp, Oryza sativa
  Clone ID: PAT_MRT4530_70851C.1
attcgtcgatgggtggggagaagggtgtcggtcggcggggaaaagctcgacggcggaggccgccagctgacgaaagtttgtttcttgttcgacaaggactctatagacccaagggtataaattgtgtaccaggggtccctgtaatttttatctatcgatcaatacaactactctcggcgcatcgccaccctctttaccgaggtttttacttatctttcagcggaatttgggcacctgacgcggggctgcatcggttcagttcgatctccggcgaaggagtaagtcctacgttccgtcgggccctggtgaatctgtcatctacgtcggtgtcgttcaaggctgcatcagtacattcgacctcttggattgctctggtttggatgatatatttgcctacctatttatcatatgtctctattaatctaatcttagcatattaatttagctctatcggctgcttctcgctttagggtttctgccgatatcggctaaatcgtgttgctagattagat

SEQ ID NO: 70263 - DNA, 1531 bp, Oryza sativa
  unsure (1)..(1531): unsure at all n locations
  Clone ID: PAT_MRT4530_70852C.1
ccggccgggctcttttccatctcaattactacaatcctctcctctcctctcctctcctctccttcctttgtcgcgagtcacaggcacacagacatggccgccgtgaacacagtgtcgtcgctgccctgtagcaaagctggcgccgccgtagccgggggagctccgaggccgtcgacctgctccgtattctaccctcctcgttgctggtccaagcgaagcagcggtaatggcgtgcgggcgcaggcgtcgacgacggagacgaccgcagcgccggctgcggaggtgactactaaggtggagaaggtgtcgaagaagcaggtggatggcgtggtgacgaacaagtacaggcccaaggagccgtacacggggcggtgcctcctgaacacgaggatcaccggcgacgacgcccccggtgagacgtggcacatggtgttcagcaccgacggcgagatcccctaccgcgaggggcagtccatcggcgtcatccccgacggcatcgacaagaacggcaagccccacaagctccgcctctactccatcgccagcagcgccatcggggacttcgccgactccaagacggtatcgctgtgcgtgaagaggctggtgtacaccaacgatcagggagagatcgtcaaaggagtctgctccaacttcctctgtgacctgaagcctggttcggacgtgaagatcacggggccagtggggaaggagatgctgatgcccaaggaccccaacgccaccatcatcatgctgggcaccggcaccggcatcgcgcccttcaggtccttcctgtggaagatgttcttcgaggagcacgacgactacaagttcaacggcctggcgtggctcttcctcggggtgcccaccagcagcacgctgctgtacagggaggagttcgagcggatgaaggagatcgcgccggagaggttccggctggacttcgcggtgagccgggagcagacgaacgcggcgggggagaagatgtacatccagacgcggatggcggagtacaaggacgagctgtgggagctgctcaagaaggacaacacctacgtctacatgtgcggcctcaagggcatggagaaaggcatcgacgacatcatgatcgacctcgctgcaaaagacggcatcgactggcttgactacaagaagcagctgaagaagtcggagcaatggaatgtggaagtctactgatggatatatatatgttaataattaattaatccctttttatctcgattttcatgcatgcatgcgcaacctgcatacgccatcttgttgtactcgatctgatctcatctgatgagatgcatgtagatattatactgacgattcgtcgactataaagtggtttcccattttctgctgcanaaaaaaaaaaaaaaaaaaaaaaaaaaaaaaaaaaaaaaaaaaaaaaaaaaaaaaaaaaaaaaaaaaaaaaaaaaaaaaaaaaaaaaaaaaaaaaaaaaaaaaaaaaaaaaaaaaaaaaaaaaaaaagggggggggcccctttaaagaccccacctttccc

SEQ ID NO: 70264 - DNA, 285 bp, Oryza sativa
  Clone ID: PAT_MRT4530_70853C.1
atgaccgccggcgatggaggactcggccgggccaaccgaggacatctacgcgatgaggacgacgagaggaactcactgatggtgacggcgacgacaatcgatgacggaaaacggccggcgacgagattgaggcggcgacgggctcgggttgacggcgtcagtggcgctccggcaggcttcggcttcgaccgaggggtggacgcccgattgaaggagggacaagaaatggacttcggaggaggaataaaggcagctgaaaggaagggagaatgggccgagaactaa

SEQ ID NO: 70265 - DNA, 267 bp, Oryza sativa
  Clone ID: PAT_MRT4530_70854C.1
ccacgcccaccaataaagggggaactcgaaaaaaaaaaccggccggagagggggggaagagaaattaacaaatgggtaaagggcaaagcccatggaaaaggtccataaccaaatgggaaaaaaaaaaagtacggcatagttatatctgggaactacaataaacatggcccaaagaaaagctgcatccaactaattaggggcgggaatccaccagcggaaggctgagcctaagttaagaacgccaaaaaactcattaaaaccgggggg

SEQ ID NO: 70266 - DNA, 396 bp, Oryza sativa
  Clone ID: PAT_MRT4530_70855C.1
acagcagaaaatgggaaggcactttatagtcgacgaatcgtcagtataatatctacatgcatctcatcagatgagatcagatcgagtacaacaagatggcgtatgcaggttgcgcatgcatgcatgaaaatcgagataaaaagggattaattaattattaacatatatatatccatcagtagacttccacattccattgctccgacttcttcagctgcttcttgtagtcaagccagtcgatgcctacatacagtatataatgcaagaaagaaagtaattaggaatcgaatagagatggagattaaaagaagtactagtacagtaccgtcttttgcagcgaggtcgatcatgatgtcgtcgatgcctttctccatgcccttgaggccgcacatgtag

SEQ ID NO: 70267 - DNA, 631 bp, Oryza sativa
  Clone ID: PAT_MRT4530_70856C.1
accactatgaagacgttctcaattcaagtcatggccgtttcggctttgctggcagggctttctcaatcgtttgagatgaggcgacctccaccagttgagcttgtcaaaggcttcgactgggcagatccatttacgctcagttccatggcggcattccagccaagatgtgacgacaagaaacagttcgaggttttcgagtatactctcgcagagttgatggagcctcccccgaagggattgaagccatgggccaaaggtctcaaagcagtcttcgccaacagagaatatcctggaggatggctcggcctggatccccacgctggcggtcgcagtgtgttactgatgaactatgatcgaattcctctcgtggttcgtgaatggattgaacaacaggagcgaaccgacggtgagggcaaggcccttttcgctgtgctcgagaaaccaaagaacgacgaagacgagattgaagaggtcgtcaagtttcccgaagctgacaagatcgatcgggcaaatgacaaagacaagggttgccgtttttgcgcccggtgctttatacggcatccttcccctctgggcagcggaagcaagtgaatgcaaagatcaacttgtcgacttgtccaagtacagccgc

SEQ ID NO: 70268 - DNA, 727 bp, Oryza sativa
  unsure (1)..(727): unsure at all n locations
  Clone ID: PAT_MRT4530_70857C.1
atacaccgcccatttggatggtgctcaacccaccaggtatanccaggaagtattccagtaagatagttaaagatgcnatccaagcttccaatgaatttttgagaccaaaaagccagacctgcacaatgatgttgaagaccttccctcccactgtcaccagatatctgccttgttaacttctataccagcagtggtaagttaggtcttcaccaggacaaagatgaaacgaaacccagccttcataagggattgcctgttgtttcattttcgctaggtgacactgcagaattcttgtatggtgacgtgaacgatgtggataaagcttcaaaggttgatctggaatctggtgatgttctcatatttggtggtaaatcaaggctcatattccatggggtttccagaatcaaaccaaaaacagcaccaaattggctgaccgatgaagcaaaacttcgacctgggcgtctgaacctcacattcaggcagcattagcttgccccgtattagatgtagagggaaccttgttctgttctgttgtagtagctcagtacccaccctattagcatgagttagctggtagtacattcgatctaactactggaaaactcgagaaggagtcagatcaaactatggaacatatatatatttagtgcaattgattttcctgtgattattatttttagatataatggaaatcaatccagatttgtgttgtaaaaaaaaaaaaaaa

SEQ ID NO: 70269 - DNA, 530 bp, Oryza sativa
  Clone ID: PAT_MRT4530_70858C.1
gaatcgttgcatgaatatgccatgcatttgagaggaagaggtcaaagtttttttttaagcaatggaaatggattacatcttcggcctcggcacgtggacagaaagagatcaagtgatatggatcgagaagaatgtttagctgatctgctctttactctgcacgatcgaggagatgaaaatgcatgcaatatgcatggaggggtaagtgttaagtggttaattggtgatttttgcgggttaattaattacatggacattaatttttcttttgatcaccttttgtttattttttctctgaaaactatcttcttttgttcatttttattttcttggaggtacttaattaattagctaggttaattagctggtgatttttagtttgttgtttccctccttttgttcaagtgtgaactaattgtgcaaaattagtccaagtaaagcaaagagagaggattcttatttaattattggttaaacattacccttttttaagatgaaacatgatgtctttttttaaaaaaaaaaaaaaa

SEQ ID NO: 70270 - DNA, 1340 bp, Oryza sativa
  Clone ID: PAT_MRT4530_70859C.1
cggacgcgtgggcggactcgtgggtggctaggttacctggttagctagtaacaactcaaacattgtaagcgcatagaggagtctggtgctctactcaactctgaaacaatcaactgcaccagtgtactaattaaatatattactgtacttaagacatggctatcgcgtcgtcgtcgttttcacttgctgctatcctcctcatcatcatcatgtactgctgccccacgggtttggtggaggcagctcgcaaggggccggctgctgccggcggcggcgacgacagcgcgatgagggagaggtacgagaagtgggcggcggaccatgggcgcacgtacaaggactccctggagaaggcgcggcgattcgaggtattcaggaccaacgccctgttcatcgattcgtttaatgctgcaggaggcaagaagagcccccggctgacgaccaacaagttcgccgacctgacaaacgaagagttcgcggagtactacggtaggccgtttagcacgcctgtaattggaggtagtggcttcatgtacgggaacgtgaggacctcagacgtgccagccaacataaactggagggatagaggcgctgtcacccaagtcaagaaccaaaaggattgtgcgagctgttgggcgttctcagcggtggcagcggtggaaggcatccaccagatcaggagtcacaatctggttgccctctcgacgcagcaactgttggactgctccaccgggaggaacaaccatggctgcaaccgcggcgacatggacgaagcgttccgctacatcaccagcaacggcggcatcgccgccgagtcagactacccctacgaagaccgcgcgctgggcacctgccgcgcctcagggaaaccggtggcggcctccatcagaggcttccagtatgtccctccgaacaacgagaccgccctcctgctggccgtcgcccaccagcctgtgtccgtggcactcgacggcgtgggcaaggtgtcccagttcttcagcagcggagtgtttggcgcgatgcaaaatgagacgtgcaccactgacctcaaccatgccatgacggcggtggggtacggcaccgacgagcacggcaccaagtactggctaatgaagaactcgtggggaaccgactggggcgagggaggatatatgaagatcgcgcgggatgtcgcgtccaacaccggcctttgcggcctcgccatgcaaccctcttaccccgttgcctaataaactaaagagacataaattgagccgataaccgtgttagcgtctggtgaaaaagtagtacggcgtggtgtaatatgcgattcatgtgataaattattatcagtgtttgtt

SEQ ID NO: 70271 - DNA, 866 bp, Oryza sativa
  Clone ID: PAT_MRT4530_7085C.1
cctgtcactgtttggctagcttaaccttcctgacatctatcctctggattgaacggcaggagatacctaagctagctagcaatctctatcgatctgtttgtttacatgttcagttaaaggttactgagaaatgcctagagtttttccggctagcttcataagttagtgggttagctgacctagattcaaagtctaatccttttatttatttgatattagatatcctaacgtttttagttagaggttattaatttgacatggccggcagcggcagggacgatcctcttgtggttggcaggattgtgggtgatgtgctggatccattcgtccggatcactaacctcagtgtcagctatggtgcaaggatcgtctccaatggctgcgagctcaagccgtccatggtgacccaacagcccagggtcgtggtcggtggcaatgacatgaggacgttctacacactcgtgatggtagacccggatgctccgagcccaagcaaccctaaccttagggagtatctacactggctggtcaccgatattcctggtaccactggagcaacatttgggcaagaggtgatgtgctacgagagcccaaggccaaccatggggatccaccggctggtgttcgtgctgttccagcagctggggcgtcagacggtgtacgcaccggggtggcgccagaacttcagcaccaggaacttcgccgagctctacaacctcggctcgccggtcgccaccgtctacttcaactgccagcgcgaggccggctccggcggcaggagggtctacccctagctagctacgcatgccacccggcctccatgcatgcagcagctatagctaagctgagacctgcctagctgtata

SEQ ID NO: 70272 - DNA, 1389 bp, Oryza sativa
  Clone ID: PAT_MRT4530_70860C.1
atggagccggccgccgccgccgccgccgggcagctcgacgtggacaagctcacctacgagatcttctccattctcgagagcaagttcttgttcggttacgatgatcccaagctcgtcttcagcggcggcgacgagccgcagggggcggtgaaggggactctggcgagaggcccggcggtggtggagcgtggcaaggtgtgcgtgctgtcgattgatgggggtgggcgggcggcggatgggctgctcgccggcgcggcgctggtgagcttggaggcgtcgctgcggcggcggaccggggatgagacggcgaggctggcggatttcttcgatgtcgctgctggctccggcgccggcggcgtgctcgcggcgatgctggtcgcgcgcggcggggatgggcggccgatgttctccgccgaggacgcgctggcgttcctcatgaggagcctgcggcgagggtggtccggcggcggcggcggcggcgccgccggtggcatccgcgcgctgttccgccgccccggcgccgcgttccggaaggtgttcggcgacctgacgctgcgggacacggtgcggccggtgctggtgccgtgctacgacctcgcgtcggcggggccgttcctcttctcccgcgccgacgccgtcgagacggcggcgtacgacttccgcctccgcgacgtgtgcgccgccacctgcgccgggtcggacggctcggcgtcggcggtggaggtgcggtcctccgacggcgccacccgcatcgcggccgtcggcggcggcctcgcgctcggcaaccccacggcggcggccatcacccacgtgctcaacaacaagcgcgagttccctctcgccgccggcgtcgaggacctcctggtcatctccatcggcagcggcgagtgcgacaaccgccccaccggtggcgccgccgcctcgacatccgagatcgtcaggatcgccgccgaaggcgtcgccgacatggtggatcaagcagtggccatggcgttcggacataataggacaaacaactacatccgtatacaggcgatggggtcgccgcgggcgagccgaggagggatgagatgcggcggcggcggcggcggcgatggcgcggggtggggcgtggcggaggagatgctgtcgcagaagaacgtggagtcggtgctgttccgggggaagaagctggcggagcagacgaacgccgagaagctggagtggttcgcgcacgagctcgtcaaggagcgggatcgccggaggacggccggcgcgctcgcccccgccgtcgtcaagcagcagccgtcggagtcggcgccggcgacggcggccgccgccgatggccacacgccgccgccgacgtcgtactcgaacctggtcagccagatgttcaccaccatcctgtag

SEQ ID NO: 70273 - DNA, 496 bp, Oryza sativa
  Clone ID: PAT_MRT4530_70861C.1
tagtggatccccgggctgcggaatcggcacgagggaaaatactaccatctaacataaattattacaataatgggataattttactaatcagacccaataaatttaaccaaacattatcaacacagacatcaaataatctttacacgcatatttctcggtggtctcagctcgggttgggggaggaagaatttctaataaaagatacacaaggattccgcatatttcttttcgtacgctgtccataccaatccgctgcacacgaatgatggccaactggcgagcttccgagcttcccctgacctttttatcccaagttttgtgaatcactccgattttgagggaaacggaaagaaaatatcgtgtgggtaaaaaaaactcaactaattttgggagatcgagaaagatttggccggatttgatatgatgatcagcttcggtattgtatagatatgggactgtctcccggaggttgaagatgctactaaagcgcgtgggt

SEQ ID NO: 70274 - DNA, 598 bp, Oryza sativa
  Clone ID: PAT_MRT4530_70862C.1
gcacgaggggagccacaaagccgtcttaggctgcttcaagattctattacaaggcttgaggatgctcggaaaaaagagcatgaagcaaacaggttacaatcactgtcaagccatctgagtaaactgaaacacaatatacaaacaatggagtggcatttggacgcaaagaatcaagcttctagttcatctatattcagtttagagaaggaagtagaagctgctgaaaaatattgtcaggcaatgaaggatgaagtggttgcattgaaaatgaatcattcaaacctttgaccatggagctatgggttgctctagcatcgattgtatgaatgaaatggatgcttcctgatgtagattgtagagtttttcaagtccatctgtggaatatgggccttcagaaaatactattaatattttcctaaccatctatcaaatactttgcaccagttatttttatactttcaacactcacaagttattttatacaactatggtgcaatacgtaccaatttgccaatgctatgctcagaactataacaaagacaggtttttctgcagtaaaaaaaggtcgtgtctaatcttattaaaacacaaactaatt

SEQ ID NO: 70275 - DNA, 171 bp, Oryza sativa
  Clone ID: PAT_MRT4530_70863C.1
atgcagtgggagaaacgctacgccgctggtcgagaaccaggggtagtcataactcgaccactagaagtaaagcctactggtccgagaaccaggagtagcctcaactctctgccgattgatgtcgaggtacgagagatcgctacggcctacttgtccgagaaccaggagtag

SEQ ID NO: 70276 - DNA, 525 bp, Oryza sativa
  Clone ID: PAT_MRT4530_70864C.1
atgttgcacaccatcagcctcactcctcccgtcatccctctcccttctctctcttcttccctctcctccctctctctcttcttcgcggggagcgccggaacggacgggctggtgggcagtggagcagcagccggcgacctcggcgaggcggcgccctcgtcgccgccttccctctccggcgatggccttcacgcggcacctggaccagtagccagtaacgacaacgacgacatggttggctcgtgcaactgcctgtggctcaagcgacatccccttgtctgcggcagcatcatcgtgatcaacccggtcaccggcgagtccctccatatcccgtcgccgccgttggcgaccagccgcagccgccacgcgggtatgatcagcttcggctaccattcgacgactggcaagtacaagatcgtccatttcccttccaatggcgggctggtggatgaagtcacgctggggggcaccgcatcgtcgtcgtcccctcccgccatggcggcggcaacggtgatggggtggtga

SEQ ID NO: 70277 - DNA, 600 bp, Oryza sativa
  Clone ID: PAT_MRT4530_70865C.1
atgcaattaaatggcccaagcgaccatcaacaaatacaccgccgccgccaccgatgccgccgcacgccgctgccgcagagggaagggtgctgccgggccgccgctgcccttccttccgccggatctagcggagggagggcgcctccgggcggccgctgctcctcccactacacgccgccaacaccgccccacgccactgccgcggaggagagggtgccgttaggccgtcgccgtccttcctcccgctggatctggcagagggagggtgcctccgggtggacaccgcacctcccgccgcacgccgccgacgccgccgcacgtcgctacagcggaggggagggcgttgttgggccgccgccgcccttcctcctaccgaatctggcggagggagggcgcctccgagcggccactgctcctcctgccgccgcctccgccgccgggagagaagaaagagaagagaaggtgaagagaagaggagaagagaagaaactgcggtggagagagatagagagaaagtgcggtgaagagaagaaaagaggaggagaaggtggagagagagagagtgcggtgtgtgggtgggctgtggataagaacggctag

SEQ ID NO: 70278 - DNA, 1067 bp, Oryza sativa
  Clone ID: PAT_MRT4530_70866C.1
tctcagcgggtacaccatctcttcatttcgtattccttgtcaagatccaccaaccgttctcgaatgatcgagaaggcgcagagtatggtcgtttgtctttacatgatccgataaggccttatccgctctaggcattgctagccgaagttcccttaggttcctcagagaccttgtcggaacggcgtaaagggacatgaggataggtttcaactctaggtgtcgtcatggtaagggatttctgggtaaaacgcttggcgatactgtgtacctgatatcaactttgttggagtaaaggtagcgggagaatcgctacaccgctggtcggggaccaggggtagtcataactcgaccacttgaagtggatgcagtgggagaaacgctacgccgctggtcgagaaccaggggtagtcataactcgaccactagaagtaaaggtagtgggagaatcgctacaccgctggtcgaaaactaggtgtagccttaactcgaccaccagaagtagaggtgggagagatcgctacagcctactggtccgagaaccaggagtagcctcaactctctgccgattgatgtcgaggtacgagagatcgagtagaattatctctcgagcaccaatggaagttgcggtgcgggagatttctacgatttactggttcgggaaccagcgagtagaatcatctctcgagcaccaatggaagttgcggtgcgagagattgctacaaccttttctcgaatagcccagctatggccggtgctatgagataggtcgtcggtcttcgttggtaggttgggtgcgataactctgcatttgtcgagaacgttctcgataatggagtgtgctcgaccacaacctactcgagtgctcaattgtttcttattgcgtactcgttcgacatcatatgatctgacatcttttggtacgccgcgtatcttgaggcttggatgatctcgatagaccgagttgtcgatgacgatgatggttccgatttggtcggaagatgcacttcagttgggttagatctcctcacagccgaagtcgttgagtagcttgttgttggagaatccat

SEQ ID NO: 70279 - DNA, 532 bp, Oryza sativa
  Clone ID: PAT_MRT4530_70867C.1
tcggctgcaattggcgcatttttaactgtttttcctgactatcaagacagagttgctaggcatgaagctgctcattttttggggatagttctctcgtgttgcactccaggtgtttgtagttttgccttacggaagagtagtttcagttctgctccatggcttgcagtggttgattactaggggttgatcactagaggtgtgattcatgcttgtcagtactggctgtggtccagtatatgaatgatttgaatgctgtaagaggaacaaaccagaagaaaacagatcggggaagcttctggacctggctcttctcgctgtttggttgttgcaaaaaggaccaagagctgggattgccagtatagctgaagcatttcatctgtatgtatgttgtgaattactcaggtctgcaaagaaaggaaacgtgggtaatttggttcctcttctttatttggcttccttttttttgtgtgtatatatgtaattttgtcatgaacctgttcccgctgcttcccgggcgttcagggccaatagc

SEQ ID NO: 70280 - DNA, 2182 bp, Oryza sativa
  Clone ID: PAT_MRT4530_70868C.1
gacaaaactacacaccatcacgagaacctcctcgtggcggcgagctctcgcgactcgactctcgcgtcgcgcgcgcgcacggcgccatcaatcgattctcacatccatccatctgcctatctatctctcgcaattctggcggcgcgctgcgcgcatagggggggatcgaatttgatctagtggtgatggaggcggcggcggcgatggaggcggggcggaagctggcggcgcggcacccgcacgggcggagcaggacggcgcacaacatgtcgtcgtcgtcgctgcggaagaagtcggacgccgcgctggtgcggaaggtccccgtggcgccgctccgcccgctgctcgccaacctccaggaggtcttcctcgccaccaagctcgccgtcctcttccccgccgtcccgctcgccatcgccgcccagtgcttccgcttcgaccaggtgtgggtgttcgctcttagtttactgggcctcatccctctcgccgagagagtcagcttcctcacagagcagattgcactctacaccggtcccaccgtgggcgggctgctgaacgcgacgtgcgggaacgcgacggagctgatcatcgcgctgttcgcgctgctcaaggggaagatcgaggtggtcaagtgctccctgctgggctccgtcctctccaacctcctcctcgtcctcggcacctccctcttctgcggcggcgtcgtcaacctcggcgcccgccagccctacgaccgcaaccagtccgacgtcagcaccgccctcctcttcctcgccgtcctctgccactccgccccgctcctcctccgctacgccgtcgccgctggcgagcactccgtctccgccacctcggccgcggcgtccctcgacctctcccgcgcctgcagcttcgtcatgctggcgtcctacgtcgcctacctcttcttccagctcaagacgcaccgccagctgttcgagccgcaggaggtggacggcggcgacgccggggacgacgacgaggagccggcgctcgggttgggcagcgcgctcttctggctcgccctcatgaccgccgtcatctccgtcctctccgagtacgtcgtcggcaccatcgagcccacctcgcagtcatggggcctctccgtcagcttcatcagcatcatcctcctccccatcgtcggcaacgccgccgagcacgccggcgccatcatcttcgcgctcaagaacaagctggacatcactcttggggtagctctgggatcggccacccagatatccatgttcgtggtgccactgagtgtgctcgtggcctggatcatgggggtccaaatggatcttgacttcaagctgctagagaccggctctctgttcatggcggtgctggtgacggccttcaccctgcaggatggaacatcacattacctgaaggggattctcctcctcctgtgctacattgtcatcggcgcatgttttttcgttgcaagacaacctgcaggccatgcaaacagcaatggagccttgctggatgtaccaaccggttccatgagtgttcaggccgcatgatggatcaagatgtctcctgaacaaaacatggaggacagcaagcaatgtaccttggctgtcaagtcacttgggagggtagctcttcatgtgccagcaagacagatcatcatgatcatcagagtttcctgaagggatgcattggaagttgcacggaatgcatgtcaaggtgttactaatccttataggataaggatgcaataaggatatccatatatatttgtgcccaatcctatacccagtgtacatgagcacatttgttccatctatgcagctctcaataagatagtatttgcggtacaaatctatgctctcctaagtcctaacagggtgatgatgtaagagcagatcatgtttatgtctgcaactctacttctctatttcatcttaaaactagaatgtttttcaccatgatccgataatgaagtgacaactgccgaggtttcaagcagcgtaacaaaaaagaagattaggacaaccaaaagaaacgcctaagaaaacccaccatttctatgaattgagactgaaaactcctgttttgttttctggcatctccttttatcaagatgaaaacattctgttcatttccttccatgttgatataaatgtacagttcgtaaggaacagaagaagttttttctttt

SEQ ID NO: 70281 - DNA, 151 bp, Oryza sativa
  Clone ID: PAT_MRT4530_70869C.1
gaggatggggcgtgtctccgtcaactgccaccaggggaggggtgattcctgctcccctaccctaaatagcatgttgcgaaccttctgaaagcttcgggaggcggcggcgccgatcacctcccagaggaacctgaggcggcgactaggaagg

SEQ ID NO: 70282 - DNA, 4746 bp, Oryza sativa
  Clone ID: PAT_MRT4530_7086C.1
atgacggcacagcaacgcctgggtgctggcggacggtccgccaccaccaagacctccggcgccgccactaccggttccgcgtcgtcaagacggagagcgcggcgagcggcggctgctgcacgccattcggctaccactccctcgtcggcgcctccgactcgggaggatcagcatgaagagccggatgcccgcctcgacattgagcgccgacgtagtgatcggcgtactccccgcgcaacggagggtgcctcttcgtccagggtgtcacctcgacatggacgtgaggatcagccctccgtgcccccggttggtggtgttggctgtagagcctttgtggcgagtcttcggaatgtccgttggcccccaaggttccggcccaccatcaccgagaagtatgatgggagcgtcaaccccaccgagtttctccaggtctatacgaccgggatcgaggccgctgggggagacgacagggtcatggcgaatttctttcccatggccctgaagggacaggcgcggggttggctaatgaacctgccacccgcgtcggtccactcctgggaggatttgtgccagcagttcaccatgaactttcaaggcacctatccacgccagcgtttctgccaagtccgcaatactataccttgcatccctgcacacgcggtgatctacgcgttcagggggggtgtgcggcacaaccgcatgctcgaaaagattgcctccaaagagccccagactaccgcagagctttttcagctcgcggaccgagtggctcgtaaggaggaggcctggacctggaacccctccggttccggtgtggcagcttcggccgcccccggatccgccgctcagacagggcggcgtgacaggaggaggaagaaaaggtcggtccattccggcgacgagggtcacgtcctcgccgtcgagggcgctccgcgggccacccgaaaggggaggcctgcgagcgacaaaaagaaagaggctggtactcccagcagggagcgcccagccagcaagtggtgctccgtccacaacacctccctccacgatctcgcggactgtcgcgcagtcaaaaacttggctgagcgaacgaggaagtgggaggaggacaggaggcaggaacgccgtgagggcaagtccgcggcagttccctccggtaaacggcgaagtgaggccaaacagaaggcccccgccgctgacatcgatgacggtgatgatgacctaggtttccaagaacctggggccaccattgccactgtcgacgggggagcgtgtgctcacgtttctcgccggagtttcaaggccatgaggcgagagcttctcgccgcggcccctactcatgaggcgacgcgtcgggcgcggtggtcggaggtggccctcacctttgaccagaccgaccacccaccgtgcgttgcccggggagggcagattgcgatggtggtttctcccaccatctgcaatgtgaagttggggcgtgtcctcatagatggaggagcggctctcaacatcctttcccccgcggcctttgatgctatcaaggccccggggatggtgctccagccgtctcaaccgatcatcggtgtgacgccggggcacacatggccgttaggtcacatcgacctaccggtcacctttggtggatcagccaacttccgcacggagcgggtgaacttcgatgtggcggacctcagtctgccctacaacgcggtcctggggaggcccgcgttggtgaagtttatggcggcggtccactacgcctacctccagatgaagatgccgggccccggtggccccatctctgtccgtggcgaccttaaagtcgcgcttgcttgcatggagcagcgcgcggaccacctcgctgctgcgaccaagcccgagggtggtgacgagaggcttggcacctccgcccccaccgccccgaggcagcggattgccacatgcgacgaggtcccggccccggaacgtcaagccttcatccgcgaggaggtggcgaggcttctcgaggccggattcatccgtgaagtcatccatccggagtggctggcgaacccggtggtcgttcccaaggcgaacggcaagcttcggatgtgcatcgactacaccgaccttaacaaggcatgtcctaaggatccttaccccctgcctcgcatagatcagatcgtcgactccactgcggggtgcgaccttttgtgttttctagatgcatactctggttaccatcagattcgcatggctagggaggatgaggaaaaaactgcgttcattacccccgtaggaacctattgttatacatcaatgcccttcgggttaaagaatgcaggtcctacttttcaacgtactactcgaatttctttgggtagccaaataggacgtaatgttgaggcttatgtcgatgacttggttgtaaaaacgcgcaaccaagaaactttacttttagatctagcggaaacttttgagaacctccgctccgcccgcataaagctgaaccccgataagtgtgtgtttggtgtacctgcgggcaagcttctcgggttcttggtctctgcccgaggcattgaggccaaccccgagaagattcgagctattgagcggatgcgcccccccagcaaacttagggatgtgcaatgcgtcaccggttgcatggccgccctaagtcgtttcatatcaaggctgggagagaaggcgctacccttgtttaagctcctcaagcgctcggggccgtttacttggacggaggaagctgaacatgccctcactcagttaaaggcatatctcagctctcccccggttctagtcgccccggagccaaatgagtccctgctactttacttagcagcgaccccccaagtagttagtgcagcgttggttgtggagcgcgatgaggacaatcctcattctgcgcacccccactctgtgccgacttggcccgggagcaggcagggaggagaggcccccgagtcgaacggtggcctaaggcccccgacgaccggagtcggctctctgcccgcttgtcagacggtgctgggtgcccccgaccctcaggaaggccccgaggccactgcgggaaggccgcacctaccaccctttgaccccgaggctaaccctgtgctgattcgacccgggagagagcagggagaagaggcccccgagccgaacggaggcctgaggcccctgacgaccggagctggccctttgcccgcgtgtctgacgacgccaggagcccccgacccccagggcggccccgaggccactgtgggaaggccgcacctgtcatcttcggaccccgaggtcatcagcgcaggagacgagtgtgccccgagaggccactgggacgaagagcaccccggggatacggcccttagcgaagaggatcggccccgccgaaaggtgcagcggcctgtttactttgttagtgaggccctccgggacgccaaaacccgataccctcaggcccagaagatgctttacgctattctgatggcctcgaggaaactgcgccattatttccaagcgcatcgggtcactgtggttacgtcctaccccctcggccaaatcttacataatcgagaaggtaccggacgggtggtaaaatgggcaatcgagctttctgagttcgatctgcactttgaaccacgccacgctatcaagagccaagccctcgccgattttgtggcagagtggaccccggctccagagaccgtctcaatccccgaggccagcgcggacccctcacagctgcctcacgccgcccactgggtgatgcaattcgacggttctctgtctcttcagggcgccggtgcaggggtcacgttgacctctccaaacggagacgtcctcagatacttggtccgtctcgactttcgagcgactaataatatggcagagtacgagggactccttgccggactcagagtagcagctggactggggatccgccgcctcttggtgttaggcgactcccagctggtcgttaaccagttcactaagtggcccgaggcttatccggtcgtcaagatcgataagcactctgctcttaaattcattaagggcatcacggcccgttttggagtgcctaaccgtattattacggataatggcacccaattcactagtgaactcttcggcgactactgcgaagacatgggcatcaagctctgcttcgcctcacctgcccaccccagaagcaatggccaagtggagcgcgccaatgcagaaatcctcaaaggccttaaaaccaagaccttcaatattctcaagaagcacggcgattcatggatcgaggagttgccagcggtgctctgggcaaaccgaaccacaccaagccgagcgaccggggaaacgcctttcttcctcgtctacggcgcagaagcggttctcccatccgagctcaccctgaggtctcctcgggccaccatgtactgcgaggctgatcaagatcagcttcgcagagatgacctcgactacttagaagagcgaaggcggcgcgcggccctccgagccgcgcgctaccagcagagcttgcggcgctaccatcagcgccacgtccgggcccgatcactctgcgtcgacgacctcgtcctacgccgcgtccaaacgcgtgctggattgagcaaactctcaccaatgtgggagggtccgtatcgagtgatcggtgtcccccggccgggctcggtacggctggccacgggcgacggcacggagctgcctaacccatggaacatcgaacaccttcgtcgcttctacccctga

SEQ ID NO: 70283 - DNA, 294 bp, Oryza sativa
  Clone ID: PAT_MRT4530_70870C.1
atggtggctttcctctggctactgccaccaccgtcgttcaccaaatgcctcactgtcaaaggcatccccgcctcgaagatcgacatagcccgcatcaacaagaccctttccacggtgacgaccacttcatgcagatctcgtcctcagcctccccagtgggacggtcagacgctagaccagatggatcctcctacatattctgtcctccgagggaaggtgcgagttgtaactgcgaagtttgtctatgctgctgcttgtttacatcgttttggtgaaatcgtctttttgccctag

SEQ ID NO: 70284 - DNA, 144 bp, Oryza sativa
  Clone ID: PAT_MRT4530_70871C.1
atggcgaacacagccgaacacaccgccgctccctgccacatcgccggcgctgcctccggatccggatgggtgaggggcgccaccaccggggagtgcgacaccaagctgccaccgctcccgctcgcgcccgccccacgcccgtga

SEQ ID NO: 70285 - DNA, 347 bp, Oryza sativa
  unsure (1)..(347): unsure at all n locations
  Clone ID: PAT_MRT4530_70872C.1
acaaacaactccgcgcccccgttaaaaaatcctctaggccacctccaataaattacccaanctcaaatctgcataaatactaatcaacaaaattaacaacaaaaaaatctttctacagaaccttcccttttattaaactttaaataaatacaaaaatggttttaaaaactttttcaaccaactgcaactcttttcccttgcactttctaaaaaaaaaaccaccctattccccttttcaaacgcccttaccaaatttatagaacccgtcacttccaaataactctttatcacatatctttactaaatttggccaccaatcttcttcaccgaggtatccacgaactcct

SEQ ID NO: 70286 - DNA, 394 bp, Oryza sativa
  Clone ID: PAT_MRT4530_70873C.1
atgctgccagatctcgacatcagagatgagcctagccataccccatctggcacctacaggggccggcaagagggatctagcgccatctcttatctcaccgagtacggattcgaggaggagattaccctgtcgtcgactacgagttgatgaataaagaacaacaccagcttcggccaacaggatgtagggctattacctgtaagataggggtccgaacctgtataaaattatatgtctccatctcttttacctcaatctcgcatataccctgataccaacgatccccatacatccaaataccctagtcgtgtcgacaatttgctggtgtggtagtaaggaaggctgggttaaacggcgagagtaacgatgtaaaaaaaaaacgacgaaccagatc

SEQ ID NO: 70287 - DNA, 528 bp, Oryza sativa
  Clone ID: PAT_MRT4530_70874C.1
cgcgcgaaaagcagcatctcctcctccgacgagcattgatctgatcgagcgcgcgtcgatcgtcggagaggatggccggcaaggtggctgcgccgctcgcgttccgccgcgacgtcgtcgtgcgtggcacgctcggcggcggccggaggagcggggtgtccgggctgtggagcaatggcggcggcggcggggggcggctcgtggcgccgccgtcggcgggtgcgccggcgcaggctgaccccaagaaccggtctgacggcggcgggcggtgcgcgaccaaggacgacgagcgcgcggggaaggatgaggcggcggaggccgtggtgttcgtcgacggggaggacgacgaggcggcgatcgacggcgacgatctgtccgggttcaggggcctggttcttgatctctcttataggcctgtgaacgttgtctgctggaagcgtgcaatttgcttggaattcatggcgaaggccgatgtattggagtactatgaccagactgtctcctcacccagtggatcattctacatcc

SEQ ID NO: 70288 - DNA, 216 bp, Oryza sativa
  Clone ID: PAT_MRT4530_70875C.1
ttgctgcctcctcctctcgtcttctccttcgggggggggagctacttaacttattcaaccatgggtaaggagaagacgcacatcaacattgtggtcattgggcacgtccactccggaaagttgaccaccacgggccatctgatctacaaggtcggaggcatcggccagggtgtgtccgacaggggccccagggtgacctacgcccacagctagagc

SEQ ID NO: 70289 - DNA, 348 bp, Oryza sativa
  Clone ID: PAT_MRT4530_70876C.1
atgcagcatggggcagagaatgcatcaaaagatgacatccatggactgaagaaaccgctcctcttctatctccaagatccacatccacccagtcggaaggggacagatcacaaggtcagagacataaggcagttctgccatgtaatcaaacaaataggcgttggggcgaagaaatcacatgctttcttggagtgcgccaacggcgaaagagacctctggaagaggagactcggcagcggcggcagcggcaagggccgggaggggacgtacattcccaccgcccatctgggggacgagcgcgctggaatccgagtaggatggcctccgctgccaaaaaaggaaaaatga

SEQ ID NO: 70290 - DNA, 321 bp, Oryza sativa
  Clone ID: PAT_MRT4530_70877C.1
cccacgcgtccgggaggaggtgtagatattttttcatatggccatttgtggcttcgaaacgaaccattgttttttcggcgccataccgaatactcagcagcctgatgaacaccattgcagggatcttggtggggggcttgagaattgacggtgatcctttcccacattggtcccaatgccaaataattgccaattaaaagcccagggaacgtgcttgggagaactaactacttgacgcaataatttttcgctccaaaactgcgaaggactgaacagacaggggcgattcttgtctcctgctatggcgaaacactgatatga

SEQ ID NO: 70291 - DNA, 1759 bp, Oryza sativa
  Clone ID: PAT_MRT4530_70878C.1
cgaaagagcgcccaatacgcaaccgcctctccccgcggttggccgattcattaatgcagtggcacgacaggtttcccgactgaaagcggcagtgagcgcaacgcaattaatgtgagttagctcactcattaggcaccccaggctttacactttatgcttccggctcgtatgttgtgtggaattgtgagcggataacaatttcacacagaaacagctatgaccatgattacgccaagcttggtaccgagctcggatccactagtaacggccgccagtgtgctggaatttcgagcggccgcccgggcaggtacgcagaattagctggttgaataatatagtcaacggtaacactgggaatacataacaaaaggatatacaaaacattgtatccgatcccgatggctaggccttgtttcttgtaaaactctaggcgcatctgacaatatatggtcattggtcagctataacagccggtcagtatttttcagaaaggtttaaatcgaaacaaatgagacaattagcaggtcagcatataaggaggcaacaattggctcctatcaacaatttagaacacatgaaacaagggaaatattttaacctcgcaccaaaacataaatttctgcgtatgccgatctctttcaccaaaatctgtgcttaacagccgccttctcttcaataatgggcaaatggcaatgcaaccatgatcaccaaccattacacccaagctatgtcgaagatagtctcagccagcattacaagctcagtggagatatgctggtttttaagcttttgcttagtgaggcagcaactggtgcatgagtcgattaatcatctcataactggtgaacgtaatgacagcattcggggttgtccttagcaaattcgtagcacaacctctgtagaagccgggaattccctccttctgatacacttgcttgatacagtcgattacaccggtgtagtgcacagcaccatgacgagcacgaccttgttcttgcaatttagatcgtacaacctcatgggggtatgttattattgaggccgctactttagatcctgatgaacaaatagctaattttcctgggctgagcttatcgactgtagtgttgtctcttttagcaaagtaaagcttcacattctcgtagactgggagctggatggccacatgagtaaccccagcttcttcttctgcaatccgccgtaaagcagaccaaatgcttgtgtaaggtaccacacctgtcctcatcccttgtgtttgtagcctagtcttcacaacccacaatggattagttgcaacagctgttgcaatcccggcacatgaagcagctagaatatttgcttggacagacaattcgccagtgttatcaccttgagaatgaagaagacccttcaagtgattataaactgaaaacgtaaccaaacaagcatcaatcataaagcaatatttagcagcccatgttggaaacaatgctactatcgttggtgaaaggccacgatacaacccaggcaggccttcattttttaatatgtgctgaaaacctgaaattattaccctacctgcagccgcgtcttgatcacgtccagcgggcacagcaccgttgcggagatcacacctgtaaagcctctcgccctcactttgagtagctgcagcgagcagccataatcctatgacagccaaatattccctttgtccatgaatataaggtattatgctaactgggaggaaaaactcgaggaggatgtcaaatctagacgccat

SEQ ID NO: 70292 - DNA, 693 bp, Oryza sativa
  Clone ID: PAT_MRT4530_70879C.1
ccggccggggcttctttctcgccttcttcagtccgcggcgttgttccagaagcttctggaaagtcggggaaacccccatggcgtccggcgatccggtggacgcgccggcggcggcggcggagtcgatggaggtggaggcggaccagtgcctcgacctgacgagctgccagctgcacgatctgagcgaggtggagatcccgcccaccctggaggagctcgaactcacggcgaaccgcctcgccgccgtcgacccccgcatcggccgcctcccgggcctccgcaagctctccttccgccagaacctcctcgacgacgccgccgtcgcgcccctctccacctgggccgacatcgctgggctgcaggtggttgtgatttccgtctctctatttgggaatctagggatttaggaatgtgtggttgcgccagtccttttggggctcgtgcgatcgtaataatgctcttgtttacccaattataagcttgtgtaaaccatttctgctatttcttttattaaagcaacaacctttttttgttgcagttacatcatgacacagaggatttctgtaagaaaagaactctataaattgtgcctttagatatacttggttaggtaaatatgtataccgtatacatattgaggtgatcaatttggccatgttttcttgtttcaaaaaaaaaaaaaaaaaagcggcc

SEQ ID NO: 70293 - DNA, 5961 bp, Oryza sativa
  Clone ID: PAT_MRT4530_7087C.1
atggccgagcaaggaaaagcgcacgacctctctccgagtgtgagcggcgacgacggggagccgaatccacgccgtcgagctcgtactcccccacctcctccgcgccaaagccctaagcagggggaggcgcttgagagggtcgacaaatccgtggcaccaccagtcgcaggtgatgcaggagaacggcgagatggggagcgtcgcctcctcgtctacggcgacggcagcacgcctcagggcgcgcttcaggctgttggcgcgctcctacgtcacccgactgtcgtccctgacccggagtctccagcccagcgatggctggacgacgtggccaacttggtcatgacggcacagcagcgcctgggtgctggtggacggtccgccaccaccaagacctccggcgccgccaccaccggttccgtgtcatcaaggcggagggcgcggcgagcggcggcggctgcacgtcattcggctgccactccctcgtcgacaccttcgactcgggaggatcagcatggggagccggatgcccgcctcgacatcgagcgtcggcgtaatagccggcgtactccccgcgcaacggagggcgcctcttcgtccagagtgtcacctcgacagggacgtgaggaccagccctccatgcccccggctggtggtgtcggctgtagagcctttgtggcgagtcttcggaatgtccgttggcccccaaggttccggcccaccatcaccgagaagtatgacggaagtgtcaaccccaccgagtttctccaggtctatacgaccgggattgaggccgctgggggtgacgacagagtcatggcgaatttctttcccatggccctgaagggacaggcgcggggttggctaatgaacctgccacccgcgtcggtccactcctgggaggatttgtgccagcagttcaccatgaactttcaaggcacttatccacgcccaggtgaagaagcggacttgcacgcagtacagcgaggggatgatgaatcccttcgctcgtacattcagcgtttctgccaagtccgcaatactataccttgcatccctgcacacgcggtgatctacgcgttcagggggggtgtgcggcacaaccgcatgctcgaaaagattgcctccaaagagccccagactaccgcagagctttttcagctcgcggaccgagtggctcgtaaggaggaggcctggacctggaacccctccggttccggtctggcagcttcggccgcccccggatccgccgctcagacagggcggcgtgacaggaggaggaagaaaaggtcggtccattccggcgacgagggtcatgtcctcgccgtcgagggcgctccgcgggccactcgaaaggggaggcctgcgagcgacaaaaagaaagaggctggtactcccagccgggagcgcccagccagcaagtggtgctccgtccacaacacctccctccacgatctcgcggactgtcgcgcagtcaaaaacttggctgagcgaacgaggaagtgggaggaggacaggaggcaggaacgccgtgagggcaagtccgcggcagttccctccggtaaacggcgaagtgaggccaaacagaaggcccccgccgttgacgtcgatgacggtgatgatgacctaggtttccaggaacctggggccaccattgccactgtcgacgggggagcatgtgctcacgtttctcgccggagttttaaggccatgaggcgagagcttctcgctgcggcccctactcatgaggcgacgcgtcgggtgcggtggtcggaggtggccctcacctttgaccagaccgaccacccaccgtgcgtcgcccggggagggcagattgcgatggtggtttcccccactatctgcaatgtgaagttggggcgtgtcctcatagatggaggagcggctctcaacatcctttcccccgcggcctttgatgctatcaaggccccggggatggtgctccagccgtcccaaccgattatcggtgtgacgccggggcacacatggccattaggtcacatcgacctaccggtcacctttggtggatcagccaacttccgcacggagcgggtgaacttcgatgtggcggacctcagtctgccctacaacgcggtcctggggaggcccgcgttggtgaagtttatggcggcggtccactacgcctacctccagatgaagatgccgggccccggtggccccatctctgtccgtggcgaccttaaagtcgcgctcgcttgcatggagcagcgcgcggaccacctcgctgctgcgaccaagcccgagggtggtgacgagaggcttggcacctccgcccccaccgccccgaggcagcggattgccacatgcgacgaggtcccggaagacgcgctcgtctccttcctgcgggcaaaccctgacgtcttcgcatggagaccagcggacatgcccggggtccccagggaggtgattgagcaccgtctcgccgtgcggccgggcgcaaggccggtccggcagaaagtgcggcggcaggccccggaacgtcaagccttcatccgcgaggaggtggcgagacttctggaggccggattcatccgtgaagtcatccatccggagtggctggcgaacccggtggtcgttcccaaggcgaacggcaagcttcggatgtgcatcgactacaccgaccttaacaaggcatgtcctaaggatccttaccccctgcctcgcatagatcagatcgtcgactccactgcggggtgcgaccttttgtgttttctagatgcatactctggttaccatcagattcgcatggctagggaggatgaggaaaaaactgcgttcattacccccgtaggaacctattgttatacatcaatgcccttcgggttaaagaatgcaggtcctacttttcaacgtactactcgaatttctttgggtagccaaataggacgtaatgttgaggcttatgtcgatgacttggttgtaaaaacgcgcaaccaagaaactttactttcagatctagcggaaacttttgagaacctccgctctgcccgcataaagctgaaccccgataagtgtgtgtttggtgtacctgcgggcaagcttctcgggttcttggtctctgcccgaggcattgaggccaaccccgagaagattcgagctatcgagcgtatgcgcccccccagcaaacttagggatgtgcaatgcgtcaccggttgcatggccgccctaagtcgtttcatatcaaggctgggagagaaggcgctacccttgtttaagctcctcaagcgctcggggccgtttacttggacggaggaagctgaacatgccctcactcagttaaaggcatatctcagctctcccccggttctagtcgccccggagccaaatgagcccctgctactttacttagcggcgaccccccaagtagttagtgcagcgttggttgtggagcgcgatgaaaacaatcctcatttcgtgcgcccccattctgtgctaacttggcccgggagcgagcggggaggagaggcccccgagtcggacggtggcctacggcccctgacgaccggagtcggccctctgcccgcttgtcagacggtgctaggtgcccccgaccctcaggagggccccaaggccactgcgggaaggccgcacttaacgccctttgaccccgaggctagccctgtgctgactcgacccgggaaagagcagggagaagaggcccccgagccgaacggaggcctgaggcccctgacgaccggagtaggccctttgcccgcttgtccgacgatgccaggagcccccgacccccaggacggccccgaggccactgagggaaggccgcccctttcatcctccgaccccgaggtcatcggcacagaaaacgagtgcgccccgagaggccacttggacgaagaacgccccggggatgcggcccctagcaaagagggtcggccccaccgaaaggcgcatcgggtcactgtggttacgtcttaccccctcgggcaaatcttgcataatcgagagggtacaggacgagtggtaaaatgggcaatcgagctttctgagttcgatctgcactttgaaccacgccacgctatcaagagccaggccctcgccgattttgtggcagagtggaccccggctccagagaccgtctcaatacccgaggccagcacggacccctctcagctgcctcgcaccacccactgggtgatgcagttcgacggttctctgtctctccagggcgctggtgcgggggtcacgttgacctctccaaacggagacgtcctcagatacctggtccgcctcgactttcgagcgaccaataatatggcagagtacgagggactccttgccggactcagagtggcggccgggctggggatccgccgcctcctggtgttaggcgactctcagttggttgttaaccaagtctgtaaggagtaccggtgctctgacccacagatggacgcctacgtacgccaagtacggcgtatggagcgccactttgacgggatagagcttcggcatgtgcccagacgggataacatgatagccgacgaactctcacggctcgcgtcctcgcgagcccagaccccaccgggcgcctttgaagaaaggctttcccagccgtcggcgcgacccgaccccttaggggagatggatgcgcctgaccggcccccgaggcccgtcggagtccaggcctcgggacctgaagggagcgctccaagctcccttagattgattgcttggatctctgagatccaaacatacctcacagataagactctacctgaggaccgcgaagggagtgaacgcgtacaacgcatttccaaacgctacgtgttggtagaagggaccctctatcggcgcgcggctaacggaatcctcctgaagtgcattcctcaggaacaaggcgttgagcttcttgctgacatccatgagggcgagtgcggagcccattccgcctcgcgcaccctggttggcaaggcctttcgtcaaggattttattggccgacagctctcaatgatgcagtcgatctggtccggcgatgcagagcgtgtcagttccacgccaagcaaatccatcagccggcccaggccctgcagatcataccactgtcatggccatttgctgtctgggggcttgatatcctgggaccgttcaaacgggccccgggcgggtttgagtatctgtatgttgcgatcgacaagttcactaagtggcccgaggcttatccggttgtcaagatcgataagcactctgctcttaaattcattaagggcatcacggcccgttttggagtgcctaaccgtattattacggataatggcacccaattcactagtgaactcttcggcgactactgcgaagacatgggcatcaagctctgcttcgcctcacctgcccaccccagaagcaatggccaagtggagcgcgccaatgcagaaatcctcaaaggccttaaaaccaagaccttcaatattctcaagaagcacggcgattcatggatcgaggagttaccagcggtgctctgggcaaaccgaaccacaccaagccgagcgaccggggaaacgcctttcttcctcgtctacggcgcagaagcggttctcccatccgagctcaccctgaggtctcctcgggccaccatgtactgcgaggctgatcaagatcagcttcgtagagatgacctcgactacttggaagaacgaaggcggcgcgcggccctccgagccacgcgctaccagcagagcctgcggcgctaccatcagcgccacgtccgggcccgatcactctgcgtcgacgacctcgtcctacgccgcgtccaaacgcgtgctggactgagcaagctctcaccaatgtgggagggtccgtatcgagtgatcggtgtcccccggccgggctccgtacggctggccacgggcgacggcactgagctgtcaaacccgtggaacatcgaacaccttcgtcgcttctacccctga

SEQ ID NO: 70294 - DNA, 487 bp, Oryza sativa
  unsure (1)..(487): unsure at all n locations
  Clone ID: PAT_MRT4530_70880C.1
aaagttataggcaatatcagctgcagccacctgtcctgctacagcaacatgtgcttaacccgggtgaggagttcgaaaggcggcagtatggcatatcggcnaaccccttcctgaaattagctgcagttcaactgaaaaacaaccaagtcaggcaacagctcgcgctggtggcgcaacaatctcactatcacgacattaacattgctcaagccataacacatcatctacaactccagcaggttagtgatctctacttttatcggaatctgtctcaaactcaaactctttttagcttttaacatacccatcaaaatatgaaatctaccctagatactataattcacccaataccattaccacccttttcaagatcttataaaaaattttaacaacataataactctaaaaataaaaaaaaacctcacaaatcatcatatattgacatgtgaaacttttagtaatagtaaaaaaaaaaaaaaattctccc

SEQ ID NO: 70295 - DNA, 168 bp, Oryza sativa
  Clone ID: PAT_MRT4530_70881C.1
cgctggtgcacaagtggcagcgcagctatcggggcgcgcatggctgatggtccgagcgcgcatagcggcgcctacgacgtcactcactaggcgggatacccgtgcctaccacctccctcggtcggtgaggcgcgcctggccctgcgggagctgctccgctgggggcgc

SEQ ID NO: 70296 - DNA, 489 bp, Oryza sativa
  Clone ID: PAT_MRT4530_70882C.1
atggcgtggcgcatccttgtcgtcatgccatctccatatgaatattcatattcttctgtggctgagcggcttcatgtctccaacatggcgcccagtcaaagccgccactggggggatcgtgccataggcgcgcagctgcggcagctcgcagcagcaagggcagccgggcggcggcaggtggaagcagcagggcggcatgcggcattgcggcagcagcaggcgaagactgtgtcgctttcggctccggcggcggcgacggcgtcgttgcgtacgaggagccacacgcgagacaacgtgaaggcagctgccgactacccagtgtaccgcgtacaggaatctttactgtcaccggccttcagctcagctcagctcagcacgctcgcttctgcaggctggctggctggctgctgcagccagcgcttccctttccccaatgctccgacaggggagaaacccctcctcaaggctgaatttattgtcacccactga

SEQ ID NO: 70297 - DNA, 298 bp, Oryza sativa
  unsure (1)..(298): unsure at all n locations
  Clone ID: PAT_MRT4530_70883C.1
gcacgaggagcaacgacacaaccgaccttcgctacactttttgactccagaccttcgctgtgtttgtggaagcctcctcaaataagtcactactcaacatacttacctnattagtatatccttttctctctcaatacctcatccggcaccatgcgtttctctgtcatcctcaccggcgccttcgccgccttcgccatggcccagtccactactcccaccactgcctctgcccctacccccgtgggcctgaccccccagcagtcttctgcccttgcctgcctcgaacagtgcaacccct

SEQ ID NO: 70298 - DNA, 303 bp, Oryza sativa
  Clone ID: PAT_MRT4530_70884C.1
atggagaggggccatttccggcgatggcaccgaggggaggccactgccaacgagggcaatggcattggaggtcgctacgagccggcggtggcggttgttggctactacctccgtctcattataggtgacgtttttgactttttatttgcaaccccggcggaggcagcagcgccggcggctgcgccctcccctccaccggatccggctggaggggaggcagcgatgcccgaggcggcaagcggtggcacaaaaggggaggcagcgggaggcggcggcgccctctcctccgccggatccggctag

SEQ ID NO: 70299 - DNA, 213 bp, Oryza sativa
  Clone ID: PAT_MRT4530_70885C.1
tcggtcgttgctcttattcaccataatcacgcaagtacaatatttgtggtagcctatctaactgttgtcgacatgacggtctgaaggtatgtggtatccataaccctgacagtagcccccgacttcaatgcaaatgaacaagttcatattctcaaccgcagaccttggagtaactgttatcgtgctcgtgtaaccgttctcggtgagttcaga

SEQ ID NO: 70300 - DNA, 441 bp, Oryza sativa
  Clone ID: PAT_MRT4530_70886C.1
atggtggagttgtaccaggatcagttccagaaggacatgtcctcttcctcaagctgcgacatcaggaactcgtgcccggggatagtggagaagggaaagctggagtcattcaatttaccaatatatgggccctccattgatgaagtgaagacagtaatcacacggaacaagctcttttgtattgaccatatcgagctgtttgagtccaattgggatccctacgatgacttggaacatgatggcatgcacattagccctcaccgtgggatgaacgtcgccaagtgcatcagagcagtgtctgagcccttgctggcaagccattttggcgaatatatacttgacaaactctttcagaggtttgcgcagattgtggagaggcaccttgcgaaggagaacgtgaagtactcggtcatagtcttgtcattgaaccgaagagattag

SEQ ID NO: 70301 - DNA, 1114 bp, Oryza sativa
  Clone ID: PAT_MRT4530_70887C.1
ctctattgatgcaatgatatcatcactgtgttacaaattattgtcccccaaaaaacagtaaaaaaaatatatgtaacaggaaataattaacaagtgagaggagaggagagagagaaaaaattagcagaggagggaagagtaattcttggccaggtttttacttgccggacttctccgacgatgtgcccgccgccgtgctgtcttggccggagcagaaggcgtcgcgccggccgtctgggcggacgacgaagtggccgagcgacggcgtgccgctgccggcgacgcggttctcgtcgcagaggaactccttgctgaggacctgctccagctcgaactggaagtcgtggaccagaacgtcggtggggcccttggcggcggtggcgccggtgcgcgcgaggacggcggtggtgaagatggacggcatccgccccggcgaggtcgggttccacccggacggcccgtcgatgagcacgatgtcccacgcgacgtcgtagaggtcgttggggaggtcgttgatggcgaggcggcactcggagaagaggaggttctggatggggcggcactcggcggcgcgcgacgcccgcgccgcgtcgaggaggtcgcggaagtcgcgcaccttggtggtgtaggagacgtcgtaggcctcgagccccgggtggcgcggctccaggtacttgacgtagaactcgttctcctcgaggaagacggtgcggccgccgtggttgagcgccagccagagcggggactcggcgccgaggccgaacacgaggaggttgcaggggcccctggcgcggagcacggcggagatggcgcggatgtcggtgtcggacatgcggtgcgtggcgttggagatggaggcgaagtggaccagcgcgtcgaacaccgggagcggcagcgcggagacggcgccggtgccggagccggcgcttgcgccgccaccggaggagtccgccgccgcgcccgagcccgaggcggaggcgaagtgggaggtgttgtagacgaaggtgacgaacgtggctagcgcgaagcaggtggcgaagaggaggaggaggacgcggcggtggctcgacgacgcggccgcctgtagcttgtctcggctgccatgggatttcat

SEQ ID NO: 70302 - DNA, 156 bp, Oryza sativa
  Clone ID: PAT_MRT4530_70888C.1
aaagaatcccggagtacttttattttgaagttggagcagcgatagcgattattttcctaaaaaaaaattgggatggcaatatcatttatcaacattcagtaacccctatgtgttgcaatagggaattacaagaaaacagcttcattacagaaaatg

SEQ ID NO: 70303 - DNA, 387 bp, Oryza sativa
  Clone ID: PAT_MRT4530_70889C.1
ttgggtgatcacgagaaccaaaccccaaccggggggactcgaatggcaagcaaaacccccacacttcccggcggaggaggcggcggtgacggaggcagcgatggagacggtggagacggctggtggcgcacatgcagggcctatccgggagcggggaggagctggcctacctccacaacgctcctccacaagcgacgacgggggagaaccttgcgcgacaactccgtcgcccatacttcccttgctcgacaaggtccacccgagcgcccactagctcggcttcctctacctcatggaggcgatcgcgtcttttgctttcaacctgagggcgcacggcggtggcgactgcctggtcaccaaggccaattatctcgggatctgctaggc

SEQ ID NO: 70304 - DNA, 6018 bp, Oryza sativa
  Clone ID: PAT_MRT4530_7088C.1
atggccgagcaagcaaaggcgcacgacctctctccgagtgtgagcggcgacgacggggagccaaacccgcgccgtcgagctcgtactcccccacctcctccacgccaaagtcctaagcagggggaggcgctcgagagggttgataaatccgcagcatcaccggtcgcgggtgatgcaggagaacggcgagatggggagcgtcgcctcctcgtctacggcgacggcagcacgcctcagggcgcgcttcaggctgctagcgcgctcctacgtcacccacccgtcgtccatgaccctgagtctccagctcagcgatggctggacgacgtggccaacttggtcgtgacggcccagcagcgcctgggtgctggtggacggtccgccaccaccaagacttccggcgccgccaccaccggttccgtgtcatcaaggcggagggcgcggcgagcggcggcggctgcacgtcattcggctgccactccctcgtcgacaccttcgactcgggaggatcagcatgaggagccggatgcccgcctcaacatcgagcgccggcgtaatagccggcgtactccccgtgcaacggagggcgcctcctcgtccagagtgtcacctcgacatggacgtgaggaccagccctccgtgcccccggctggtggtgtcggctgtagagcctttgtggcgagtcttcggaatgtccgttggcccccaaggttccggcccaccatcaccgagaagtatgatgggagcgtcaaccccaccgagtttctccaggtctatacgaccgggatcgaggccgctgggggagacgacagggtcatggcgaatttctttcccatggccctgaagggacaggcacggggttggctaatgaacctgccacccgcgtcggtccactcctgggaggatctgtgccagcagttcaccatgaactttcaaggcacttatccacgcccaggtgaagaagcggacttgcacgcagtacagcggggggatgatgaatcccttcgctcggggggtgtgcggcacaaccgcatgctcgaaaagattgcctccaaagagccccagactaccgcagagctttttcagctcgcggaccgagtggctcgtaaggaggaggcctggacctggaacccctccggttccggtgtggcagcttcggccgcccccggatccgccgctcagacagggcggcgtgacaggaggaggaagaaaaggtcggtccattccggcgacgagggtcacgtcctcgccgtcgagggcgctccgcgggccgcccgaaaggggaggcctgcgagcgacaaaaagaaagaggctggtactcccagcagggagcgcccagccagcaagtggtgctccgtccacaacacttccctccacgatctcgcggactgtcgcgcagtcaaaaacttggctgagcgaacgaggaagtgggaggaggacaggaggcaggaacgccgtgaggacaagtccgcggcagttccctccggtaaacggcgaagtgaggccagacagaaggcccccgctgttgacatcgatgacggtgatgatgacctaggtttccaagaacctggggccaccattgccactgtcgacgggggagcgtgtgctcacgtttctcgccggagtttcaaggccatgaggcgagagcttctcgccgcggcccctactcatgaggcgacgcgtcgggcgcggtggtccgaggtggccctcacctttgaccagaccgaccacccaccgtgcgttgcccggggagggcagattgcgatggtggtttctcccaccatctgcaatgtgaagttggggcgtgtcctcatagatggaggagcggctctcaacatcctttcccccgcggcctttgatgctatcaaggccccggggatggtgctccagccgtctcaaccgatcatcggtgtgacgccggggcacacatggccgttaggtcacatcgacctaccggtcacctttggtggatcagccaacttccgcacggagcgggtgaacttcgatgtggcggacctcagtctgccctacaacgcggtcctggggaggcccgcgttggtgaagtttatggcggcggtccactacgcctacctccagatgaagatgccgggccccggtggccccatctctgtccgtggcgaccttaaagtcgcgctcgcttgcatggagcagcgcgcggaccacctcgctgctgcgaccaagcccgagggtggtgacgagaggcttggcacctccgcccccaccgccccgaggcagcggattgccacatgcgacgaggtcccggtcaaggaggaagacgcgctcgtctccttcctgcgggcaaacgctgacgtcttcgcatggagaccagcggacatgcccggggtccccagggagttgattgagcaccgtctcgccgtgcggccgggcgcaaggccggtccggcagaaagtgcggcggcaggccccggaacgtcaagccttcatccgcgaggaggtggcgagacttctggaggccggattcatccgtgaagtcatccatcccgagtggctggcgaacccggtggtcgttcccaaggcgaacggcaagcttcggatgtgcatcgactacaccgaccttaacaaggcatgtcctaaggatccttacccctgccctcgcatagatcagatcgtcgattccactgcggggtgcgaccttttgtgttttctagatgcatgctctggttaccatcagattcgcatggctagggaggatgaggaaaaaactgcgttcattacccccgtaggaacctattgttatacctcaatgcccttcgggttaaagaatgcaggtcctacttttcaacgtactactcgaatttctttgggtagtcaaataggacgtaatgttgaggcgtatgtcgatgacttggttgtaaagacgcgcaaccaagagactttactctcagatctagcggaaacttttgaaaatctccgctccgcctgcataaaactgaaccccgataagtgcgtgtttggtgtgcctgcgggaaagcttcttgggttcttggtctctgcccgaggcattgaggccaaccccgagaagatacgagctatagagcggatgcgcccccccagcaaacttagggatgtgcagtgcgtcactggttgcatggccgccctaagtcgttttatatcgaggctgggagagaaggcgctacccttatttaagctcctcaagcgctcggggccgtttacttggacggaggaagctgaaaaagccctcgcccagttgaaggcgtatctcagctctcctccggttctagtcgccccggagccaaatgagtccctgctactttacttagcagcgaccccccaagtagttagtgcagcgttggtcgtggagcgcgatgaggacaatcctcattctgcgcacccccactctgtgccgacttggcccgggagcaggcagggaggagaggcccccgagtcgaacggtggcttaaggcccccgacgaccggagtcggccctctgcccgcttgtcagaaggtgctaggtgcccccgaccctcaggaaggccccgaggccactgcgggaaggccgcacccaccaccctttgaccccgaggctaaccctgtgctgattcgacccgggagagagcagggagaagaggcccccgagccgaacggaggcctgaggcccctgacgaccggagctggccctttgcccgcttgtctgacgacgccaggagcccccgacccccaggatggccccgaggccactgtgggaaggccgctcctgtcatcttcggaccccgaggtcatcagcgcaggagacgagtgtgccccgagaggccacttggacgaagagcaccccggggatacagcccctagcgaagaggatcggccccgccgaagggtgcagcggcctgtttactttgttagtgaggccctccgggacgccaaaacccgataccctcaggcccagaagatgctttacgctattctgatggcctcgaggaaactgcgccattatttccaagcgcatcgggtcactgtggttacgtcctaccccctcggccaaatcttacataatcgagaaggtaccggacgggtggtaaaatgggcaatcgagctttctgagttcgatctgcactttgaaccacgccacgctatcaagagccaggccctcgccgatttcgtggcagagtggaccccggctccggagaccgtctcaatccccgaggccagcacgaacccctcccagctgcctcacgccgcccactgggtgatgcaattcgacggttctctgtctcttcagggcgccggtgcaggggtcacgttgacctctccaaacggcgacgtcctcagatacttggtccgtctcgactttcgagcgactaataatatggcagagtacgagggactccttgccggactcagagtagcagctggactggggatccgccgcctcttggtgttaggcgactcccagctggtcgttaaccaggtctgtaaggagtaccggtgctccgacccacagatggacgcctacgtacgccaagtgcggcgtatggagcgccattttgatgggatagagcttcggcatgtacccagacgggacaacgcggttgccgacgaactctcaaggctcgcgtcctcgcgagcccaaaccccaccgggcgcctttgaagaaaggcttacccagccatcggcgcgacccgaccccttaggggagacggatgcgcctgaccggcccccgaggcccgtcggagtccaggcctcgggacccgaagggagcgctccaagctcccttagattgattgcttggatctctgagatccaaacatacctcacagataagactctacctgaggaccgcgaagggagtgaacgcgtccaacgcatttccaaacgctatgtgctggtagaagggaccctctatcggcgcgcggctaatggaatcctcctgaagtgcattcctcaggaacaaggcgttgagcttcttgttgacatccatgagggcgagtgcggagcccattccgcctcgcgcaccctggttggcaaggcctttcgtcaaggattttattggccgacagctctcaatgatgcagtcgatctggtccggcgatgcagagcgtgtcagttccacgccaagcaaattcatcagccggcccaggccctgcagatcataccactgtcatggccatttgctgtctgggggcttgatatcctgggaccgttcaaacgggccccgggcgggtttgagtatctgtatgttgcgatcgacaagttcactaagtggcccgaggcttatccggtcgtcaagatcgataagcactctgctcttaaattcattaagggcatcacggcccgttttggagtgcctaaccgtattattacggataatggcacccaattcactagtgaactcttcggcgactactgcgaagacatgggcatcaagctctgcttcgcctcacctgcccaccccagaagcaatggccaagtggagcgcgccaatgcagaaatcctcaaaggccttaaaaccaagaccttcaatattctcaagaagcacggcgattcatggatcgaggagttgccagcggtgctctgggcaaaccgaaccacaccaagccgagcgactggggaaacgcctttcttcctcgtctacggcgcagaagcggttctcccatccgagctcaccctgaggtctcctcgggccaccatgtactgcgaggctgatcaagatcagcttcgcagagatgacctcgactacttagaagagcgaaggcggcgcgcggccctccgagccgcgcgctaccagcagagcttacggcgctaccatcagcgccacgtccgggcccgatcactctgcgtcgacgacctcgtcctacgccgcgtccaaacgcgtgctggattaagtaaactctcaccaatgtgggagggtccgtatcgagtgatcggtgtcccccggccgggctcggtacggctggccacgggcgacggcacggagctgcctaacccgtggaacatcgaacaccttcgtcgcttctacccctga

SEQ ID NO: 70305 - DNA, 537 bp, Oryza sativa
  Clone ID: PAT_MRT4530_70890C.1
atttaaaaattaatttcataaatgagagcttatctgtgaggcgaattttttaagcctaattaatccataattattaaaagtttactatagcatcatattgtcaaagtcatgttgtaattagacttaaaagatttgtctcgcgaattagtctaaacttatgaaatgggttttgtaattagtggatgtttaatattttaaattagtgtttaaattcctgaggtgaataagtccctgaaaaccaaacagcccctttacgttaggaggatgagggttgacgatagcgaggggtagaagcaatcggcatcagatatagatggagatgttgcatgtttgcagaagtttgtagtactcctgtgattgagatgaggcaggaatgaaactgggaggtagggtcctttgcaagttaatccaagtctagtcttgctgatgcaagtgtgtcctcccactctgccttggtggtgggctctctgtacctggaacacaactgtttgaaaaatggaacatctactgtacacctctacaaaaaaaaaaaaaaaa

SEQ ID NO: 70306 - DNA, 330 bp, Oryza sativa
  Clone ID: PAT_MRT4530_70891C.1
atgtcgggcagccggctgccgcctcaccttgccgcgtcgcgccgccgctccctagcgtgcgccgtcgccgcccgcatgcgccgccgctccccgcgccgtcgccggccgtcgtcgccggtggccgcgttgccgcgcgccgtcgctcggtcgggccagtctaagccgtgcctgtgtcccggctacgccgcctcgtggccgcccgatcggctagggccgatccggggcatcggttccagtggaccacctcggtggtcccggtccacggtggtctggtgcccttgtgccgctgaccggtggggcctgcttgccggcgccacccctcccccttga

SEQ ID NO: 70307 - DNA, 116 bp, Oryza sativa
  Clone ID: PAT_MRT4530_70892C.1
atttatattataatgataccattcttgataagtttgagggggggtatttacggatacggatggcgagtagcaactggttcttacagcaacattttccgtgtgcttggttgtgggcc

SEQ ID NO: 70308 - DNA, 3521 bp, Oryza sativa
  Clone ID: PAT_MRT4530_70893C.1
atggaatctatggaggagcgtttgatggatactctcaaggcactagcactcaaggtggatggtgtggaggacatcgccaagcgtttgacgcagatcgacctcaagctggcgcagcaaggcgagtggctagatcgggtgcagacgaaagtggatctctccatgacgtccctcggccaggttcagcaagaacagagtcaggtgtggaagttagaagtgggttggcatgattggaccatgttaaaaatggctatcgctggagaatttgagggggcacagcttggtaatgtgggcaagagacattttcagaagagagatcctgttgtttggaaacaacctgaaaagcctaagttagccactggggagttatggaaagcacagcaactcaaggaatatcgtcgagctcacgacctttgtttcaagtgtggggataagtatgtgcctggacatgtgtgtgtgaaaccagataatgctcagctaaaggccatggaagttcaggaggatcaggtgattttgtctgatgataatttggatgctgtggtggcatctgacatggtggaagatgattgcaatttatctttgcatgccatggctggtacatgttctgcttctactttacagttgcgagcaatggtgggcaatcaagttattctgattttggtggattcaggcatggactggttgaccaaacatagccctatgcagtgtgattgggttgctagaagcattcaatttccctatcaaggtgatttgataaccttgcaaggcattcagtctactcctttttctgcagttactgaggcatctgttcatcaggtggttaagtggactcaaggcaattatatttgggctatggcagtacttgaaccagatttctctaagggctccccacctgttgaactagctgttcagtcagtattggataagttttcttccgtctttactgctaccaattctttgcctcctcatcgtgtgttggaccactctattgctttgattccaaattcggtccctgttaattccagaccttataggtattctccaacacaaaaagatgagattgaaaagcaagttttggagatgttgaatgctggtttgattactcctagttgcagtccatttgcttcacctgttttgttagttaagaagcaggataattcttggaggttttgtgttgattatcggcggctgaattctttaactattaaaaataagtttcctctgccaatagttgatgagctattgaatgaattggctggcaccaagtttttctctaaactggaccttcgcagtggatatcatcaaataaggatgttagaaactgatgaatttaagactgcattcaaaactcatcatgcccattttcagtttcgggtgatgccatttgggctcactaatgctccagctacttttcagtgtttaatgaattctattttcgctccattccttcgtaaatttgtattggtattcatggatgacatcttgatctatagtaggagtttggaggataacattcaccatatagagttagtgttacaattgctgcagcaacatcaattgtgtgctaagctttctaaatgttcttttcctcaaaataagttggaatacttggggcatatcatttctgctgagggtgtggctactgatccagaaaaaactagggttatgcaggattggccacttcctagcaatgtcactgaattaaggggctttttggggttaactggttattataggaagtttgtcaaacattatggcatcctggcaaaacctttaaccatgttactccaaaagaatgctaagtttgtatggacacctcaagctcagtcagcatttgttgctcttaaagaagctatgtgttctacacctgttttggcccttcctgactttgctaagccttttgtgattgagactgatgcttgtgccacaggaattggtgttgtgttgtctcaagaaggacatcctgtggcattttatagcaaggcattgggaattgtgaatcagcggctgtctatatatgaaaaagaatttttggctataatgatggcagttgatcattggagatcttatttacttcggggtccttttgttatcaagactgatcacaaggctctttgtcatttagatgatcagactttggacactgagttacagaaaaaggcgatgactaagcttattggattacagtacaagttccagtataaaaaaggagttgagaacaaatctgctgatgcactatccaaagttagattctcaactcctatgctgtagattcatctgctcagcagttactttgtgagctagctgtctcttctccaaatgctaagggtttttctttgtctaatggtttaatcaggaaggctgcttggcaagatgtttctatggactttatagaaggattacctctgtcaaaaggtgctaatgtaatctttgtggtggtggatagatatacaaagtttgcacactttttgcctctcaggcatcccttttcagccttgcaagtggctaaggtctatctgaacaatgtggcatcattatatgggttgcctaaatctattgtctcagatcgtgataaagtctttactagcaacttttggcagactttgttcaagcgctttgagattcctttacatctgtccacaacctatcacccacaatccgatggacaaactgagcgagtgaatcaatgccttgaaatgtatctcagtccttctaattctcctaatgctgatcagttattccaggaacgtgctatgttctcttctttactgaaacatcatttgtctcgtgctcaaaatcgtatgaaacagacagctgatgctaagcgcacactgcgctcatttcagcctggtgatttggtcttactgaagttgcaaccttatgctcaaaagtctgttgtggctcgtccttttcccaaactggcgttcaagtattttggtccatttccagttgtggctaaagtgggttcagtcgcatataaactgcagctccctgatcatagtgagattcatcccgttttccatgtgtctcaattgaagcagtacattccagatgcttcaccggtgttttccactcttccttctactctgcagttggatgccactgagttgattccatctgagattttggatcgccgaatggttaagaaagacaatgctgcagtggttcaagtcctggtgcgctggggtactttgtcgccggaattggccacttgggaggattatgacgtgctgcgtgctcggtttcctttggcacttgtctggggccaagctggtgctcgtgggggggggggcaaatgtcacgtgtgccattaccggacatcacagtggcgacaaaggaaggagaacaggggaaagcgtaaagtgagaagacgtgtcttcgccaagaaagcgtattgtgtaaagagagtgaatcacacacagaaaagcaatggcatcagctcatgtgccaactactgtggcttctatttggaggtctatagactaccgattccccctaacctcgctttattaattgatgcctaa

SEQ ID NO: 70309 - DNA, 255 bp, Oryza sativa
  Clone ID: PAT_MRT4530_70894C.1
atgcgctcattgagccttggtgctgaatcggctgaacgatttgctgtcttaacggtgtctgctgaatcggccgcggaggctgctgccttggtggcgtttgctgaactggttgcacaacctgctgctgaattggttgtacaatctgttgaatcgggggtgtctattgaatcggctgctgctgtattggatcaatactggcctggtgccaacgctgacggagtagataggggagtcgatgcaggcgctgtcggctga

SEQ ID NO: 70310 - DNA, 1862 bp, Oryza sativa
  Clone ID: PAT_MRT4530_70895C.1
ttgttgcatcatagtgttgaagtttgcaacctgtgcatcaacagactgttgccattcccgtgactgtaccacattatcctccaaggtgtgttgttcgttccctgcctacagttcaagtgtatccatcctccgggtgagttctcccagatcccctcgagaggagacagcgacacatccaagaggatgaaggtggaccacttgaattggaggagcgcgagtatccccagtgcagctcctacggctcatgccatcggccgtcgctggcactctgccaggacgaaccaccagcgtcccaatagtccccatacatttacactggtggtgaagaggaagacgcctcctgaggtgcttctctgtacattcgtcatgttaccctgcgtgggacatcacgatgcaactccaattggagtggaatggttagttctcggcaattacacaaatgaaactccgggttaggtaaaggaatcttatttgtatagccgggaaacaaaaatataagataatcatttggaccatgtttgagtatgtggcattgaactaaataggcctcatcaacataagagcgggtgataggaatacttgcttataaagcatagtcccaactcttcatgctgaacgagtcaccaaagaaatacactcaaaaggaccagacaacttcatattttctaaccattgcttgatcatgggttgaacaggtgaaactttgattttttttttaaccatggcatacaagaggactagttcgtcttcacaaactatctggatatcagctctaagaaacaacatgaaaccaagcaacttatgcaacagccccaaggtaggatgatggatgtcactagttctaggctttttagaggatgagaaacctgaaatactttgccaaaacatacgcttgttaaaaaccaagaaatgcgttcctgaaattaactttgcatgttttgtcaaagcctagatgcaagctaaggtctttccgagaaaggtgatattccttgcggaataaccagaaagtacaccatcgcctacctctagcaaggtacatagaaactgcatggtaagcaaacaggaacccagctcatctacacatgcaaatttattccatccaacagcacgtcaaacagtatgaaactcagcatccatacttatcctttcaaaaaggtcgagttgtatgcttaggtctgagcacacgttcggtctttcagcatatgataggcttgcatttcccggtcgcccacaaggtcgagatcggagttgtcgtacagcctcggtggaacgtacgccttctccatggatgcatccgcagaagaaggtgtactcggcttatcgtgtcggcttgtccgtgagtctgccacacttctttgcttaggtgcggcaacggcctcttcataactgggaacgcaggttgaccggcctatattcctggcttcttggatgccggcttaaggtattgacggctcctcgtttcttcccgctacaggaagttcatcatgaaagtgttgagactatccgtccttcggggtttcactctgacctccttgtgggttcggtccgttcttgaactagaccatggagcaatgctccatacttggtctccttgtggacgatatccgttgttgttgttcatgagcatgacgtccttacaggttttcggacgatccgtcccagagtgatcgtcattgccacagacctcacatgccatttgaaaagtcgaaggccttaacggtacccttcttggcgtccttctcattgttgtccattctcttcataaggagatccaattgggcggcgagcatttccgtctcgttgacggtgtgcataccgcgtttgacgggtttggagtcgttccttgctccaacctgtatttg

SEQ ID NO: 70311 - DNA, 603 bp, Oryza sativa
  Clone ID: PAT_MRT4530_70896C.1
atgccctcccctccgccagatctagggaggggcggcccagcggcggccgcggtgggaggcggcatgcggcggcagaggggaggggggatgcggcggcgggatgagaggcggtggcagcctggcggcggcgccctcccttctcgactctctctcgctgtcctctctcttgcagggatgagaggcggtggctggtcggcagtggccgcgccctcccctccaccagatccggggaggggcgtcccagcggcggccacggcgggaggcggcatgcagcggcgccctccctcctctctttctgtgatgattttctgtgatgttcttcaatctggtatagcgctgaccagctactctctaccaattgatattcaatgccccgacgacgacagccacgcgatatcatcgccaaagtacctccgcaacctcaccatccgctccggcgacaaagcgatgcccacctcaatctcaatgccaccggagcagccgccacggccctccgccaccgacatcgcgccggtcttcgccacggacatgacgtccaccttcgccagcctcccgaacccacgccgtacacgcggaaccttggcgacccactacgctgggtag

SEQ ID NO: 70312 - DNA, 1247 bp, Oryza sativa
  Clone ID: PAT_MRT4530_70897C.1
gcatttgtaaactccggcgaattagacaatcaagctcacggacaagccgacacgaaaagccgagtacaccttcttctgcggatgcatccatggaggaggcgtacgttccaccgaggctgtacgacaactccgatctcgacctcgtgggcgaccaggaaatgcaagcctatcatatgctgaaggaccgaacgtgtgctcagacctaagcatacaactcgaccttttgaaaaggataggtatggatgctgagtttcatactgtttgacgtgctgttggatgggataaatttgcatgtgtagatgagctgggttcctgtttgcttaccatgcagtttctatgtaccttgctagaggtaggcgatggtgtactttctggttattccgcaaggaatatcacctttctcggaaagaccttatcttgcatctaggctttgacaaaacatgcaaagttaatttcaggaacgcatttcttggtttttaacaagcgtatgttttggcaaagtatttcaggtttctcatcctctaaaaagcctagaactagtgacatccatcatcctaccttggggctgttgcataagttgcttggtttcatgttgtttcttagagttcaatgccacatactcaaacatggtccaaatgattatcttatatttttgtttcccggctatacaaatgagattcctttacctaacccggagtttcatttgtataattgccgagaactaaccattccactccaattggagttgcatcgtgatgtcccacgcagggtaacatgacgaatggcgagagaagcacctcaggaggcgtcttcctcttcaccaccagtgtaaatgtatggggactattgggacccgaccgcggatgtccccggttgaacccaaatcccgcaacatgacgctggtggttcgtcctggcagagtgccagcgacggccgatggcatgagccgtaggagctgcactggggatactcgcgctcctccaattcaagtggtccaccttcatcctcttggatgtgtcgctgtctcctctcgaggggatctgggagaactcacccggaggatggatacacttgaactgtaggcagggaacgaacaacacaccttggaggataatgtggtacagtcacgggaatggcaacagtctgttgatgcacaggttgcaaacttcaacactatgatgcaacaatagcaagctgactggcaagcgtttcaccgctaccagggatttgatccccgccatgagcca

SEQ ID NO: 70313 - DNA, 558 bp, Oryza sativa
  Clone ID: PAT_MRT4530_70898C.1
ctggacgttgttgccggagaggaaaggggaccagacggtgaggtccgggtggccctggtacaccgcgggcagcgacgtcggcacggtgatgcggaggcccttgtactcggcgtacacgtcggcgcggtcgtagtagatgcccacgcgctcgttgccgttgcgggcggcgagggtggtctgcatggtgacggtgaggaaggagaagtagccggaggaggcggtggcgccggcgtaggaaccaccggtggtgacgttgaggcagacgacggtgaggtcgttgaggtagaagcgaggcttggtggggcggaggatgagccagacgatgaggacgatgaggaggaggaggagaaggatgccgaagatggccgcgcagcaacgccggtacaggcgctgccgctcgcaatccttgtgttgctcgcagtgcttgatcgacattatatatctatattcttgctagctagctagtactatttctctaaatttcttgtgtaattcttcccaactctctctcaatctgctacaacttgttgcttcaattccttgtagctagcaacaaaa

SEQ ID NO: 70314 - DNA, 316 bp, Oryza sativa
  Clone ID: PAT_MRT4530_70899C.1
gcgtccatatgtgtgatgggcgtggatgatgacgttataagatggttgcaattctcatgtagaaccattataatgggttggattttcatgtaaaacataataaattgtcatacaattgcatggttcaaatttaaagagaagggtgatttgtttcggttctcaaatttaaaggctaaagaatgtgagaaagaaaggaacttttaagttttttttttttttaaaaatagccacccaaccttttttgcaaaaaaaaagataccctttagatttgcactacaggacgggtcacgctcacctactttacttttatgggctg

SEQ ID NO: 70315 - DNA, 437 bp, Oryza sativa
  Clone ID: PAT_MRT4530_7089C.1
atgacttttgccatggtcaaggacgtgatgtcgagagggaagttttaggatcggcgccagatctccgacaaggccaaagacatcaagaaactctccaacgagttagctgaacttcgtgccaagtacacggtaaggggcgtgggtgctgatctcgccgcgagcaccggcatcgacccccgtgtcatcaatctgtacaagaaagagacagatctcgttggcatcgaggagtcaagggacaaagccatcaggatgctgtctatggggaccaaagatgacgatgcgcatgaggctcatcaggatctaaagatagtgcctatagtcggggttggaggactaggacattcgagaagatgctattggaactcgatcgcgagtgtaaacaagttgacatggccagatgggatctagaacaatttataaatgaactggatgaattc

SEQ ID NO: 70316 - DNA, 246 bp, Oryza sativa
  Clone ID: PAT_MRT4530_708C.1
atggaggccgaccgcgtcatgcagtggcttaacggaaaggagctgcgctccgtggttttcgtctccttggcaatgatggcgcacgggctggagctgagcggcgctgccttcgtgcacggggctggtggtggaacgcaaaatcaaacatctatactattatcggacccaaattacatggttttgtatagtttatgggtgaagatttctactattggagataaggggcttcaaacaaactcgacgtag

SEQ ID NO: 70317 - DNA, 1744 bp, Oryza sativa
  Clone ID: PAT_MRT4530_70900C.1
tttttttttttttttgatggtgaagacgaacactctttgttgaaaaatgaacagaacattaattgattacaatgttgcaactatgtagtatgcatgtgaagataagtacaattattatatattctagtagtaattacaagattgtagcaattgcttaattatcccctctctatatgcgaattattactacaagtagctgtacacctgaaccatgcagctagccacaagcatggcactgtacgtagtaccaaaaaaaacacaggcatgaaaattaagtaagaaaaaggtcaaattaattcgtactgtaaatacataaaaccactggtggcaggcatatatgcaagattactccgatcctcactcgatcagttgagctgagcttttaattatatagcttcttcatcagggctgtgcttgtagaatgtagatcgatcaattaagcaagcaattatatatggaaggaggagaattaattaaatatgtcatgatttttgggatgcatgcccaactaggtctcaataggatggatggtgtgatcagacctcgacgacgcaggcggtggctcgctggaaacctgaagtagccgttgccgccgccggagttggagccgtagcttccccggccgtcgttgacgatgagcagggcggggcacctgacgcggaggtggtagtgtccggtgatgaaggcgccggccttgtagcggatccagccgtcgacgcggatggtgacgagcaggtagccggcggtctcgtcctgggtgatggagacggcgaggtagggcgggagctggacgttgttgccggagaggaaaggggaccagacggtgaggtccgggtggccctggtacaccggcggcagcgacgtcggcacggtgatgcggaggcccttgtactcggcgtacacgtcggcgcggtcgtagtagatgcccacgcgctcgttgccgttgcgggcggcgagggtggtctgcatggtgacggtgaggaaggagaagtagccggaggaggcggtggcgccggcgtaggaaccaccggtggtgacgttgaggcagacgacggtgaggtcgttgaggtagaagcgaggcttggtggggcggaggatgagccagacgatgaggacgatgaggaggaggaggagaaggatgccgaagatggccgcgcagcaacgccggtacaggcgtctactgagcccagctatcgccaccagatcaagcgcctgcaggagtcctcgccgctggtccgcctccgccaccccctcccctttgcctccgccgagcccgaagagaagagactcccctatgccaccccactcggagccatcaccgtcatggccgccaccctccggatctgagcccgcgagggagagctcgggcagccgacggtggatgtacctctccgtggcccgctgacgccagatccgcggaggtcgatcacgtgccgtcaccatccttgtgttgctcgcagtgcttgatcgacattatatatctatattcttgctagctagctagtactatttccttaagtttcttgtgtagttcttgccgactctcgtgcaatgtgctacaacttgttgcttcaattccttgtagctagcaactagctgggactaataatcgatcttactaataattgaggggtatggtaggaaaggaataattgagaggtatggtaggaaaggaagggcagagagtgagtgaggagtgagctcgctagctaccaacaacaataaactaagtaggaggaggaga

SEQ ID NO: 70318 - DNA, 763 bp, Oryza sativa
  unsure (1)..(763): unsure at all n locations
  Clone ID: PAT_MRT4530_70901C.1
cctctccccgctcgccgccgccgccgccgccagccaagctcgccgctcgccatggcccggatcaaggtgcacgagctccgggggaagaacaaggcggagctgcaggcccagctcaaggacctcaaggcggagctctccctcctccgcgtcgccaaggtcaccggcggcgcccccaacaagctctccaagatcaaggtggtgcgcacctcgatcgcgcgcgtgctgacggtgatctcgcagaagcagaaggcggcgctgagggaggcgtacaagaagaagagcctgctcccgctcgacctccgccccaagaagacccgcgccatccgcaggcgcctcaccaagcaccagctctctttgaagaccgagagggagaagaagcgtgagaagtatttccccatgaggaagtatgctgttaaagcttaggttattaggaacataaatgttttaccggtcaagttttgcccagttgcctaaatttgatgttttgtgtggacatccattgtcaccttagtacaatgtatttggtctactgcatgaagtgcgtactattttgccttttaacgttgttatttggttatagctgcctgtcacctgtctgttgaaaatgtgatggttaccttaatgtttaagagattccacttgaactatgtccctacgtagttcaaccgtggatgggcattcaaattcaatctataccaaagggaggtgtgtgctaaaaaaaaaaaaaaaagggcgggcggccnnnnnnnnnnnnnnnnnnnnn

SEQ ID NO: 70319 - DNA, 592 bp, Oryza sativa
  Clone ID: PAT_MRT4530_70902C.1
ccggcccggccgttcctagcaccgccgccgccgccgccgccgcctccgtcgccatggcccggatcaaggtcgacgagctacgggggaagaacaaggcggagctgcaggcccagctcaaggacctcaaggcggagctctccctcctccgcgtcgccaaggtcaccggcggcgcccccaacaagctctccaagatcaaggtggtgcgcacgtcgatcgcgcgggtgctgacggtgatctcgcagaagcagagggcggcgctgcgtgaggcgtacaagaagaagagcctcctccccctcgacctccgccccaagaagacccgcgccatccgccgccgcctcaccaagcaccagctttcgctgaagacggagagggaaaagaagcgcgagaagtatttccccatgaggaagtatgccatcaaggcgtaggtcagggaacatgtatgttagcacatcactcgtcttaatgttttaccggcatgttttgccagtgcctaaattgatgttttgtgtggacatcattgtcacttagtacaatgtatttgtctactgcatgaagtgcgtactattttgccttttaacgtggttatttggtt

SEQ ID NO: 70320 - DNA, 725 bp, Oryza sativa
  Clone ID: PAT_MRT4530_70903C.1
cccacgcgtccggcgaggcgttgctcgtgcggatccagagggggggcgcagatccggacgggccggggaatggcccgccgcggcccttcctagcaccgccgccgccgccgccgccgcctccgtcgccatggcccggatcaaggtcgacgagctacgggggaagaacaaggcggagctgcaggcccagctcaaggacctcaaggcggagctctccctcctccgcgtcgccaaggtcaccggcggcgcccccaacaagctctccaagatcaaggtggtgcgcacgtcgatcgcgcgggtgctgacggtgatctcgcagaagcagagggcggcgctgcgtgaggcgtacaagaagaagagcctcctccccctcgacctccgcccgaagaagacccgcgccatccgccgccgcctcaccaagcaccagctttcgctgaagacggagagggaaaagaagcgcgagaagtatttccccatgaggaagtatgccatcaaggcgtaggtcagggaacatgagagaatgttatgtttagcacatcactcagtcaatttatctgccctcgagttccttgaattttgatgttatcatgtatggacatgccttgtggtcaagtacaatgtgacgggggtttgagtacttgcatgctaacattgatatatctaatctcatatcgtcgtcttcggttaacttggttaatacaaaaaaaaaaaaaaaaaagcttccgggc

SEQ ID NO: 70321 - DNA, 371 bp, Oryza sativa
  Clone ID: PAT_MRT4530_70904C.1
ttactgtgggtgatgctgcgcctgctggggccgccgcggcgttactggcgggacccacgcgtccgcacattgttttaccagctgcatatgattaacgggacgggggatacacacacactatttctggggacattgatccgatccgaatctcaggcatgagagcctttacggccgttactcctatggtgcttttgctcgatccacttgctgtcaatagggctgctgtcacggagacgccgcaagatcggcaggaggcggccgcggatgcagaggtgcattggtcaggatctgcaacgaacgcttagcgaccgtgcgccgatagcgtcggggctcgcaactcgcggctggtggatttgcggggggcagggggg

SEQ ID NO: 70322 - DNA, 463 bp, Oryza sativa
  Clone ID: PAT_MRT4530_70905C.1
catagacaatcttgaaagctcttctacggcgtggattcaggcccggatcaaggtccacgagctccgggggaagaacaaggcggagctgcaggcccagctcaaggacctcaaggcggagctctccctcctccgcgtcgccaaggtcaccggcggcgcccccaacaagctctccaagatcaaggtggtgcgcacgtcgatcgcgcgggtgctgacggtgatctcgcagaagcagagggcggcgctgcgtgaggcgtacaagaagaagagcctcctccccctcgacctccgccccaagaagacccgcgccatccgccgccgcctcaccaagcaccagttatgttatacttgcatccgtcttctgacattttccatggttgccatatcacagctttcgctgaagacggagagggaaaagaagcgcgagaagtatttccccatgaggaagtatgccatcaaggcgtag

SEQ ID NO: 70323 - DNA, 3548 bp, Oryza sativa
  Clone ID: PAT_MRT4530_70906C.1
ttacaaagaacacataatagcagcaaaccactgcaaagcactgattctctcacagaatgccaactcctgaccaaagcattcgctcttgagaagcaactcttttgaattcattccgatgatgtctctcagatcacttatctctttaaatagctctggtgactcctcacgaagctcaagtatgtagtttgcccttttatctccgattccctttaagctttttaattgctccttattagcactgttgagaaaagtcaagcactcttgagctagagatttcttaatcccagtgctgcgggccgtaagtttatccttgggatcttctgcttgctcaaatttcaaatgcacttcaggagtttttggctctggtgcaatcgtgttgattctccgggcacattctatgtcccacttttctgccctcacgctcactggccgagtgctaagaagcttcaatgagtttgaaatctctctcagtcggtcactcaactttggggaggatagggtactgctggcaggagtcttctcaacaaggttatcagtgatagaagagcaggtcaatcccatgtcagtacatgaattctccggttccatatttgacaaggcatagtcctcatttagtaatgcagctcgaatttccatgcctactaatggttgtacttctgttgctgacttagtttctgttaccactgtagaagcaacatccgtagcattctcctccttcaatgaattgttgcttggacaaaataatttccttccacttattttaggtttagcataattttccttcatcttaattgaagtacagattgagcttccagattttttcgttgaactaatgattggctgagtccttctattagcagtaggagtttgtccgccttttacaccactattattgaatccaggtcgggcattcttctcttgcatcgacattgttttgtgaataaacgtccttgacaaggttttggcatcggtaggtaagttcatatttgactttgatgattttttagcactcaaggataagctgtagtattgttcattgaccacttggctcgagcgagaagccaaggcaagagtagaaactgaatcttggcagcaatcttcagcatgggtaagagtcaaactagtttgataactattttctttggtgcagcccaaacaggctatcaggacgctaccgctcgtcttgctcttgcataaagaatcttgcagaatacgagttactttgctttgtctatatggtacaaatctctggttgctgttcagtgcttggacaacattcatcaaggcatgcatagacttgttaccggttagtagagcaagaccttcattcttcttctgcttgggatccacatagcctgccaggttgaggaagtttatcttagctagagcacattctttgccttgctgatcaaagctagagacgtagataatcagcccttggtgtccccaatcctgtaactgggtggaatctttagcgggatggtgcctctgctggttggtagcgcaacaacaaagctgcgaaaactcctcgattgagttgacaccaaccctggagaggcccttgaggtgagtctgtccgtcggcatcctctagtatgagaacctcatggttcttgggctccaagaggtcgaggatgtgagtatcttggagcacctgataggatgagacagtgacagcggcaccaatggctttggaggagtcgaggagttgcgccattgccatggtgaacaagccaggttgatcaggagaccccatgaagaggtgacgtttggcagccgcatcaccacaggcgacgacgcaggctttggcgccgccgcgtcctcctcctcctccacctctgccatcaatgagcggcttgacctcgttgtggaagacgcggtggttgggatcgtctctgaggtagcagccatcgaccctgtacttctgctgctgctgctgctgcttatccttggggccatctcctcggccagaggccgcggcggtggcggcggatgcggttgggcgacgggggatgaaggagattagggcggggtcattgagggcggcgacctggaagttgagggcggcgtcgggtggtggtggcggtggtgcgcaggggcagatcctcgcgacgactctgacgccgccgccgccgccgccgggttcctgcttctgctgctgctccattcccagaattttgttttttcttttgtttttggggttgtggagatcgatctccacgaccaccccttcaccgcctgcgtgttgtaccgcctcgcccgcgcgcgcctcttcccactcgtgcccccgctcctcgccgcattgcactcccacggcggcccactccggcccaccgtgtttgcccctgtcatcaaccacctcggcgccgcttctcgccccgacgctgcagtcgtcgtcttccgcgccgtcccagccttctactcccactctgccgccacattccatttgttcctcaacgccctcgtttccaatggtcgcgcggatgccaccaaggacatgctcccgctcgccccgaagcgaggcgtccacctcaacgccgtgtcgtacaacatcatcctcaacctccttcccactgccggcaaactgggtggggggcgggggcccccccgggcaggccaacggggggacaccgcgccgggggcgtacaatgaggaagggacggagggggcaaaggccttagcccacgcggggagaggggaagggggaaggggaaataggaagggaggggcaggggtcacccggtgcaagggggcaagcgcgccttggtatggtttgaaatggaatgcccatccacggttgaactacgtagggacatagttcaagtggaatctcttaaacattttggtatctttctcttttttttttttttttttttttttttttataaccaaataacaacgttaaaaggcaaaatagtacgcacttcatgcagtagaccaaatacattgtactaaggtgacaatgatgtccacacaaaacatcaaatttaggcaactgggcaaaacttgaccggtaaaacatttatgttcctaataacctaagctttaacagcatacttcctcatggggaaatacttctcacgcttcttctccctctcggtccttctcaagagagctggtgcttggtggaggcgcctgcggatggcgcgggtcttcttggggcggaggtcgagcgggagcaggctcttcttcttacgcctccctagcaggctcttcttctttgtacgcctcccgcagcgccgccctctgcttctgcgagatcaccgtcagcacccgcgcgatcgaggtgcgcaccaccttgatcttggagagcgttgttgggggcgcggccggtgaccttggcgacgcggaggaggtgggcctgcagcttccgccttgttcttcccccggagctcgtgcaccttgatccgggccatggcgagcggcgagcttggctggcggcggcggcggcggcgaggcggggagaggcgtgggcggccgcgcccgcgccggggccagcacggtggggcaggtgcgcggtttgtcgtgcaagcgatcccttttgcgcag

SEQ ID NO: 70324 - DNA, 546 bp, Oryza sativa
  Clone ID: PAT_MRT4530_70907C.1
atggcggcggcggcgacgacgacgacgaagaagctgcaggtggcttcatcatcaccaaacacacacaaatcatattggagcacgaagcagtacatcctcgtcgctgtcgttggaaccctcgcggcgaccgtcattgtgatcggcatctccgcgctgctgagccccggggagatcgacttctccgtcaccaaggcctcgcgcatgatcctgcctctggatggaggtgtggagctgaacctcacagtcgccgccgccaaccccgggtggcgcgccgccgtggagtaccgcgggttcgacgtgaagctgcattacacgccgttcgacggcgagcccacgctgctcaacgaagacgacgcctcgtcggtgcggacgccgttcgtgcagccgccgcggaacacgacggccatcccggtgcgggtgttcgtcagcggcgactactgggtccaaaacatgatgagaggcaacgacatcccgatcaccgcgcagattattggcgaagtggttttggagatgattggatttacaggtgatatgcaggtgatttga

SEQ ID NO: 70325 - DNA, 605 bp, Oryza sativa
  unsure (1)..(605): unsure at all n locations
  Clone ID: PAT_MRT4530_70908C.1
cacatttccctcccctcccctcgcccccgcgtgtccctccgcccgccacccccggccccgcgctccctgcgcctcgaccgcgtcgtcgccgcggcggcggcgtcggcgcagctcgcggcgctgtccccgcgggagctgcagctggtgctcgtctacttcgcgcaggatgggcgcgacgcctactgcgcgctcgaggtgttcgactggctccgccgcgccaaccgcgtcgacggggagaccatggagctcatggccgccatcgcctgcgggtggatcgagcgcctcgtgggcggcggcggggacgtcgccgacgtcgccgcgctgctcggggagatggactgcgtcgggctccgccccgggttcagcctcgtcgagaaggccgtcgcgctctactgggaccgcggcgacaggggcagcgccgtcgacttcgtcagggacgtcctcaggagagggggcgtcggcgtcggcgtcggcgacggaggggagtatggcggngcttgcgacggggagcgcggggggcccgtcgggtacctggcgtgggggatgattgtgggtgggggttggcggggtgctggtgggtgggaggttagagttggggaggttag

SEQ ID NO: 70326 - DNA, 330 bp, Oryza sativa
  Clone ID: PAT_MRT4530_70909C.1
atgtcaacggacaatgccaacggcagtgcgcctggagacggcaccaacggaggcaattctgcctcaaacatcagcggagggccattctcagggtataacactgctttcatcggcaatgacacgagttatcgtgttgttggagtgggcgatgttaagttcaagatgtatgatggaaacgaggtggattctgataggaagaccacgaatatcatgaaggacagcaagactgttatgactggtggagtcatggaagatggatatactggtgttgatgttcacaatcctaaaggcggcgagcctagcataggctcgtcgggcggctcggcgtga

SEQ ID NO: 70327 - DNA, 321 bp, Oryza sativa
  Clone ID: PAT_MRT4530_7090C.1
gggataaaagaaaaacgagcaaatccaaatccaaagggacggtctcccacccttcccggggagagagagagaggctatgacgcgctgcgccgtcgtcgccgtcgtcgcggccgtgctcctcgtcgccggcgcggtggtggctgtgggtggggaggaggtccaactacctttagactgcacgttgagctgtcccctctgattttggcacaggaggtgcaacaccaggaggggggacttttggggcttaccaagcccattgcgtgatgaaaccatgtgcctcgggaacttcttatgtgttagggcccctgccagaaccatggg

SEQ ID NO: 70328 - DNA, 733 bp, Oryza sativa
  Clone ID: PAT_MRT4530_70910C.1
ccatggccgcgggattacctcactaaatgctggggaggttaaatggcttccctaccactatgccattggcatgttcttttagttttctgaacttgcatctgggaaatgtatggttctgatacgcagggacaccataggttcttttctgtaccctattccctgtggcctgcatcatgttgcatataatgccccaagcttttgcactggaattcccaagtgaccagaaagcctaaggccacagtttcccatttattttgtagttactctgctacgtgccacttgcaagcattagaactctgaattttgtgttaagtttactttatcaaatgaagtaacctgcaaatgtattaattggaaagagtatttattatgttcatatttcttattcatcccacactcctagttgagtactcctaatgaattacaataattaccgtgggagaattatatacaggaaaatgttttgatgatccagaagtactattagtcatgcacttagctaataatgtatgttttgaaaacatatgaattgtaactgtgatatgggcaacttgtaatgtaaaaacatggtctttgtcttcactctaagttgtttctgtaatagtattattatttgtttgtctaggttccgtgtttcatctaagcttgaagggcaaggtttggtcatcacgccagctgttttctggagatgtccccagcatttagtgagggttaataatcactagtgcggcct

SEQ ID NO: 70329 - DNA, 1222 bp, Oryza sativa
  Clone ID: PAT_MRT4530_70911C.1
atggcggtggtggttccggaggcggtcctgaggcacggcgacgcgaggcccatgccggcggtggggatgggcgtggcggagtacccaagcacgccggagaggaccagggacgccgtgctggcggcgctcgaggcgggcttccgccacttcgacaccgcctccctgtaccgcacggaggcgccgctcggagaggccatcgcggaggccacccggcgcggcctcctggcgtcgcgggaggaggcgttcgtgaccaccaagctggtggtgcaccgtgtcattgagatggattcatgagcaaggagtgaccccaatccccaagagctacaacaaggagaggctggaaacagaatcttgagatattccgactgggagctgaccaaggaagaccgtctcaagatcagccagatcccgcagaaaaagatcgtcacggctgcacgaatgttctctccggatggtgagttcgcgtcggttgatctatcagacatggaaattgtggaggagtaggtccagatgaagatgcctggctgcccctgctgcagtttttttttcacgtttgtatttatgaaaagattcaattaggatttgtatttgaatactaatattaaatagctgcatttttaattcgctttcggatgatcggttatcaaataagtaatggatgtatcttaaactagcccaaaatatgaaatggaatcctcggtgctcacggagatcgccagggccagaggcaagagcatcgcacaggtatcattgagatggatctatgagcaaggagtgacccccattgccaagagctacaggaaggagaggcttaaagaaaaccttgagattttcgactgggagctgaccgatgaggaccggctcaagatcagccagatcccacagagaaagagggttacggctgcaagcttgttctctccagatggggagttcacatcggttgatctcccggacatcgaaattgtggaggaataggtgttgaagatgcccgctcctgctgctgctgaacaactgtgcctggagaacttaaatatggtacactttttcctgtttttatgtttacggaaacattcagtaaggatttgtgtcggaacaacagttttctatggcatgcgatttaattcattttcaatgattggttatcaaatgaataattatttcagttatgcacattgggcttaaaatattcgtctcacatttacacgcaaaaaaaaaaaaaaaa

SEQ ID NO: 70330 - DNA, 1469 bp, Oryza sativa
  Clone ID: PAT_MRT4530_70912C.1
agccttgccggcgggtccgccgctactcctccgctccgctgcctgcctagcctagccttcgccgtcgccgccgccgccgccgccctcgccgttgattccgccgcccgccgcgtgatggacggggaggaggcgccgccgggagcgctcaacctggccgactacgcccccgccggggcccgcaccgtcgactgcttcaggcgcatccgcaagatcagcgagggcacctacggtgaagtattcgaggctatggatattataactggagaaagagcagcacttaagaaaatcaaactggatgatggcaaagaagggtttccacgccaaatcttgcgtgagattaaactattaaaaaagctggatcacgagaacatcatcagattgaaagaaattgtagtatctcctggtacagcacatggagcaggaggatcagatgattacatgtataggggagatatctatatggtttttgaatacatggatcatgatttgaagaaagtcttgcaccacagtaccccatcccaagtcaagtattatatggagcagttgttaaaaggattgcactactgccatgtcaacaatgtacttcatcgtgatatcaaagattacttgttaccatttataggggctaatcttctaataagtggtggtggtaagctgttaaagctcgctgattttggccttgcaaggccattcactagagacggaagtttcacaaatcatgttattactctctggtaccgacccccagagttgctcctcggtgccacaaattatgctgaagcagtggatatatggtctgttggttgcatatttgcagaatttttattgaggaaaccattatttcctggcagaactgaggtatgagcagctatcagaaatatttgaactctgtggatttccaaatgaggaaaactggccaggagtatccaaacttccattgtacaagactattcgtcctacaaccccaacgaaacgacgtctgagagatatttttcacaactttgactctcatgcagtggatttaattgatcgcatgttgattcttaatcctactgagaggatttccgcacatgatgctctttgcgcagcatacttcatcactaaaatgtagtgtcctttctgtggaaaagaatctagactcactgttctttgcaaaggattaagttccttggcgttaaataggtgtaagtactatctgaagactgttgtttctccttctgaccttggtttaggaactatagggctactgcgtagtaaaaatgttttttttttgtctttaatagcttcaatagatatgtggatatgttgtacattattacttgtgacaatccattccattagtttttttaatagtaagcaattcttcttgtgctattgtggtatggagaacagcacttactgaagtgaaggctatacaaagtgccttcaaagtacaaaataaagcctaagcagctctttactggtattct

SEQ ID NO: 70331 - DNA, 192 bp, Oryza sativa
  Clone ID: PAT_MRT4530_70913C.1
atgggaggtttctacaagagggctggcaagacgacgtctccagggagaggagcgacggaagcaccgccactgccatccgtcaaggtctcaaaaataaccaagactggttttcacccgacaaccctgcaagaggagatgagacggcataacaacgccctcaagaggggaagtggctcgaaacgacttcgttga

SEQ ID NO: 70332 - DNA, 1240 bp, Oryza sativa
  Clone ID: PAT_MRT4530_70914C.1
cccttttccctagcggtccatggaatcctccaccagcaaaaaaatgttttcgctagcggtcggcgcattcctccgccagcgaaaatctcttcgcctataagtagctagcacgcgcgagcgaaaaatttactaagtccccgaggtgcgcttgctgccaaaatttcaagcaccgccgctagcgataaccctagcgcccgccaccgccgcagcctcctcctccattcgcgccatcctccattcggacacagctgctccattcgcgcctcctcctcctcctcctcctctctgccgccatcggcaccgccagatccagctcccaccgtcattctctccgccaccgccgggtcctcgtcgtcgacgctgcctccacctcggccagccgtctccacctcaggagtcatcaccgccgccgggtcctcgtcgtccatgccgcctctaccttggccggccgcctcaacctcgggagtcgccgccgccgggtcctcgttgtccacgccgtctccacctcggccggccgcctcgacctcgggagtcgctgccgccgggtcctcgtcgtccacgccgtccccccgccaccgccaggatgccgccgccgcgcagggacacgtcgtcgccgcctcctttcaccaaggtgagcccacgccctccgcctccccttttttatcttctctctgattaaccccattttctcctcctcagccgcgccgggactcgttgttgtgccaggaccgtcttcaccgccgccgggacctcctccccgccgactcttcctcctctcggctgccgcgccaagaccatcgttgccaccgccgggacctcctctctgcctcttcctcctctcaactgccgcatcaggaatcgccgccgctgcctacgctactcgccgggcagccgaagccatcgtcacacgcctccaggtacatccccctcctctgcgcccttcaaaggatatcaatcgacaaacccacccaagagcaacccacaggtgacaagggcaaggaaactcaggccgcctgagccgagctatcctttcgatgatgtaacggaggatactcctggaactgatcgtccaccaaggatatcggtgtcaccgtcgcgtccaccagtcgtagccagtccgagggatagtcctattgcttgaccccctagaccagagccaccagttgcatcacctctgttggtatttcttagcgacactactgggaatataattcccagtaatagcactagaaataatcct

SEQ ID NO: 70333 - DNA, 706 bp, Oryza sativa
  Clone ID: PAT_MRT4530_70915C.1
atgacgtcatccatggcagccacagcacgggtggcgacctcgccggagctagggtggtcggccgggattttggaggacacctacgcgaagagaacgacgagacgaacccgatggtactcaccacaacggcaaacaacgcacgacgacggccggcgacgaggaggacgacggcggtggctcgggttgcgcggcgacggcgagctccggtggtcggcgacgaaggagaggtggcggccgagcttccccacaccacggcgcacctaaaggcgacggcggcaagcggctgcgacggcggaggcggctgcgcgacgtcgccggagttcggccggcggcggcggcggactaagcggcgtcgacggcgagctacgaggcacgagagaccacgggagagggggcaaacgaaagaggaggactagggggtcctatttatagccttggattgaagagatcggactccaaacgagaggaatcgaagccggaaaatcaaaaactcggttttagagataaactcgaaaacgagtttgattcggataaaatacccaacgatttgctccgattcttgggggaaaagatagaggaggatgagaggatcaaaacccctcaaaaatccggaagaaacggggtcggattggagcggatttggaggcggaaaggcgacgcggcgcgcagctcgggctctgtccagactgcaggctgaaggttaggg

SEQ ID NO: 70334 - DNA, 624 bp, Oryza sativa
  Clone ID: PAT_MRT4530_70916C.1
atggagggccaggctgattgggggccaccagggttcggcccctgggctagcccagcaggcctccagcttcgggcatggtacagacagatatattggcggtcaaaattggcctataatgaccgtcaacaagcacatcatcaggaattcaatagcagatccacggggctgcatattagccatcaactgtaagaaggaccgagtaggacgtaaatcctccatgggagaaatagcgaggaacacaacaagaacaagccagatctgccctacaacctcaccccctgccaccaacctatgcacggaggacatcgccagcccgcggcctaacctcatgcctctatctccgccttcaacctcaccccctgccaccaacatatgcacggaggacatcgccagcccgcggcctaacctcacgcctctatctccgccctttacagtgctgcccatccgcattacagcttccacggggaatgagctgtactcatgaccttgcacattacaatcagaggatttctttgttttacttccaccgttatcttgtcgagttctatttccattgttcatccttttgttgtcagccccgttcgaatgtccttccacctccacgggtacatccttggtagccat

SEQ ID NO: 70335 - DNA, 1702 bp, Oryza sativa
  Clone ID: PAT_MRT4530_70917C.1
tctcgagctaaaaacctcactaccacaacaagcatcttggtttctgctaaaacaaagacttcattatatttcaacaatggatttaacaacaggagccatatggttgttcctggctcaactgttcgtcgctgcaacaatgttgagtaagattgcaacaagagaaagaacaagaaccactggcacaaaattctctagaccaccgcctccacccttggcccgtggagctcctcttgtaggggttttaccatcgcttctcgccaatggcccggtggaattcatccgccaccattatgagaagatgggaagcgttttcactgttagcttgctccaacagaaggtgactttcttggttgggtcagaggcgtcaagccatttttacaaagggttagattcagagatcagccaggatgaggtctcgcaattcaccataccaacctttggtcccggggtcgcttttgatgtggattatgccactcgacacgagcagttccggttctttggtgatatcatgaagccggcgaagctgaggacttacgttgatctcatggttgctgaagtggagggttactttgcaagatggggacagtccggcactgtgaacatgaagcaagagtttgaacaactcgtcaccctcatcgctagccgttgtctactaggggaggaggtcagggacaagatgttcgacgaggtctcgacgctcctccgcgagctcaacgacggcatgcgcctcgtcaccatcctgttcccgcgcctccccatcccggcgcaccgccggcgagacagggcgcgcgccaggctcggcgagatattctccgacatcgtgaggtcccgcaggggcagctccggcggcggcggcggcggcggcggagcccggcacgacgacatgctgcagtgcctgatcgacgcgaggtacaaggacggccgcgccacgacggagacggaggtcgccgggatgctcgtcgcggcgctcttcgccgggcagcacacgagctccagcaccagcacctgggccggcgcgcgcctcctcaccaaccccgaccacctccgcgccgccgtggaggagcaggcgcggctactccgtcggcacggcggcgaccgcgtcgaccacgccgccctagcggcgatggacaccctgcagcgctgcgtgaaggagaccctgcggctccacccgccggccctgatgctgctgcgccacgcgcggcggagcttcgtcgtgcgcggcggcagcggcgagcgcgagtacgaggtgcccgagggccacacggtggcgagcccgctgctgctccacaacgcgctgccgcgggtgtaccgggaccccggcgagttcgacccgggcaggttcggcgccgggagggaggagggtgcaggtgggctggcgtacacggcgttcggcggcgggcggcacgcgtgcgtgggcgaggcgttcgcgtacatgcagatcaaggtgatatggagccacctgctgcgcaacttcgagctgcagctggtgtcgccgttcccggagacggactggaccgtcgtcatgccggggcccaaggggaaggtcatggtcacttacaacaggaggaaacttacctagttattatcagttaaaactggaggtataatcatcgtatgtgtttaagcatgtgtaaaacatctcatcatgtattctcaactagtacataactcatatctatctctatcttttctctactattat

SEQ ID NO: 70336 - DNA, 1204 bp, Oryza sativa
  Clone ID: PAT_MRT4530_70918C.1
atggccgccgcgctccgcgccgccctccgccgccgccacgccgcctcttcgccggtggcccgcctcctgccgtactcgtcccctggaccctgcgccaagggcggtggcgccgcctccaccctccacgccgccacgcgcggcgcgcccgctccgtcgatccaggcgccctccgttgtccgccgctactgctccgccggggtaagcagcgacctcgacctcttcgccgtttcaccttccggaggatacgccgccgtgcgccctgctcgcggcgcctccccgctccaggtaccctctctggtacgccgctacggctccaccacgggagccactgctaccgccacccctgccgctggcgtccctgcccttcaccgtgcatctccacttcccctctttgtgccccgccgccgccgtgtgtattcttctgaggagtattcttctgatgagtattcttctgatgggtattcttctggtcagcatgaaccaccagagcccagaggcgtcagtcagacgaccatggttctacctgccattaatttggaacggatggcttatggaaatgggattgtgtgtggatacaatcgccttgcggaatacaagtatgtggaggattgccaagtggctaaggttatggatcatcaactcagaaggattgagaaagttgaggctggactaaagcagctcgggtggttccaaattatcacggtttcattgctgggattagttacatatcagtgccattcagaggtttcccgtctcgacaaggaagtcgctgctccaaagagcgagagcacgtagactcaagagcaaggtccctgctgattgttccattgatgattaagaagaagacgatctcgcttgatgctcatgaaacctagtcttgccaagtgttttgcactgtagtttcggccacttcatctactgattgatagccgtagtttctgatcgttgtcagtgtagtttgctggtgctgcgctgcatgtttccattttgattcgtaacctgtttaaaccctcaatgcccaaacttggtgttctgtgtccctttgcttgatgcgtgggcgcgttaactttggtatccagctctgctgtactttcttatgcatgataaacctgggatgtttctgatgtgaactggaaatggactatcatggcattcatgtagtgcacttcgattcttcagtcgacacaaaaaaaaaaaaaaaaaa

SEQ ID NO: 70337 - DNA, 1847 bp, Oryza sativa
  Clone ID: PAT_MRT4530_70919C.1
atggcccatgaaccaggcatgaccatcaaagctcctgcttctgcaaccaacagtagcacttcaaaggcatacaggaaaaggcccaggccatctcctggtacatgggcttctaagaaattgttcaaggacaactatgatggtactgctgatggcagtgccaagggcccgagaagacactccgtcggcagcagtgatggcgatggaggccggcggcccggcctccccctcgcttcaattctaatcccccccaaaccccctccaaaccctaaccctactacgacctccccttcctccgccgccgccgccaccgccaccgccaccgccacgtccagcctccggtcgcctgttcggatcgaagcgatgtcgtcggacgatgaggtcagagaggagaaggagctcgacctctcctcctccgacgtcgtcaccaagtacaaggacgccgccgatatcatcaacaatgctcttaagttggtagtgtctttgtgcaagccgaaagccaagattgttgacatctgtgagaagggcgattcttacataagagagcaaactggcaacatctacaagaatgtgaagaggaagattgaaagaggtgttgcttttccaacatgtgtatctgtgaacaacacagtctgccatttctctccgctagccactgatgaggcagtcctggaggaaaatgatatggtcaaaattgatatgggatgtcatattgatggttttattgccgtggtggctcatacacatgttatccatgatggagcagtcactgggaaagcagcagatgttcttgctgctgccaacacagcggcagaagttgctctgaggcttgttagacctgggaagaagaacaaggatgtcaccgaagcgattcagaaagttgctgctgcttatgactgcaaaattgtggaaggagttctcagccatcagctgaaacagtttgtcattgacggtaacaaagttgtacttagtgtgtccaatgctgatacgaaggtggatgatgctgaatttgaggaaaatgaagtgtatgcaattgatattgtcaccagcactggagaagggaagcccaagttattggatgagaagcagaccaccatctacaagagagctgtagacaagaattatcacttgaagatgaaagcatctaggttcattttcagtgagataagccagaagtttcctatcatgcccttcactgctagggcattggaagagaagcgtgcacgcttaggtttggtggaatgcatgaatcatgaattattgcagccgtaccctgtccttcacgagaagccaggcgaccttgttgcacacatcaagtttactgtgcttctgctgccatctggttcacagagggtaacatcgcattcacttcaggagttgcagcccactaaatccattgaagacaacgctgagatcaaggcatggcttgctttggggacaaaaacaaagaagaaaagtggtgcaaaaaagaagaaaggtaagaaaggagatgcagcagaagcagtgcctatggaggagggttcaaatgatgcaaacaaagaataactgattgttcttttgaattgcttccgttagttttgtacttgctccactgcatctgatgctattatatcacattcagttgtggaaaatcgagtactttttcaaacttcctgggaaatgatccgtcctgctgcacactcattgtcacatgaaagcacaaaatgatgattacctatgaaatgtgtgaaaaatggccttctgtgctgcctaactatgagttaaatctactgtcgaggtatggaaaaaaaaaaaaaaaaaaaaaaaataaaactagttctctcctcaaatccgatgatgaagtaattgct

SEQ ID NO: 70338 - DNA, 314 bp, Oryza sativa
  Clone ID: PAT_MRT4530_7091C.1
gccaaaaaaaattggcatagctcgcgacttctggtcgccgaccggccggtgacttgccggcggggaccgcaccgtacctggacctcgcgttgcccgtaccgtcttgccgcacgtgatggtatgaccggcgcccatcggcgtataagcgcatcgctttgcgagctgtctgcgcgctagacgtccggtgacctctggggggtgacttgtcgcctgtgagagccctgctccacgcccgtggtgctgtgacaccgattacagatgaccggcagccggtggttcatggtggcttcgcacataagcgcttctattaccca

SEQ ID NO: 70339 - DNA, 346 bp, Oryza sativa
  Clone ID: PAT_MRT4530_70920C.1
acgaatgcctactttacattatgttcatgttatactggttatactactagcttatctgtgagatgctttggtgcgggtataatgcttgcttatgcaattactctatgttatgacgatgatattagagtagtatctggtagtttagacgtggggtctagattatgggatatcattatttggggctatatgctgcggatgagaggtgggtcgctgatggtgatagctcaatacgggtattccttcgcgcgtgtatatagtcataagttaatttcctgggttgggtactcctccgtatttagtcccgcgtgtatggtcatgacgggctgtcgtaggaagtcgacagtca

SEQ ID NO: 70340 - DNA, 135 bp, Oryza sativa
  Clone ID: PAT_MRT4530_70921C.1
ttttcttttgatcagagactgaaggtgataggaggagggggtaaacatcgagagggcgctcacaatcgtcacgcaccacgtcatggtcagaggttagggtctgggactacaactagtggtgcttcagtcaattcc

SEQ ID NO: 70341 - DNA, 400 bp, Oryza sativa
  Clone ID: PAT_MRT4530_70922C.1
tttttgtttttttattttttggggttttatttttcttttttttttcccataaatcctacttaaacaatattttgaaaatgggggggccattttgctccatcccagtatgtgggaggggcccatggcctgcttcattttgccaagactatgaagtcacaaaataccactacaaatttatcttttgccggggccacaaggacactgggtttatgtttgggctagataaattattaggggctaaatcttgccgggtgacccaatgcaggggctggactgtccattgctggacctggaggccactctatgggagcgagccggccttaaaggttttggggactacatcggaaacaaagcaatcgccactgtactttacaaggaagcggccggataaggggccctt

SEQ ID NO: 70342 - DNA, 1056 bp, Oryza sativa
  Clone ID: PAT_MRT4530_70923C.1
atgacaataatagactatgttgacctgtgcgatgatgaggagattattgtagaagaacctggtcctcatggacaagttcatgcagctgacatgcatgtagaattagttgacttgaccactgaaggagatggtgtggaagatcaaaatattcctggcaaagatgatgctgttctgtgtacaacattacacagtccaaattttattgcagctcatggtcaaggtgaaacagctcacctcatagtaacattgtgtaaacagggattcattgcagtagttgatgatgcagaagaggctatgcaatctggaaataaggagctgtctgcagcaaatgatggcaagggagaggccatgcaatctgcagatcaggggattgttgtggcaggtgattgcacggaagaggttatgatgtctggaaatcaggactttgcttcagcagttgctgacgcagaagagacaatgcagtctggaactcaggaatttgttgcagaaggtgatcactcaagagatgctatgcagtttggaaatgctggtcaagcttccacatgctcatcaatgtcagagcaaggtgctatcacatactcatcaatgacagaacaaattgctactgcatcctcatcaatgactgggcaatggagtagggaggcagctgcttttctatgttcacgtcccatgtctattgcattgccattcccccggcagttctggaaagctggggaatacagtgttgctgctcaacccaccatcaacagtgatcagaaccacttaaggattcaccccaagtttcttcattcgaatgctacttcacacaagtgggcatttggtgctattgcagaacttctcgacaatgctgttgatgaggtgaacaatggagcaacctttgtgaagatagataagataaaatgttctctcattgatgagtattcattggtaatacaagatgatggaggtggtatgagtccagagtctcttcgacattgcatgagctttgggttctccaaaaaaagtgggaattcatccattggacaatatggaaatgggttcaaaaccagcacaatg

SEQ ID NO: 70343 - DNA, 273 bp, Oryza sativa
  Clone ID: PAT_MRT4530_70924C.1
atggagcacgatggcttcatgcgtgaagttgaaggagagtatgcagatgcaaatcagagtgccatttccttacttgcttgttctatcaatgtcgccgacatggagcagccgctggttgttgctattggctcaggtgaacacctccttgctggttatggtgctgcctagcgtctggcagcgaggctcgaagtagtgcctttgcctcaaccgccgccggccaccgctcgccggccaccgtcatcaaccgccacggtgtcgtcgtccttctccatg

SEQ ID NO: 70344 - DNA, 2160 bp, Oryza sativa
  Clone ID: PAT_MRT4530_70925C.1
atggcggtggcgaagtgggagcgcgccaagcgcgcgcttgccaccaggctctgcgtccgcgcgccgagggtgcgggcggcggcggcggaggcggagggggagggggaggagggggaagggagggggaggtcggtggccgcctcgccgcccgcgcatgtggcctcctcgcggcggctgtcgaggtgcgggagcaggagctccacgaagatatgtgccatttgcctcggaggaatgtgttcaggcaatggccaagccttgttcaccgcggaatgctcccacaagttccacttccactgcatctcctccagcgttcgccacggcaacaccgtctgcccgatttgccgcgccgtgtggaaggagctgccgttccagggccctctccctgcagcagcagcagcagatgctagtcttcttggaacagctcgagtgaaccctcacccactggatgacaggcatcagcatcagcgaatggccgttgtccgcaggctgtctcgcggagacagcgtgacccggcaatggcagctcccgatctttcgtacgctggatggcggcattttcgatgacgatgaacagttggatcttcatcctgctgaagatgtggttggaactcaggatgttgattcgatcgtcgctgatgaaatggcgcctgcttctgttgggatcacgacgtacgctgcgttcccggcgatggaggagtctgtgatggttgaggagtttgcggtgttgatccacctgaaggctccgtcttctccggcgacggtgacctcccgcgcgcccatcgacctcgtcaccgtgctcgacgtgagctggagcatggccgggacgaagctggcgctgctgaagcgcgccatgagcttcgtgatccaggcgctcggccccggcgaccggctgtccgtcgtcacgttctcgtcgtcggcgaggaggctgttcccgctgaggaagatgacggagtccgggcggcagcgcgcgttgcagagggtgagctcgctcgtcgccgacggcggcaccaacatcgccgacgcgctgaggaaggcggcgagggtgatggaggacaggagggagaggaaccccgtgtgcagcatcgtcctcctctccgacggccgggacacctacaccgtcccggtgccgcgcggcggcggcggcggcggcgaccagccggactacgccgtgctcgtcccgagctcgctccttcccggtggcgggtcggcgcgccacgtgcaggtccacgccttcggcttcggcgccgaccacgactcgccggcgatgcactccatcgctgagatgtccggcggcacgttctcgttcatcgacgcggcgggctcgatccaggacgcgttcgcccagtgcatcggcggcctactcagcgtggtggcgcaggagctgcggctgagcgtcgagtgcggcgacgacggcgtgctgctgacctccgtcaggtcgggcggctacgcgagccacgtggacggcgacggccgcggcggcttcgtcgacgtcggcgacctctacgccgacgaggagagggacttcctcgtcaccgtgcgcgtcccggcggcgcgcggggtgtccgccctgatcacgccgagctgcacctaccggagcacggccaccatggagaccgtccgcgtcgggggcgacacggtgaccgtccctcgcacggtggacgcccccgtgggctacgacggcatgtcgccggaggtcgagcgggagctgcatcgcgtccaggccacggaggacatggccgccgcgcgcgccgccgcggagcggggcgacttcgagctggccgccgccatcctcgacgagcgccgcggcgtgctcgagtcgcgggcggacgacgacccgcagtccgtggcgctggcggcggagctgagggagatgcaggacagggtggagacgcggcagcggtacgaggagtccggccgcgcctacatgctcgccggcctgagctcccactcgtggcagcgcgccacggcgcgcggcgactcgacggagctcaccagcgtcatccatacctaccagacgcccttcatggtcgacatgctgcagcgctcgcagacgctccagccggaggtcgtcgtggcgatgagccgctcggcgccgctaccggcgccgtccctgtcgctgtcgccgccgccgccgccgtcgcagctgcggcgccgctcgtga

SEQ ID NO: 70345 - DNA, 309 bp, Oryza sativa
  unsure (1)..(309): unsure at all n locations
  Clone ID: PAT_MRT4530_70926C.1
cccacgcgtccggtggcaagtgatgcggctatggtggcagtctcagctactgtggtggcgaacaaggttaattctagtgcttgggacagatcctgatccagagcctgtcatgagaactgagatntgcaacaaacgggctctattgtcctacgtttagagacatgcaaattgcaaatttgagttggcttttgaacataagcttgtgtggcctagactgtatcattgacggttctctcagtctggggactatgactgcttattcgagtactgcaatagggattgtacgtgggactttatatccgaatggcc

SEQ ID NO: 70346 - DNA, 213 bp, Oryza sativa
  Clone ID: PAT_MRT4530_70927C.1
atggtgacgaacgccaaaaggttcgctcgacgtaggtacggaatgtactggtcgttgaatgggatgtgtgataacaaaacagggcgtcgggctggggcggcgcggcagcggcatatatgccgctacctcagcgccaatgtatctggcactgagcttagccatctcagcgccaaccgcttcggcgctgacatccctgacatatctgctgggtga

SEQ ID NO: 70347 - DNA, 457 bp, Oryza sativa
  Clone ID: PAT_MRT4530_70928C.1
cacttccaacacgcagttgagagcaaccttggcgacgcgcttcgccgctcgacgcttccaaccatgctgcggccagcggcggccgctggcgccgccggcctccatcagcagcggcgtgcaccgcgggtgcacgtcgacgtcgcactccacgcagcggtacatgcagcggccggcgtcggaggtctccctgcaggcgacgcaccgccggctggccgtgaggacggagagcgtgagctcgtggtcgcgatggcgccggccgagcttgactcgcttcggcagggtgaggcaggcctcgtggacgtcgaagccgccgcacggggcgccgccccggcatctgtaccggtagctccccccgaagatggtgcggtcgccctcgttgccctcaccggcagcgccccgcttgccgccgtaaacgcgcctcgttagcgagtgctccgggtgtaaccaggtagtgtat

SEQ ID NO: 70348 - DNA, 477 bp, Oryza sativa
  Clone ID: PAT_MRT4530_70929C.1
gctgtttgtatcctggaaataatttgattatgctcatgaatttcaccaaggcgctaggtgctagtcaggtaggagacaaacgcttaacacaggactaggctgccttttagaacaatgggaataacaacctgtgcttacttggtttaatgttttgctttttttcatacattgtgtcgtacagggctggatccatggtttctagaagaggataaaagatccacaatccttctatatctaacagagtttttccaaaatacttgttttcaattttagttcccttaatttgagaatgtgctcttcccccaaatggttattgcatataattcagcgtctcatggaccaagcttgggctgatgttctgatatgatatgagttcacctaagtttctgtcaggggtatgaaccttgaaaaaagataaacctgctgcttcaagtaatcatgccaacttaaaaattaaatatccaggtgtatgctttt

SEQ ID NO: 70349 - DNA, 3123 bp, Oryza sativa
  Clone ID: PAT_MRT4530_7092C.1
tcaggggtagaagcgacgaaggtgttcgatgttccatgggttaggcagctccgtgccgtcgcccgtggccagccgtaccgagcccggccgggggacaccgatcactcgatacggaccctcccacattggtgagagtttgctcaatccagcacgcgtttggacgcggcgtaggacgaggtcgtcgacgcagagtgatcgggcccggacgtggcgctgatggtagcgccgcaagctctgctggtagcgcgcggctcggagggccgcgcgccgccttcgctcttctaagtagtcgaggtcatctctgcgaagctgatcttgatcagcctcgcagtacatggtggcccgaggagacctcagggtgagctcggatgggagaaccgcttctgcgccgtagacgaggaagaaaggcgtttccccggtcgctcggcttggtgtggttcggtttgcccagagcaccgctggcaactcctcgatccatgaatcgccgtgcttcttgagaatattgaaggtcttggttttaaggcctttgaggatttctgcattggcgcgctccacttggccattgcttctggggtgggcaggtgaggcgaagcagagcttgatgcccatgtcttcgcagtagtcgccgaagagttcactagtgaattgggtgccattatccgtaataatacggttaggcactccaaaacgggccgtgatgcccttaatgaatttaagagcagagtgcttatcgatcttgacaaccggataagcctcgggccacttagtgaacttgtcgatcgcaacatacagatactcaaacccgcccggggcccgtttgaacggtcccaggatatcaagcccccagacagcaaatggccatgacagtggtatgatctgcagggcctgggccggctgatggatttgcttggcgtggaactgacacgctctgcatcgccggaccagatcgagccgtacttggcgcacgtaggcgtccatctgcgggtcagagcaccggtactccttacagacttggttaacaaccagctgagagtcgcctaacaccaggaggcggcggatccccagcccggctgccaccctgagtccggcaaggagtccctcgtactctgccatattattggtcgctcgaaagtcgaggcggaccagatatctaaggacgtctccggtcggggaggtcaacgtgacccccgcaccggcaccctggagggacagagaaccatcgaactgcatcacccagtgggtggtgtgaggcagctgcgaggggttcgtgctggcctcggggattgagacggtctctggagccggggtccactctgccacaaaatcggcgagggcctggctcttgatagcgtggcgtggttcaaagtgcagatcgaactcagaaagctcgattgcccattttaccacccgtcctataccctctcgattatgcaagatttgaccgagggggtaagacgtaaccacagtgaccctatgtgcctgaaaataatggcgcagtttcctcgaggccatcagaatagcgtaaagcatcttctgggcctgagggtatcgggtcttagcgtcccggagggcctcactaacaaagtagacaggccgctgcacccttcggtggggctgatcctctctgctaggggccgtacccccggggggttcttcgttcaagtggcctttgggggcgcacttgttttctgtgccgatgacctcggggtcggaggatgaaaggggcggccttccctcagtggcctcggggccgtcctgggggtcgggggctcctggcatcgtcggacaagcgggcaaagggccaactccggtcgtcaggggcctctggcctccgttcggctcgggggcctcttctccctgctctttcccgggtcgagtcagcacagggttagcctcggggtcaaagggcgttaagtgtggccttcccgcagtggccttggggccctcctgagggtcgggggcacctagcaccgtctgacaagcgggcagagggccggctccggtcgtcaggggccgtaggccaccgtccgactcgggggcctctcctccccgctcgctcccgggccaagttagcacagagtgggggtgcacgaaatgaggattgtcttcatcgcgctccacaaccaatgctgcactaactacttggggggtcgccgctaagtaaagtagcaggggctcatttggctccggggcgactagaaccgggggagagctgagatatgcctttaactgagtgagggcatgttcagcttcctccgtccaagtaaacggccccgagcgcttgaggagcttaaacaagggtagcgccttctctcccagccttgatatgaaacgacttagggcggccatgcaaccggtgacgcattgcacatccctaagtttgctgggggggcgcatccgctcaatagctcgaatcttctcggggttggcctcaatgcctcgggcagagaccaagaacccgagaagcttgcccgcaggtataccaaacacacacttatcggggttcagctttatgcgggcggagcggaggttctcaaaagtttccgctagatctaaaagtaaagtttcttggttgcgcgtttttacaaccaagtcatcgacataagcctcaacattacgtcctatttggctacccaaagaaattcgagtagtacgttgaaaagtaggacctgcattctttaacccgaagggcattgatgtataacaataggttcctacgggggtaatgaacgcagttttttcctcatcctccctagccatgcgaatctgatggtaaccagagtatgcatctagaaaacacaaaaggtcgcaccccgcagtggagtccacgatctgatctatgcgaggcagggggtaaggatccttaggacatgccttgttaaggtcggtgtagtcgatgcacatccgaagcttgccgttcgccttgggaacgaccaccgggttcgccagccactccggatggatgacttcacggatgaatccggcctccagaagtctcgccacctcctcgcggatgaaggcttgacgttccggggcctgccgccgcactttctgccggaccggccttgcgcccggccgcacggcgagacggtgctcaatcacctccctggggaccccgggcat

SEQ ID NO: 70350 - DNA, 316 bp, Oryza sativa
  Clone ID: PAT_MRT4530_70930C.1
aaaaaaaacgaaataaacaaccaaaaaggcaaaaaaaaaaccgccaccccaataaaatgaaggcaaagaagcaaaaagaaccccacaatcacatgagaaaaccctcatctcccgcagaaaaaaaaaagccaaacgaaaagggcacagacaagaccatccacggcccgtgcttggaaagacggctcggcacgtgggccggcacggcacggcccgtttcatcagccgtgcctaacgggccgtgccgaaacgggccgtgccggaaccgtgcccgtgccgggccgggccgtgccgcccgtttggccacctctaggtgcgg

SEQ ID NO: 70351 - DNA, 774 bp, Oryza sativa
  unsure (1)..(774): unsure at all n locations
  Clone ID: PAT_MRT4530_70931C.1
aaaaaaatttttccttcgatttctctcgcctccgcttctccactctccggtagatcccaccctccaccgccgccgccgccgccgtgctccggtgagccgccggtgagccggagactacagcgacgtcgcgcagagccgttgggcgggtaggcggttgggggctttgcccgagatggcgacgatggggagcctgatcgggctggtgaaccggatccagcgggcgtgcaccgtcctcggcgaccacgggggcggcggcgaggggggttccctctgggaggcgctgccctccgtcgccgtcgtcggaggccagagttccgggaagtcgtcggtgctcgagagcatagtggggagggacttcctgcctcgtggatccggaatcgtgacgaggaggcctcttgtgctgcagctgcacaagacggagggtgggcaggagtacgccgagttcctccacgccccgcggaagcgtttcactgactttgctgctgttaggaaagagattgctgatgaaaccgatcgcattactggaaaaacgaaagctatatcaaatattcccatccatttgagtatatattctccacatgttgtaaacctgacacttattgatcttcctggattgacgaaggttgctgtagaggggcaacaagaatctattgtccaagatattgaaaacatgggntcgggctttatgttggataggccaattctatcatactggccatatctccagctaatcaagatatagcaacatcagatgctatcaagcttgttagggat

SEQ ID NO: 70352 - DNA, 241 bp, Oryza sativa
  Clone ID: PAT_MRT4530_70932C.1
atgcagcaaccggcaggcagagagtaagctcgttcacaaggcaagcagagatcaaggtggcagtggaggatatgcagtttcagaagttacgaaaacctgcagctgggagaacgggagagccaacctacgtctgttggaggaccagtctgaagatttgctggatttgttgaccaaaacttcatacctgttcgagtacctcatcctgtacattacatgcaacgcgataacgtcaacgaactag

SEQ ID NO: 70353 - DNA, 1086 bp, Oryza sativa
  Clone ID: PAT_MRT4530_70934C.1
atggacgtggagtacgacgtgatcgtgctcgggacggggctcaaggagtgcatcctcagcggcctcctctccgtcgatcgcctcaaggtgctgcatatggacaggaatgattactacggtggagactccacatcgctcaacctgaatcagtttatgatggcaaatggtacattggtccgtgtacttatccacactggtgttaccaagtacttatcattcaaagctgttgatggaagctatgtcttcaataagggaaagatccacaaggttccctctactgatatggaagctctcaagtctccattgatgggattgttcgagaagcgcagagcagggaagttcttcctttttgtccaagattacaaggaaaatgatccaagtacccacaagggatatgaccttaacaaaatgaccaccaaggagcttatctcaaaatatggtttggatgataatacaatagactttattggccatgcagtggctcttcataaagaggataactacctgacagaacctgcaattgacactgtaaagcggatgaaggcaaaatcagtgggtcgttttcaaggaggatcaccatatatttatcccttgtatggcttaggagagctgccacagggttttgcaaggcttagtgctgtctatggtgggacatacatgttaaataagccagagtgcaagagttatgatgccacaacacactttgagtctactgtgatggatgttctttccatctatacaaagatcaccggaaagctcgactcgcgagctctcgccgccgccgccgcctcttcccccaccgcacgcgcttccactccgccgccgccgccgccgccgccgaggctccagcactgccgttctccgcctccagttcttccctcccccgtcatcttcgtcgtctcgggtgtccggtgccaccgcgccgccctcctgctccatctccggcggctcctgctgcccgccgcctccaccgactaccccctcctccgccctcccgatctccgttccccgcgccaccgcccaccgcggggcctccgccgccccggccgcttccgtctaaccctggatccccaccacgaaacctaa

SEQ ID NO: 70354 - DNA, 1783 bp, Oryza sativa
  Clone ID: PAT_MRT4530_70935C.1
cggaattcccgggtcgaccacgcgtccgtttcacccgcccaaactcatccatccatcgatcgccctacctagctactctcgatcgatcgaccgcccgcccgccatggacgtggagtacgacgtgatcgtgctcgggacggggctcaaggagtgcatcctcagcggcctcctctccgtcgatcgcctcaaggtgctgcatatggacaggaatgattactacggtggagactccacatcgctcaacctgaatcagctatggaaaaggttcaaaggtgaaggtactcccccggcgcaaattggggctagcagagactacaatgtagacatgattccaaagtttatgatggcaaatggtacattggtccgtgtacttatccacactggtgttaccaagtacttatcattcaaagctgttgatggaagctatgtcttcaataaggtccagatccacaaggttccctctactgatatggaagctctcaagtctccattgatgggattgttcgagaagcgcagagcagggaagttcttcctttttgtccaagattacaaggaaaatgatccaagtacccacaagggatatgaccttaacaaaatgaccaccaaggagcttatctcaaaatatggtttggatgataatacaatagactttattggccatgcagtggctcttcataaagaggataactacctgacagaacctgcaattgacactgtaaagcggatgaagctttatgcagaatcagtgggtcgttttcaaggaggatcaccatatatttatcccttgtatggcttaggagagctgccacagggttttgcaaggcttagtgctgtctatggtgggacatacatgttaaataagccagagtgcaagatagaatttaatgatgaaggaaaagtttgtggtgttacgtcagaaggggagactgcaaaatgtaagaaggttgtctgtgatccatcatacatacctgataaggttagaaaagttggaaaagtttttcgggcaatcgctatcatgagccatccaatcccaaatactgcagattctcactctgtacagatcataataccacaaaagcaacttggacgcaaatcagacatgcaaattactcttggtctacttgtcatttctattattgtaacaaaagaatgttcactggtgcatgccaggtatgttttctgttgttcctactctcacaatgttgcatcaaaagggaagttcatcgcgttcgtgtcagcacaagcagagagtgaaaatccagcggcggaattgaaaccagggatagaccttcttgggccagtggatgaactatttattgatacatacgacagatttgaacctactaatgacccatcttcagacaattgtttcatctcaacaagttatgatgccacaacacactttgagtctactgtgatggatgttctttccatctatacaaagatcaccggaaagacggttgatctcagtgtggatttaagtgctgcgagtgctgctgaagatgatctctaatagttattggactgtcctttggtgcacagaggaaaagatttgtgcgttgtttttccattcatattaggtttatatatgattttttttcttttattccaaactatagtggctgagttttattaataatttgataatgctgtatattctaggttcatagcaatttagcctgtgagtaaacagctgtttttgttgttcagtttacttaatttcacctttaaatgttgtggatagtgctaatgaacaccgaactgtgtacctccaattattttg

SEQ ID NO: 70355 - DNA, 1332 bp, Oryza sativa
  Clone ID: PAT_MRT4530_70936C.1
aagagcaaattcgttttggtgcagcaatctaccatagtgtcaggctgtcagccaaaatagtcaatactggaagtttaagcatctcatatcaaagcgggaaaagaggtgtaagctaacaacacgagttgagatccacaaaacattgttctagagctagctagtacacgaatcgtctgctaccaattactaatacaactttcagagagacaacatcagcagttcagtacataataatagtgcgtccattgatctgaagcaggaaggtgcagcgcaggcatcatgtggagcaacttcattctctctcgtacctcgcaggtgagcgactgcggggcctatcatagccagggctggcttcacggcgttcacggtcgtagttgttaggggggctgcccctctcatcacctttgttgcccccttgcggacttgcaccacggtgataatcagggctacctctgtcaccacccctgccatagtccgggctgcccctctccctgcctcttccatagtcagggctgcccctctcacgccctctgccataaggacttgcagaccgcccgcgatagtccctcctgtctggagatcgatcacggcctcttctttctgggctgtatccattccttttctcatcatcatcacgaagtgcatattccacagagataaccctgtccataagagtgcttccatttgtaccctccagtgctttagtagcatcttcctgtaactcatactggacaaaggcaaagttccttctgattctgacattcgagatcttgccatattgatcgaagtgcctctccagatctcttgtccttgtgttgattggatcaaaattgatcacaaacaaagttttggttggccttgtattgtttggagatctctttgagttccctcttctaccaccactgcgatcctcctttgtccattcaaccctaagtctcctcccttttctgccaaattcaattctgtcaagcctatggatagcttcatcagcatcacgttcatcttccatgtagacaaaggcaaaccccgacttcatgtcaacacgctccacacgtccatatttgctgaagaggcgctcaatctcagattggcgagcatcatagtcaaggtttccacagaaaactggcctcattttaggacaagcaactcttctcaaacctccggggatagacgaagggaggagcgggcggcggcgcgggggaagacgacgacgacgaggacgaggaaaccctaggtctcctcctcctcggggcgattggttcgggcggcgccggcgaatggagaagcggagaggaggcagcagagcggccattccactagtttagagcgccg

SEQ ID NO: 70356 - DNA, 2284 bp, Oryza sativa
  Clone ID: PAT_MRT4530_70937C.1
tctccttctcctcctcctcccccaaccctttcacccgcccaaactcatccatccatcgatcgccctacctagctactctcgatcgatcgaccgcccgccggcagccgttttcctgagaggagaggagatcagggggaggaaggaactccattgtcctccgacgccgccgcctgctccttcctggcggtgaccgcgctcgccacgagcaggagccatggatgaggagtacgacgtgatcgtgctggggacgggcctcaaggagtgcatcctcagcggcctcctctccgtcgacggcctcaaggtgttgcacatggacaggaatgactactatggaggggattccacctccctcaaccttaaccagctctggaagaggtttaaaggggacgacaaccccccggctcatctgggtggaagcaaagattacactgtcgacatggtccccaagttgatgatggcaaatgggacatagatataggcccctcatttacactgatgtaacgaagatattttaaatttgaagcctgtagatgggaggtaagtctgcagcaaaggtaagatccacaatgtacctgctgctgacatggaagctctgaaatcacccttaaggtgccttttagagaaacggagagcaagaaacttcttcatttacgtccaagattataatgaagctgatccaaaaacacatcaagggttggatcttactacaatgacaactagagaactgatagcaaaatatggtttaagtgacgatacagtggatttcatcggacatgcacttgctcttcatagagatgatcgctacctaaatgaaccagcaattgatactgtaaaaaggatgaaactatatgcagagtcccttgcacgttttcaaggaggttcaccttatatttatccactctatgggctgggtgagctgccacagggttttgctcgcttacgtgctgtttatggtggcacttacatgttaaataagcctgactgcaaggttgaatttgatatggatgggaaagtctgtggcgttacttcagaaggtgagactgcaaaatgcaacagagttgttagttacacttcgaaattacccgaacaaggtgaggaaggatggaaaagttgcacactcaattactaaagtgaggacacccgattgcatacaccaaggactcgcactcatgtgcagatcattttcccacagaaacaacttggacgcaattcagacatgtatgtcttcggttgctcatacacacacaatgtagctccaaatgggaagttcatcgcatttgtatctacagaagcagaaactgacaatccagagtctgagctaaagcctgggatagatctacttggtcaagtagatgagacattctttgatatctatgatagatacgaacccggaaatatctcttgaaagaaaactgttttgtcacaactagctatgatgccaccacacattttgagacaacggtgacagatgttcttaacatgtatacactgatcactggaaagactgttgatctcagtgtcgatttgagtgctgccagtgctgctgaattgatctcagtgaataataggagttcttcaaaatccattcattaacgcatagatgagttcacaaataaagctattccttgttaccacaggtcaataagaccataatgaacgaaaacccaggttgactgggatgaatatggttattggagctccactccagattgtgtattcagtgttctggccaatggtctgtagcatgcttgttgttatcagtaatatgcttgaactgttgcttcagatgactggaatgatggtggtttttatttgctactttcagtaatggttgaatgatgaatgatgtaaacagtgtacacagtggagcgctttgcgactgatgtatcataactgctcgataattttacatgtataaaaaaaaaaaaaaaaaaaaaaaaaaaaaatgatctctaatagttattggactgtcctttggtgcacagaggaaaagatttatgcgttgtttttccattcatattaggtttatatatgatttttttttttcttttattccaaactatagtggctgagttttattaataatttgataatgctgtatattttaggttcatagcaatttagcctgtgagtaaacagctgtttttgttgttcagtttacttaatttcacctttaaatgttgtggatagtgctaatgaacaccgaattggtacctccaattattttgaagaatacattgtaagatttctataaaatatctttgcaaaaccggttttgagatgc

SEQ ID NO: 70357 - DNA, 772 bp, Oryza sativa
  Clone ID: PAT_MRT4530_70938C.1
gtccggaattcccgcgtcgacccacgcgtccgcagatcccctttctctctcccttctccggcgccgctttcctcgccgccgtccctcttccccttcgggtgcgccgctccccctcccctacatcccgacctccgcctccaccgccctgccgtctctgccaccgccaccgccgtggcgactcgctcccgcccgcctaagcccactgccgccgctcccgagagtggaggcgggcggatccgcgtgctgccggcgctcccgttcctgccaggccgctcccaaggacgacggccgctggattcgtgcgtcaccgtcgctaccgaggacgggggacgacgaatccgcatcggtttcttcctgccccgcctcctcacggcgtgggtctgtcggtgggatggaggttcttgcgcggcggcgcgggccggggagcgaaaggtgaggactttgtgtgtgttctcttggtgcgtttcttgctgtgatttcttgggggagctgttcgtggtttctccacctgcggccgtggacgagattctccatctctgcttcgggggatttcttgtgggtttcttcccttcctcttcctctctctcctgtggcaaggtgtgggaggacggccatggtctggaactctggatcttctctcttactgattttcctccagcacagacgagcaccacgcggaacctgcggctcgccgtcgacggcgccggcaccaacaaccaaactcgaacgtggaggggcttttgggaaagtaaaaagggggattttcattttt

SEQ ID NO: 70358 - DNA, 904 bp, Oryza sativa
  unsure (1)..(904): unsure at all n locations
  Clone ID: PAT_MRT4530_70939C.1
gccatatttgatcgaaagtgccctctcccagatctctttgtcccttgtgttgattggatcaaaaatttgatcaccaaacanaagttttggttggccttgtattgtttggagatctctntgagttccctcttctaccaccactgcgatcctcctttgtccattcaaccctaagtctcctcccttttctgccaaattcaattctgtcaagcctatggatagcttcatcagcatcacgttcatcttccatgtagacaaaggcaaacccttgcatatgtcgaactaaatgacgtcaatgtacattaatccaaacattcgtggtacatcaaagaggtggtggtggcaacctccactcgtctccagccggccgtgtggttggcatggttggattggcgtgggaaattgtaatcggacgggggaggagagtgcaacgcagaggagggtgcaatgctgatcgtaaaagtaaggcatcattcacgaggtggttgtttccaagtgaacagatgccaggatggactctgagctcctggagatggacaagagatgagcggggctcaggcaggaaaggtagagcccagtccatcatccaggaagagcagagatgctccatgatatcccgacttcatgtcaacacgctccacacgtccatatttgctgaagaggcgctcaatctcagattggcgagcatcatagtcaaggtttccacagaaaactggcctcattttaggacaagcaactcttctcaaacctccggggatagacgaagggaggagcgggcggcggcgcgggggaagacgacgacgacaaggacgaggaaaccctaggtctcctcctcctcggggcgattggttcgggcggcgccggcgaatggagaagcggagaggaggagagagtggggcccggccgg

SEQ ID NO: 70359 - DNA, 192 bp, Oryza sativa
  Clone ID: PAT_MRT4530_7093C.1
atggattgtggtgcagtagcagtgatgccgcctcaaccacaagataatatgatgatagtagataaggacatatggggtaatggagtatcatcacggaagatgaagaaacgtgtgaccgacaacaatgatgtgcaacaacaaaataagcagcacataggacaggggaagacgtggcctggttttgtgacatag

SEQ ID NO: 70360 - DNA, 231 bp, Oryza sativa
  Clone ID: PAT_MRT4530_70940C.1
gcctgtcaaggcacagccataacctgtctcggctactgctcgacgcgaacttcggaaatggacctaaatcacgccttacaccagagaaagtactcacacctcatgataaagaagctctatactttcagttgcaatccaactcaagatcattgaatccgacatttgcttattcccacgcacaacatcgagtatcatctaatactactccagacgatactgtcatacaacaaa

SEQ ID NO: 70361 - DNA, 434 bp, Oryza sativa
  Clone ID: PAT_MRT4530_70941C.1
ggaaggcccccacctagatgctttaccaagagtaatttagttttgccgtaaaacaacacccctggagtacaatatccggaacaaggtatacatagaagtagccagggtttttccctcgcctaattcctttatttgggaataaaaccatagttccagcccccccatagataaataataacacataaaacgaagggggccgggaaaaatttcaggcgcaacatgcaaagctaattttcttgggtctttaaaacacctggaaaaaccttaggcttgtgaatttacagcctaccgggctcagaggtgggcctttaagggggttaagctttttttggacgctccgtgttggcacaaaaaggctacttctgattattctccaacaagaaagaatctttgccacggagggaggcccattcacaactcagggcttgaggggg

SEQ ID NO: 70362 - DNA, 208 bp, Oryza sativa
  Clone ID: PAT_MRT4530_70942C.1
tttttggggtagattaggtaaatcatgtatatcttttcaacaacatgtacaagatcccttgttaatgggccactacatgcctacaataaccggatccatgcatgacatcacaaaatttttctacttgatcccaaagtttcaactaaaccactgatgatgatgagataaggtaaaaaaaatgaaactttaggagcctccctaacatgct

SEQ ID NO: 70363 - DNA, 331 bp, Oryza sativa
  Clone ID: PAT_MRT4530_70943C.1
gaaaaaaacagggggggccttttattagggcttcataaacttaaaacagaacccccccaaagtttcacatacttgggggattttatttttttttggtccccccatcctttttcattaggccatccctctggggccccgttctccgactcatttgaaaagcccagggggggctggtggtgatatttaggggggaaggccccgggctcttttcccctattatttttaagggttcgggcttgctccctcgatatgggggaagcattagcgatcacctcccctggcatgggccggaatattgggttcttccctgcaggggggctcaccatggggt

SEQ ID NO: 70364 - DNA, 799 bp, Oryza sativa
  Clone ID: PAT_MRT4530_70944C.1
aaacaattattaaattttattttgtgaatctccatccatagaagggaactatatattatatataagtacttccaagttccaacaaacagccacacagccacacaggtgcacattcgggccattatttagaacgcacaaagctgatatatagcatgcagccatgcacgcatgcagatgcaggagcatgacagacccagtgtcagccactccagtacatagggctacaattacaactatatatacgcgaccaatccctaaaccgagcaagctatatgctgcttcaggctgcagagacacccacatagttttaattaattaagggattgatctgtcgccggagtttcatcagttggcgacgacccggagtttcatcccggcggcgcagtggccggggacgccgcagatgtagtagttgacgcccttcttgaggaggaacgacgcggtccccgtcgccgccgccaccgagtccgccgagctgcccaccttgcagctcctgtacgtcgccgcgtccacggccagcacgttgtgtgcgcccggtttgtagttgaaaacaagagtgtcaccagcagcgaagacctttccatcagcccagctatcaaacgacacagagaagtcccaaccgttggagtcaccaacaacatgtgtttcagccagcacagtggtcgaaaacgcaagggccagcaaccctaaaaccacgagacccacactgtacttccccatggccctatgcgataattacgaactaactgtgtttacagcaagctagatttacttgtctgatatgatctatcctcgtgcc

SEQ ID NO: 70365 - DNA, 335 bp, Oryza sativa
  Clone ID: PAT_MRT4530_70945C.1
cgcctgcgtaccgtccgaatcccggtcgaccacgcgtccgcggacgcgtggaggaggtagctcggggacagggtggagaaggtctgtggactttgacctgtacctggacttttgatcctaggtagtaatcctgcagttatatgatacatattacaaatttagttgtgcatgagcccatctgtatggtgtcttacaaagcgctgttctatatcatgcttggggggtgtcaacaaactaccgttcaggtattgctagttcgatacttccaggcgtgcctatttgagcttgaagtatatagcttgtaatgatcttgttactatcattgtagagactaa

SEQ ID NO: 70366 - DNA, 577 bp, Oryza sativa
  Clone ID: PAT_MRT4530_70946C.1
cctgctggattgaggtacacgggtagctaagtcggtagcgcctgatttgggagatcaggctgtcctgtaatggaggggcatggcaaccctccactgaatgcggcggaagcagttttgaagaggcccaggagtgttgcttcaaggaagccgagatcgaaggagcagctcattagtgagttcaaggacctctcgtgcacgccgtcgcggagcatctccccggaagatgatgctggcgttgagggcagtgggcatcggcgcaaggagttgtacctcaatggccctgaggctaggggatccgtaccacacaggagtgacgcgtccagaaaaataaagagagatgttattggagctgcaggagaccatgatgaacaaaataggaccagcaaatcaaaggatggcaagcatactagtgagggggtcctggcttttgcctgcacaagaaactctggatcccttgatggccagcatttgcctccaaaagacactactagtatgccaggtttgagaaaagtaaagctcaaggttagcgggattactcgacctctacatacaaaaaacatccaagaggcaagtgatg

SEQ ID NO: 70367 - DNA, 557 bp, Oryza sativa
  Clone ID: PAT_MRT4530_70947C.1
gctgcgcggtgtgcctcaccgagttccgcgacggcgagacgctgcgcctgctgccgcggtgccgccacgcgttccaccgcggctgcatcgacacctggctccgcgcccacgtcaactgcccgctctgccgcgcgcccgtccagatcagcgacaagtccgccgccgccgccgcggcggcggcggccaacgccgcgccgggcgccgccgcggccgttcccggcggcgcgcccgcgccgaacccgcgcaacgcagctgccgccgaagccgacagaggagagctccagggctcgccggagcgcggcgtcaggcgagccgcgtcgatggtgacgctgccgaggcggccatggccggaggtctcgctccggtcgccggcgtcgaacagtgggcgcatgggcgagatgggcctcgccaagatcgctcgactgatgaaattctcggaagtgttggagatggccggcatcggagcgaccaggtcggtgtccttcggcggccacggcaggtccggccagtccgccgccgccggcgccggcaacaacgccgacgagatttcacggtga

SEQ ID NO: 70368 - DNA, 519 bp, Oryza sativa
  Clone ID: PAT_MRT4530_70948C.1
ctgttagtatttcaagcccagtggtcgtcgtcggggtgtccaaactccaatcggtggtcgtcggccggagcctgcaccaccgccacgcacggcggctataaatacgaggcccccgcgggcgcgagcacgcaggggcgcagagggggagatggaaatggaggcggaggattggggggagagctcgtcgtcgccacggccacacccagaggcagacatggtgaataaagagaaggaccccgaggagatgaagaggaagctgaaggagcgaatcctggagctggagaaggaggaggtccccctacccgacgacgcctacgccttcgtccaccacctgtcgcgcctccccaaaaggtatcttttcgacctcggcgttgacaggggggacgacgtccttctccactggaggatccttaccccatgtgcccaccccagaatcgccccgttttcacgcccgcttcaaaagttcatcctttaccggatccgatttcgaccatgccaaggctatggaagacctcattt

SEQ ID NO: 70369 - DNA, 747 bp, Oryza sativa
  Clone ID: PAT_MRT4530_70949C.1
atggatcgtcaccatcaccaccaccaccaccaccaccatcacatgatgtcgggcggcgggcaagacccggcggcgggggacggcggcgccggcggcgccacgcaggacagcttcttcctcggcccggccgcggccgccatgttctccggcgccgggtcgtcgtcgtcgggcgcggggacgtcggcgggaggcggcggcggcgggccatcgccgtccagctcgtcgccgtcgctgagccggtacgagtcgcagaagcggcgggactggaacacgttcgggcagtacctgcggaaccaccggccgccgctgtccctgtcgcggtgcagcggcgcgcacgtgctggagttcctcaagtacatggaccagttcgggaagacgaaggtgcacacgccggtgtgccccttctacggccaccccaacccgccggcgccatgcccgtgcccgctccgccaagcctggggctccctcgacgcgctcatcggccgcctccgcgccgcctacgaggagaacggcggcacgccggagatgaaccccttcggcgcccgcgccgtccgcctctacctgcgcgaggtgcgcgagacgcaggccagggcgagggggatcagctacgagaagaagaagcgcaagaagccctcgtccgccggcgccggagccgggccctcgtccgaggggagcccgccgccacccggcggctcggccagcggcggcggcgacacgtcggcgtcgccgcagttcatcatcccgtga

SEQ ID NO: 70370 - DNA, 10334 bp, Oryza sativa
  Clone ID: PAT_MRT4530_7094C.1
atgggaggcggcggcgacgacgatgtagagatactgctctactcccctgaccaccacggcacagtcgcccgtgcgcacgtagcacgacgagccggcgctgtggaggctcgactcgagtactcgacgcgcagaaggctggccaatgtcgccgccggcgaggccgtggcgcgcatcctccacgccttcctcggcaccaagggagatggagaacggcgagatggggagcgtcgcctcctcgtctacggcgacggcagcacgcctcagggcgcgcttcaggctgttggcgcgctcctacgtcacccgcctgtcgtccctgacccggagtctccagcccagcgatggctggacgacgtggccaacttggtcatgacggcacagcaacgcctgggtgctggcggacggtccgccaccaccaagacctccggcgccgccactactggttccgcgtcgtcaagacggagggcgcggcgagcggcggctgctgcacgccattcggctaccactccctcgtcggcgcctccgactcgggaggatcagcatgaagagccggatgcccgcctcgacatcgagcgtcgacgtagtgatcggcgtactccccgcgcaacggagggtgcctcttcgtccagggtgtcacctcgacatggacgtgaggatcagccctccgtgcccccggttggtggtgttggctgtagagcctttgtggcgagtcttcggaatgtccgttggcccccaaggttccggcccaccatcaccgagaagtatgatgggagcgtcaaccccaccgagtttctccaggtctatacgaccgggatcgaggccgctgggggagacgacagggtcatggcgaatttctttcccatggccctgaagggacaggcgcggggttggctaatgaacctgccacccgcgtcggtccactcctgggaggatctgtgccaacagttcaccatgaactttcaaggcacctatccacgcccaggtgaagaagcggacttgcacgcagtacagcgaggggatgatgaatcccttcgctcgtacattcagcgtttctgccaagtccgcaatactataccttgcatccctgcacacgcggtgatctacgcgttcagggggggtgtgcggcacaaccgcatgctcgaaaagattgcctccaaagagccccagactaccgcagagctttttcagctcgcggaccgagtggctcgtaaggaggaggcctggacctggaacccctccggttccggtgtggcagcttcggccgcccccggatccgccgctcagacagggcggcgtgacaggaggaggaagaaaaggtcggtccattccggcgacgagggtcacgtcctcgccgtcgagggcgctccgcgggccacccgaaaggggaggcctgcgagcgacaaaaagaaagaggctggtactcccagcagggagcgcccagccagcaagtggtgctccgtccacaacacctccctccacgatctcgcggactgtcgcgcagtcaaaaacttggctgagcgaacgaggaagtgggaggaggacaggaggcaggaacgccgtgagggcaagtccgcggcatttccctccggtaaacggcgaagtgaggccaaacagaaggcccccgccgctgacatcgatgacggtgatgatgacctaggtttccaagaacctggggccaccattgccactgtcgacgggggagcgtgtgctcacgtttctcgccggagtttcaaggccatgaggcgagagcttctcgccgcggcccctactcatgaggcgacgcgtcgggcgcggtggtcggaggtggccctcacctttgaccagaccgaccacccaccgtgtgttgcccggggagggcagattgcgatggtggtttcccccaccatctgcaatgtgaagttggggcgtgtcctcatagatggaggagcggctctcaacatcctttcccccgcggcctttgatgctatcaaggccccggggatggtgctccagccgtctcaaccgatcatcggtgtgacgccggggcacacatggccgttaggtcacatcgacctaccggtcacctttggtggatcagccaacttccgcacggagcgggtgaacttcgatgtggcggacctcagtctgccctacaacgcggtcctggggaggcccgtgttggtgaagtttatggcggcggtccactacgcctacctccagatgaagatgccgggccccggtggccccatctctgtccgtggcgaccttaaagtcgcgctcgcttgcatggagcagcgcgcggaccacctcgctgctgcgaccaagcccgagggtggtgacgagaggcttggcacttccgcccccaccgccccgaggcagcggattgccacatgcgacgaggtcccggaagacgcgctcgtctccttcctgcgggcaaacgctgacgtcttcgcatggagaccagcggacatgcccggggtccccagggaggtgattgagcaccgtctcgccgtgcggccgggcgcaaggccggtccggcagaaagtgcggcggcaggccccggaacgtcaagccttcatccgcgaggaggtggcgaggcttctcgaggccggattcatccgtgaagtcatccatccggagtggctggcgaacccggtggtcgttcccaaggcgaacggcaagcttcggatgtgcattgactacaccgaccttaacaaggcatgtcctaaggatccttaccccctgcctcgcatagatcagatcgtcgactccactgcggggtgcgaccttttgtgttttctagatgcatactctggttaccatcagattcgcatggctagggaggatgaggaaaaaactgcgtttattacccccgtaggaacctattgttatacatcaatgcccttcgggttaaagaatgcaggtcctacttttcaacgaactactcgaatttctttgggtagccaaataggacgtaatgttgaggcttatgtcgatgacttggttgtaaaaacgcgcaaccaaggaactttactttcagatctagcggaaacttttgagaacctccgctccgcccgcataaagctgaaccccgataagtgtgtgtttggtgtacctgcgggcaagcttctcgggttcttggtctctgcccgaggcattgaggccaaccccgagaagattcgagctatcgagcggatgcgcccccccagcaaacttagggatgtgcaatgcgttaccggttgcatggccgccctaagtcgtttcatatcaaggctgggagagaaggcgctacccttgtttaagctcctcaagcgctcgggaccgtttacttggacggaggaagctgaacatgccctcactcggttaaaggcatatctcagctctcccccggttctagtcgccccggagccaaatgagcccctgctactttacttagcggcgaccccccaagtagttagtgcagcgttggttgtggagcgcgatgaggacaatcctcattctgcgcacccccactctgtgccgacttggcccgggagcaggcagggaggagaggcccccgagtcgaacggtggcctaaggcccccgacgaccggagtcggccctctgcccgcttgtcagacggtgctgggtgcccccgaccctcaggaaggccccgaggccactgcgggaaggccgcacctaccaccctttgaccccgaggctaaccctgtgctgattcgacccgggagagagcagggagaagaggcccccgagccgaacggaggcctgaggcccctgacgaccggagctggccctttgcccgcgtgtctgacgacgccaggagcccccgacccccagggcggccccgaggccactgtgggaaggccgcacctgtcatcttcggaccccgaggtcatcagcgcaggagacgagtgtgccccgagaggccacttggacgaagagcaccccggggatacggcccttagcgaagaggatcggccccgccgaaaggtgcagcggcctgtttactttgttagtgaggacctccgggacgccaaaacccgataccctcgggcccagaagatgctatacgctattctgatggctccgagaaaagcatcatcaccatatctccaggcgaagcaaatcggctcgcccagattcgtgcgtcgctcaagtaatgtggcagtcttcaagagaccgcccattatggacagccaagtcaccattaccgatgtgcatgatttgagaccgttgggtttctgcccaaccatggagaccggtcccacctgtcaccaagctttaggagtggcgtcacgcccgaccgcttcccttgagaagggcgatcgccctggcataacgccgggggctactgtcggtgatatgggaccgggagtatcgtgaccagaggcttgaggcagacacaatcgcccacgtggcctggcaccttcggggacgacgggcccgagggtgaggtgtccgccctcctcctgatttcccccgagggggggtcgggcaacgggcagccacgatcccacgttgcgcctgtctccgccgggagtggagactcttccgtgtgcgccaactttttcttgttcagcctaatggccgagcaaggaaaagcgcacgacctctctccaagtgtgagcggcgacgacggggagccgaatccacgccgtcgagctcgtactcccccacctcctccgcgccaaagccctaagcagggggaggcgcttgagagggtcgacaaatccgtggcatcaccagtcgcaggtgatgcaggagaacggcgagatggggagcgtcgcctcctcgtctacggcgacggcagcacgcctcagggtgcgcttcaggctgctggcgcgctcctacgacacccgcctgtcgtccatgacccggagtctccagcccaacgatggctggaagacgtggccaacttggtcatgacggcacagcagcgcctgggtgctggtggacggtccgccaccaccaagacctccggcgccgctaccaccggctccgtgtcgtcaaggcggagggcgcggcgagcggcggcggctgcacgtcattcggttgctactccctcgtcgacaccttcgactcgggaggatcagcatggggagccggatgcccgcctcaacatcgagcgccggcgtagtagccggcgtaccccccgtgcaacggagggtgcctcctcgtccagagtgtcacctcgacatggacgtgaggaccagccctccgtgcctccggctggtggtgttggctgtagagcctttgtggcgagtcttcggaatgtccgttggcccccaaggttccggcccaccatcaccgagaagtacgatgggagcgtcaaccccaccgagtttctccaggtctatacgaccgggatcgaggccgctgggggtgacgacagggtcatggcgaacttctttcccatggccctaaaaggacaggcgcggggttggctaatgaacctgccacccgcgtcgcggttttgccaagtccgcaatactataccatgcatccctgcacacgcggtgatctacgcgttcagggggggcgtgcggcacaaccgcatgctcgaaaagatcgcttccaaagagccccagactaccgcggagctttttcagctcgcggaccgagtggctcgtaaggaggaagcgtggacatggaactcctccggttccggagtggcagcttcggccgcccccggatccgccgctcagacagggcggcgtgacaggaggaggaagaagaggtcggaccgttccggcgacgagggtcatgtcctcgccgtcgagggcgctccgcgggccacccgaaaggggaggcctgcgagcgacaaaaagaaagaggctggtactcccagcaaggagcgccccgccggcaggtggtgctccgtccacaacacctccctccacgatctcgtggactgtcgcgcagtcaaaaatttggctgagcgaacgaggaagtgggaggaggacaggaggcaggaacgccgtgagggcaagtccccggcggttccttccggcaaacggcgaagtgaggctaagcagaaggcccccgctgttgacattgatgatggtgatgatgacctaggtttccaagaacctggggccaccattgccaccgtcgatggaggagcatgtgctcacgtctctcgccggagcttcaaggctatgaagcgagagcttctggccatggcccctacccatgaggcgatgcgtcgggcgcggtggtcggaggtcgctctcactttcgaccagaccgaccacccaccgtgcattgcccggggagggcaggttgcgatggtggtttcccccaccatctgcaacgtgaagttgggacgtgtcctcatagatggaggagcggctctcaacattctttcccccgcggcctttgatgctatcaaggccccggggatggtgctccagccgtctcaaccgatcatcggtgtgacgccggggcacacgtggccattaggtcacatcgacctaccggtcaccttcggtggacccgccaacttccgcacggagcgggtgaacttcgatgtggcggatctcagtctgccctacaacgcggtcctagggagacccgcgttggtgaagttcatggcggcggtccactacgcctacctccagatgaagatgccgggccccggtggccccatctctgtccatggcgatcttaaagtcgcgctcgcttgcatggagcagcgcgctgaccgtctcgctgctgcgtccaagcccgagggtggtgacgagaggcttggcccctctgcccccaccgccccgaggcagcggatggccacatgcgacgaggtcccggaagacgcgctcgtctccttcctgcgggcaaacgctgacgtcttcgcatggagaccagcggacatgcccggggtccccagggaggtgattgagcaccgtctcgccgtgcggccgggcgcaaggccggtccggcagaaagtgcggcggcaagccccggaacgtcaagccttcatccgcgaggaggtggctagacttttggaggccgggttcatccgtgaggtcatccatccggagtggctggcgaacccggtggtcgttcccaaggcgaacggcaagcttcggatgtgcatcgactacaccgaccttaacaaggcatgtcctaaggatccttaccccctgcctcgcatagatcagatcgtcgactccactgcggggtgcgaccttttgtgttttctagatgcatactctggttaccatcagattcgcatggctagggaggatgaggaaaaaactgcgttcattacccccgtaggaacctattgttatacatcaatgcccttcgggttaaagaatgcaggtcctacttttcagcgtactactcgaatttctttgggtagccaaataggacgtaatgttgaggcgtatgtcgatgacttggttgtaaaaacgcgcaaccaagaaactttactttcagatctagcggaaacttttgagaacctccgctccgcccgcataaagctgaaccccgataagtgtgtgtttggtgtacctgcgggcaagcttctcgggttcttggtctctgcccgaggcattgaggccaaccccgagaagattcgagctatcgagcggatgcgcccccccagcaaacttagggatgtgcaatgcgtcaccggttgcatggccgccctaagtcgtttcatatcaaggctgggagagaaggcgctacccttgtttaagctcctcaagcgctcggggccgtttacttggacggaggaagctgaacatgccctcactcagttaaaggcatatctcagctctcccccggttctagtcgccccggagccaaatgagcccctgctactttacttagcggcgaccccccaagtagttagtgcagcgttggttgtggagcgcgatgaggacaatcctcattctgcgcacccccactctgtgccgactaggcccgggagcaggcagggaggagaggcccccgagtcgaacggtggcctaaggcccccgacgaccggagtcggccctccgcccgcttgtcagacggtgctaggtgcccccgaccctcaggagggccccaaggccactgcgggaaggccgcacttaacgccctttgaccccgaggctaaccctgtgctgactcgacccgggaaagagcagggagaagaggcccccgagccgaacggaggccagaggcccctgacgaccggagttggccctttgcccgcttgtccgacgatgccaggagcccccgacccccaggacggccccgaggccaccgagggaaggccgcccctttcatcctccgaccccgaggtcatcggcacagaagacaagtgcgccccgaaaggccacttgaacgaagaacgccccggggatacggcccctagcagagaggatcggccccaccgaagggtgcagcggcctgtctactttgttagtgaggccctccgggacgctaagacccgataccctcaggcccagaagatgctttacgctattctgatggcctcgaggaaactgcgccattattttcaggcacatagggtcactgtggttacgtcttaccccctcggtcaaatcttgcataatcgagagggtacaggacgggtggtaaaatgggcaatcgagctttctgaattcgatctgcactttgaaccacgccacgctatcaagagccaggccctcgccgattttgtggcagagtggaccccggctccagagaccgtctcaatccccgaggccagcacgaacccctcgcagctgcctcacaccacccactgggtaatgcagttcgatggttctctgtccctccagggtgccgagtacgagggactccttgccggactcagggtggcagccggactggggatccgccgtctcctggtgttaggcgattcccagctggtcgttaaccaggtctgtaaggagtaccggtgctctgacccgcaaatggacgcctatgtacgccaagtgcggcgtatggagcgccattttgacgggatagagcttcggcatgtgcccagacgggataacatgatagctgacgaactctcacggctcgcgtcctcgcgagcccagaccccaccgggcgcctttgaagaaaggcttacccagccgtcggcgcgacccgaccccttaggggagacggatgcgcctgaccggcccccgaggcccgtcggagtccaggcctcgggacccgaagggagcgcttcaagctcccttagattgattgcttggatctctgagatccaaacatacctcacagataagactctacctgaggaccgcgaagggagtgaacgcgaacaaggcgttgagcttcttgctgatatccatgagggcgagtgcggagcccattccgcctcgcgtaccctggttggcaaggcctttcgtcaaggattttattggccgacagctctcaatgacgcagtcgatctggtccggcgatgcagagcgtgtcagtttcacgccaagcaaatccatcagccggcccaggccctgcagatcataccactgtcatggccatttgctgtctgggggcttgatatcctgggaccgttcaaacgggccccgggcgggtttgagtatctgtatgttgcgatcgacaagttcactaagtggcccgaggcttatccggttgtcaagatcgataagcactctgctcttaaattcattaagggcatcacggcccgttttggagtacctaaccgtattattacggataatggcacccaattcactagtgaactcttcggcgactactgcgaagacatgggcatcaagctctgcttcgcctcacctgcccaccccagaagcaatggccaagtggagcgcgccaatgcagaaatccttaaaggcctcaaaaccaagaccttcaacattctcaagaagcacggcgattcatggatcgaggagttgccagcggtgctctgggcgaaccgaaccacaccaagccgagcgaccggggaaacgcctttcttcctcgtctacggcgcagaagcggttctcccatctgagctcaccctgaggtctcctcgggccaccatgtactgcgaggctgatcaagatcagcttcgtagagatgacctcgactacttggaagaacgaaggcggcgcgcggccctccgagctgcgcgctaccagcagagcctgcggcgctaccatcagcgccacgtccgggcccgatcactctgcgtcgacgacctcgtcctacgccgcgtccaaacgcgtgctggactgagcaagctctcaccaatgtgggagggtccgtatcgagtgatcggcgtcccccggccgggctccgtacggctggccacgggcgacggcactgaactgccgaacccgtggaacatcgaacaccttcgtcgcttctacccctga

SEQ ID NO: 70371 - DNA, 344 bp, Oryza sativa
  unsure (1)..(344): unsure at all n locations
  Clone ID: PAT_MRT4530_70950C.1
tcgattgattccattacccaacctcaagctagctagctctccaccgtctgcgcccattcaggtcagcttctgctttctgactgactttgagttcttcccatgttttgtcctctgtctcgcgttctccttgattttgggagctggtagaaagctaagctagattttagcttagctccgattgccatggagatcgtctggagcatgattcgtctgccctcctgcttctttggaggaagctagctagttatgttttcttgtgcatttttttctcttcttctttcttcttcctcgctttgcctcgttgatttggtgttgcctagtctntgcaaataagttctcaaact

SEQ ID NO: 70372 - DNA, 326 bp, Oryza sativa
  unsure (1)..(326): unsure at all n locations
  Clone ID: PAT_MRT4530_70951C.1
gtcctggaccagttactaattggaccacaccactatgtagttgtaaagaaggcacaaagagaaggatgtgcttacattgcattcaagacaaaccctaactctatggtaagccacattgcaggaaagagttccatcttccgtgctctcccaactgatgttctagcaaatgcatatcgcatctcaagagaagagctcaaggctcagcatacanaggagatgagtcggtgcatcactccnctcatacangactccagacgttatatgtggcgatctttaagtgcatgcgataagatactaataataataataattgcagcatggtgtgt

SEQ ID NO: 70373 - DNA, 411 bp, Oryza sativa
  Clone ID: PAT_MRT4530_70952C.1
atggagatcgcggatccagcggcctccaacccagacgtgagaaatatggcctcatacttcatcgatcccacaaccacatggcaccgcttcccctccccttctcgcttgctcctccgacggcgccgcttcccgacttccggcggcgagcagccgggctgcggatgcgccctcgctggcccaggacgatctgggacccacgggcgtagtctccgcggcatcggcgacggcaacggcggccggccggcgggaagctttagctccggccagattgacggcgccctcgccgccggcttccgtggagagcagagacagagcgacctgtttatcaacgcgggtcgattctatctcatcgcctccccgggggcacccaccccgactgaatacagcgtaaagatcgcctccgtgcgcacg

SEQ ID NO: 70374 - DNA, 2014 bp, Oryza sativa
  Clone ID: PAT_MRT4530_70953C.1
agaaagatgtcctccttgtggttgttccttgcagtaaacgacaatccgatcgagggctttcaaattgcgtgcagggccaaaagattacaagttacgatttataaacacgaaaaattccgcaatcatgcgaattattcacagaatacaccaaagtatgtgtaactgcttgtccaagaagatagtgaaggttaatatagcattagcataacatcttacagtaggtgtctacgataagaactattgacaaagtttccacacgctgtaaaatgccaggggtcccttttacataagatggcactccatggatatatgtttacaccgacttgttcttgcaagaattccaacagtcacctcaggaattcagcttgatgccttttcttttacccttgctgttccattcaaagtttcttagttcttgtacttcatggtttctttctcaaacccaattgtggggaactgttttgcatattcctccacatcatggcgaagttttgcaatctcggattgaatgttgctatcagattgcaaagtggcaacaaagtccttcagttttgttccacctgctgcagccttaaccttcaaagccaagttcactgctgcatcgaagaaatcagcaaccttagcaaagtcctcctcaacaaatcctcttgaggtcagtgctggggttcccatcctgatgcctcctggtaccatagctgaaacatcaccaggaactgtgttcttgtttgctgcaatgtgcacgttttctaaaaccttctccactcttgaaccatctatgcccttgctcttgagatttaccaacactaaatggttgtcagtcccaccagagacaagttcgtagccttttgctgtcaagctctgtgcaaattttgcacagttactcataacttgctcttgataagctctgtactccggagtagttgcctgcttaagcgcaacagctaagccagtaatggtatgattatgtggtccaccttgcagacctgggaagacagcagcattgatcttgtcctcaaagtcatacataacctctttgccttgcttgtttactcctttcacccccttcctgtaaaagatcatggctccacgtggtccacggagtgacttgtgagtagtggtagtcactacatctgcataatcaaaaggagatggaacaacaccagctgcgacaagcccactgatatgtgccatatctgctagaagtattgccttctgcttgtcacaaaccttccgcatgcggtcatagtcataaagacgcgcatatgcacttgcacccgcaacgatcaactttggcctaaaaagaacggcacttttctccatctgatcataatcaatcaagccagtgctttcatccaatctgtagggcattgtctcaaagaatatcgaaactgctgaaatcttcttagtatcagtctggtagccgtgagaaagatgtccaccatgaggaagatccaaagccatgattctctcatgtggtttcaatagggcagtgtaaacatggaagttggcaggtgaccctgatagaggttgcacattcactccccatttcgctgggtccaagcggaaggcctccaaagcacgtttctggcacaatgactcggccatatcaatgtattcgtttccaccgtagtatctcgcgccggggtacccctcgctgtacttgttggtcatgacggatcccaccgcctgcatcactgacaccgaggtgaagttctccgacgggatgagctccagacccttccattggcgggccttctcgtgctcgatgatgtcggcgatctcgggatccacctcctccagcggcgcgttcagctgcttcggccaggtgactccggatctctcctccgtcgccggcagggacgccatgtagtagagcggggtgatgcgggagagcggctggcggcggagggcgtcggaggagagcttgcggagcgccgtcgccatggccatggtgggcgagcggcgagcggcgggtggtggtggaggcgggggggtctcggggttttccggccgg

SEQ ID NO: 70375 - DNA, 626 bp, Oryza sativa
  Clone ID: PAT_MRT4530_70954C.1
tacaatatggcttgatctttctttatttcacaacacttaataatgattttgttcttcacttagttcacctcagcatgttacgaattgcaaattattggtttttcaacatgatgaattgtgctttaacatttgaaccacttccttatctggtggcaatttatcacttccagagcttgacagcaaaaggctacgaacttgtctctggtgggactgacaaccatttagtgttggtaaatctcaagagcaaggtaagacaaacatgtgggacgctttgggtgttttgagatattttagttctatctttcagtttctcttatgagtgctcaccaataaactttcagctgcttccttttaaaaaatatcgattgatgtctatttaacctcaagcttgctgtttctgtatataaatgatagctaaatgtgctttgcagataaacttgttttttttttttcaaatttttatgccatatggggacaattatcatcctcttcaaatttcatgtttagggcatagatggttcaagagtggagaaggttttaaaaaacgtgcacattgcagcaaacaagaacacaagtcctggggatggttcagctatggtaccaggaggcattaggatgggaacccc

SEQ ID NO: 70376 - DNA, 303 bp, Oryza sativa
  Clone ID: PAT_MRT4530_70955C.1
atgcgcaccgcagccgccaggattccggtgctttcttcacccgccttagtgaacgacatggccagacagccgtttctctcacctgtgcatgcggacgacgtagtcgccggggattgtggagccgatgagaagcagaaaacacatattgcacagaacttcgaggggatgactatgatcatgcatgatgaagttgcacaacagtgtgttacacttatgatcagctatatgttgtttgagaacgattggcctccagatttgacattcaagattcagattacacaattttccagttttcatttttga

SEQ ID NO: 70377 - DNA, 305 bp, Oryza sativa
  Clone ID: PAT_MRT4530_70956C.1
gtgatgtgcactagggttcccgatctgccgaaagattctgataaacaacgatttgggcatagtcgcgacacaaatcgatccggcttcttgaacgcgcacactcttgagccccgcaatcgcagcaccacgtctcctctggttatcacccgtgtcgaaacggccgaaaggcccaaatacggtgacgcagcaccaggacagattctggacgtcaacttgttcggtcgattcctgttgactcggaaagaatttggatgtgggaccaaaaccattggaaattccaaaaatccgacaatcaagttgggaca

SEQ ID NO: 70378 - DNA, 540 bp, Oryza sativa
  Clone ID: PAT_MRT4530_70957C.1
atgacgacgtcttcctcccccttctcgccggagtcctttgtcaacgctgttgccgcgtccgtcgccgacgccgtccgcgcggcctaccaagccccgcccggctcgatgcatctgccggcgctctccacggtgcccgccgccacctcacctccacctgccggggatgccgctcctgcgtctgtcgcaccgaccccgccggcgctctcacccgagctggcggcgctcttcgcccggctcgcccacaacattcccggcgtaccacaaggcgccgcaccggctgcgtcctccaacgacgcgccgccggctcctgtcctcgacgacaacgcgcgttccgcgctccgctcccaagccgtcgttgttctgaacgtgaaggcgctggtgctcgtgaccctggacatcgccgccggcaactacgctcgatggcgtggtctctttctcgtggttctcggcaaatatgccttgacggaccacgttctctgcgatgctcctcgccccgacctagccgagtgggtgcagatggattgcgtcgtcctcagatag

SEQ ID NO: 70379 - DNA, 4302 bp, Oryza sativa
  Clone ID: PAT_MRT4530_70958C.1
atggcagaagtggtggtgttggcgggctcagggtgggtcgtgtcgccaatcatgcggaagatcatcaacgatgctaaaacataccttggcaaggacatggcacaggagctggacgatcttgagaccaccgtcataccacagttcaggttcgtgatcaaagcggcagagaggagcccccgccggatggagttagagcgctggctttggaagctcaaagcagccttctatgatgccgaggacctgctcgacatgcatgagtacaaactcctccagcgcaaagcaactggaaacatttctatgccctcaacctccaactctcgccttgctttggtgtctaccgcgtccaatttgctccctgccaacagaagactactccgtaagttgacagaactgaagaacatcctggtggaagccaagaacttccatcgggagttcctttcagcagggactactgcagcagccatcacagggcctcatgtcaacagcagcagcagtaccatcaccacatcgcttcccacttcaaaagtatttggtcgtgacgcagatcgtgaccatattataagttttctctgcaacccagatgacactaacactagtggtgagagaaactactgtacttcggccatcgttggacatggaggtgcagggaaaaccacgctggcacagtatatctacaatgatgagcgtgtggtgaatcattttgatgtaaggatgtggatctgtatttctcgtaaactcgacgtgcatcgccatacagccgagatcatggagtctgccacaaacaataatcgagttgtgcattttactaaccttaacaatctccagtgcgcgctgagaggcgtcttacaagagtcacagaggttcctacttgtgttggatgatgtttggttttatggtttccaggacgaggaggaatgggcaaaactgctagctcctctagtttctcagcaacggggaagccaagttttggttacttctagatcagggagactcccagctcccctttgttgtaaacaagtttttcctttgcagaacatgaaggacactgagttcctggcactcttcaaataccatgcattttctggagcaggaatgagagagcagcacagaagcgaggagctattagatattgcagggagaatagctcaaaagcttggacaatctcctctggcagcaaaagttgttggttctcagttgagcaggaacatgactatcactgcatggaaagatgctctgaagagtgataacttaggtgagaccaggggatctctactgtggagttatcagaatctagatcctaacatacagaggtgctttatgtattgcagcttatttccaaaaggtcatgtgtttgtaattaatgagttggttcacctctgggtagcagaggggtttgttgttgattcatctgatgtcaattcatccgatcagagtaggacagtagaagatattgccagggcgtacttccgtgagatggtatctgcatgtttctttcagccagttcctaaaagctttgatacatcatatagtatgcatgatattattcatgactttgcggaaacactttccagaggagactgtttcagattagaagactgtatggtgacagaaattccgcacactgttcaacatttgtctgtttacgttgatagaatgggacagcataaacaaagcatctgcaagttgattcatttgcgtactgttatcttcatggaaccagtaatggatgatgcaaataaactatttcatgaggtattctgtaacatgaagaaattgcgagtattgcttttgtgcttttacaatagcaggaagttgcctcagtctattgatgagttcaagcacctgaggtatttgaacatcctcaaaacttcaatttctgaattacctggatcattgtgtactctttaccatttacagttccttcgggtacatcgtgatgttaacaatctgcctgcgaagatctgcaacttaagtaaattgcggcatcttgaaagatgctctcctagtctttcatttggaccaattgcacaactacctgtgcctcaaattccttatataggtaagttgacgaaactccaacatgttttggaattctctgtggcaaaacagataggttatgaactacagcagttaagggacatgagagagcttagaaacattttacaaattaactatctcgaaaatgtcagaacgaaggatgaggctttggaggcgatgctgcataataaaagtcggcttgatcgtttggaactttcctggagttacatagatgacttgcatataaatgacaatttgcatttggaggttctagagggtctcaagccacctcgtgaacttaatgaccttatagttacaggctacagatctccagtatatccaagctggttgctcgaagattcttattttgttaatttaaagacccttgtgcttagtaattgcacttccctggaatgtttaccatccagtgtacagctcatcaagcatttccgtcatatagccctccgcaacatcctgaatctgaagacattaccatgctttccaggaggccttgtatccttaaatatgatgggttgcccgttgcttagatttatttctagggaagaacttggacaggatgtacaacatacagatttgatgaaagtgggcaatttgtcatccacccttgcaaggatcctggaggcaaagagaggatcaaagattagtaaaaaggtcagggacacgttggtgttcgaacattcatctctgaagcagttgatggcattgatggatgatgatatatccgcacaactccaaaccataaaaagtgctatagaaagtgaaagagaggaagtattgttggaagaaaatatcataaaagcatggttgtactgccaagagaagaggacgaaacttatctattcaagacccactgagaatctgttgcttctcccatcatcgattgagaatctctctctttcttcatgcaacctcacagatggagctttagctgtttgccttcaaggactcacctcgctgaaatggttgtctatagagcgaattatgaacttaacttcgttcccatcaccgcaggtgctgcagcgcttgacgatgcttaaaagattatatatccgttcttgctggtgcctcagatcattgggtggcttacgagaggcaacctccctttcagaagttaagatagattcatgcatctcattagagttggtggatgaaaatggaatagctgttatgccatcctctattggaaagctctctctatttggctgcatactaggggccaatttcctcagtactgacttcccacgtctgcgtagcatttccatcacatgctgccgaagctcttcatcatttgctattggtcatctgcgttccctggaatcactctcactgaataacatgccagacttgtgctttcttgaaggcttatcatgtccacatctccaggacatacatctgataaatgttccaaatcttaccgcagagtctttttcccggcatcatgcatggaaatcactcgctattagtagctctgctatgctcagtctcatgctctctataaaggatttcatgctcccagagaaactctgttttgaacaatacgacgagccatccattacatttcaaagctctgcaaatttcacatctatcaagtttctagagttcagggattctaaagtcatgtacctgccaagcagtttgaagaacctgtccagtctggagaggatcaaatttgtcaggatccccaacttatcatctctaccagatttccctaattctatccagcaaattgaaatacaagactgcgagtgcttgaaaagaagctgccaggcacctaatggagaaaactggcaaaagattgagtgcatccgttggaagcttatcgaagtttccaaacctgatgaaagtatagcgtggttcatacacaggtatgataaagttggaatagctgcctaccctaagaagctacagcctggacaacctgtggtctgggcaccagtgcgccatcgcccactcaccgagggctcgccacaccctctctcctctgccaggtggcgtaacccaaccaaaatgcagggaatgttcatgcataaggatttactactccgttctagaaagaatccaatcctagcagcgaacctgcgtgtccagatctctgtccaggcatctatcatcatggggctgcagggtgctgtttcacaaactgcactacagcccggacaaccatcgcgtggatgtactggcagatgtccgtccaacagtagagagctggtatttcgcaaacaacaaactgcattagaaatgtga

SEQ ID NO: 70380 - DNA, 460 bp, Oryza sativa
  Clone ID: PAT_MRT4530_70959C.1
gagtgaggagcacgtcgattgattgattataaatccatggatctcccggattaattccaggtacatggatatgatggatgggatatggtttacacgtcgtctcttcgatcgatcggtctcgcctccgtttagttcgccggtgatgatgattcgcttgcggctgccgctgccacggcggcggcggttttctcgtcggcggcggcgtccttcttctcctccgcctccgacggcgaggaagactccgggacagccacgtcgttggttttctcggcggcggtctccttcttctctgcctccgacggcgacggcgagcgtggcagcggcgatggtgacgtccttcttgaccaccaccgccgccgccgccgcctcctcggccgacgtcacctcgacggcgtcggcctcggtctcctcctccttcttcgtcgcgacgtccttgacggagacggaggtgcatccattg

SEQ ID NO: 70381 - DNA, 789 bp, Oryza sativa
  Clone ID: PAT_MRT4530_7095C.1
atgtcgttgcccttttcctccgaatctgcaagcaccgctcttgagaaggttgtcaaagccatcgccgacgcggtgcgcgactccttcactacctctgcctctaccgacgtcgatccaggcaccgcttcgactatcgccaacgtcgctgctaagcacgcttctcaagccccccacgacgccatcaccaatgccttcgcctcgctcttttcctcctccacatccccagcgccgattgatccaccaccgactactgacactacgactcctccgtttcgcacattccatcaagttgacctatctatcaccgactactgccgcaagatgaaggccatggcggactcccttggcgaccctgtcacgaaccgctatctcgtcgtcaccaccctcaacagttggagctccaagtttgataatatgcaaaccttaataacgatgcagtgcccattcctgtctttcgccgacgtgcgctctcaacttctacttgaggaactctccaaggcgaacaggcacaccgaccagtccactgtcttcctcgccagcaccttcgccaagctgctcgtcggctccaaccccgcccacgccacctatttcggtgcagggaacaaatgcggctccaacgagaatcaaggctgtgggaacaattcttctcgcaatcaccgatgtcgcggcggcagaggcggtggtggtggcggcaaccagccgagcagcatcgcgcctcaccctccaatgaaccaacccgagtactggcccacaccacaaaattcgtgggctggtgttgacggtcattaa

SEQ ID NO: 70382 - DNA, 396 bp, Oryza sativa
  Clone ID: PAT_MRT4530_70960C.1
atgttattaataaacttggttaagtttgactacggaaaaagtcaaaatgaattaacaaaatatacccagatcattcctaaccgttggatcctctcatctaacgacctacgttgtggctcgtcgccactgccatcccccagccaatgtcatcgccggctcgccaataggcccaccaccgtgcgccttagcccaccaccatcgcctcgtctcgtgtcgccatctcccctcaacacagtgcgctgtggctgctacacattaactccgctcgacatcgccgcctgcccaccgctgtcggtgctgtcgatttgtcgtcatcctcaactctgcatcttcgccataaggaaggcagtcttcacatcccttgccaactcctatgcggttgctcctaccgtctgc

SEQ ID NO: 70383 - DNA, 896 bp, Oryza sativa
  Clone ID: PAT_MRT4530_70961C.1
cttcaagctccgccgattcctctcctcctcctccgcctcctcctccggcgtcgtcggcgtcagcagcggcgccggccatgggttgcggtggctccaaggaggacgtggccaccggcaacaccaccgcccccgccgccgccggcagcagcaagctcttccggaggaagtcctccgtctccgccagccaccgctcctcctcctcgtcgtcttccaatggatgcacctccgtctccgtcaaggacgtcgcgacgaagaaggaggaggagaccgaggccgacgccgtcgaggtgacgtcggccgaggaggcggcggcggcggcggtggtggtcaagaaggacgtcaccatcgccgctgccacgctcgcggtgaccgaggcgatggcgacggcggcggagccgaaggaggaggaggaggaggaggaggagctgcccgagtccaccatggccgacgaggcgccggcggcggtggtggaggcggcgccggccaaggccgacgagacaaaggaggtcgctgttgtcaaggaggatcaggagaaggctgaggaggagaccaaagccgaggaggaggagacgccgtcgtctccagctccggcaactgaccttggggaatcgaaagagcagaacaccatggaggccaaacctgccgtcaacgacaacggcgagcacaaggtagaggaggtggccaccaccgtcgtctcagagtcatcgtcgccgtcgccgtcgccgtcggaggcagagaagaaggagaccgccgccgagaaaaccaacgacgtggctgtcccggagtcttcctcgccgtcggaggcggaggagaagaaggacgccgccgccgacgagaaaaccgccgccgccgtggcagcggcagccgcaagcgaatcatcatcaccggcgaactaa

SEQ ID NO: 70384 - DNA, 386 bp, Oryza sativa
  Clone ID: PAT_MRT4530_70962C.1
aaaaaaaagaagaaaaaaactaaccatttcaaaagattccaatatgactcgtggatccattttctcaggattcccttcagaaaaaaaaaaaaaaaaaaaaaaaaaaaaaaaaaaaaaaaaaaaaaaaaaaaaaaaaaaaaaaaaaaaaagggctaccaaataaaaaaaaaacaaccacaccaaatgcagcatacatagaatacaaaagatttgttcgcgtcaacaaacgaaaatagactgcccgcgatcaaaaaacgtatgtacttacaaacccctacaccaaccaaaattattccctggggtaaaaagcggcttttacacagaaatctaaatatcaaaaagaccaaaaccgaatgccgtaaaaaacaattacccaacctgaattg

SEQ ID NO: 70385 - DNA, 611 bp, Oryza sativa
  Clone ID: PAT_MRT4530_70963C.1
attcggcacgaggacgaaaccaaggcacccgttttcgtcctccgctttccatcgctccctccacctccagcgggactaccaccaccaccaccaccaaccgccgtgcggacgccgccggcttcccggccgcgacgcggaggaggaccgaattcccccccacccctccgtccaatccgcgcgcaccacctccgagggaactccatgtatgcaaatgtcgccacccgttgtagaatcaataaagctgttctagcagctaacctttggtttggtggatttttggaaaatgatgatgggaagagaggacaaatatgtgaggtcagtttcctccatcaccagttgtttgaaatagtttacaaagaataaaggcttgtcaaatgtcttgtgtcataacttatagtaacaagtttaggacatgaaacatggagagggtttggtgatttctaaagagcaatggtaatttggtggttctacactagtgtggtggatgtgatccaagctgtcaataatgaggccacactttggtgtttggcgggagcttcgaaactccaaaagctgttgtctaaggcagtagttcttgcaccctagggaggtcggcttgagtttcttcggtt

SEQ ID NO: 70386 - DNA, 210 bp, Oryza sativa
  Clone ID: PAT_MRT4530_70964C.1
atgtcaaaccgacggacctacctagtagtcgcactaattcctgtaggctgtactaccctaattccttgtcgctccacccttgtggtacctcggtatccgtgctctctgagcgtgtataccaaatatcccacatacaccgttgattgtcgaaaatttgggaaatgggtttgagaagccttgaaaacccgacatgtggcgtcggtgggtttg

SEQ ID NO: 70387 - DNA, 334 bp, Oryza sativa
  Clone ID: PAT_MRT4530_70965C.1
ggggggggggggtttttttttttttttttttttttggaggcagaagaacaaggaaggtcaacatttattcaccaaagggaaaaaggcctccggacaaaagaaagcaccaggtatttagcaaccccacagaggcaaacacacagctagctttagggggggagggaccaggtctcgggggcccaggaaaacccagccaggagcagacaccaccgggcccaagggggaaggccacggggcaaaacgccgggagggtcgccgccgcgcgctccaaggcccctctccggcagccggggaaacaccccggccaggggggggcccaacatacgggggcgcc

SEQ ID NO: 70388 - DNA, 189 bp, Oryza sativa
  Clone ID: PAT_MRT4530_70966C.1
atgggccaagctcataagcacgggagagagaggaggaggctgactaggtggctgacagggcaggcgtggacttggtcaagcccatgtggactgccatgcaagcgcgagagagagggaggcctggctcgcccagatcggacggctcacggcggccgaggggcaccggcgaacggcggcgaatcggagtga

SEQ ID NO: 70389 - DNA, 564 bp, Oryza sativa
  Clone ID: PAT_MRT4530_70967C.1
ttatccggaggcggtggatagggacacatgcgcccccctccccccggtccactcccggtccgacccaaccgccgaccgctcgaaccggtccggaccaccattattaccccggttcaccctcctcctcctcttcttctccagcgagcttaaccatctcgacctctctcctctcctctccacccccaccaccaccactctccccgcctccgcctccgcctccgccgccgccgccgccgtcctcctcttctcgcggtcgctgcgtcctcgcctcggggctcggcccgtgctgccgccgttacgcgtgggctgatttcctcctcgcttccacgtacgccatctaggaagaggacggttgcgcgcgcggcggcggcgcggcgcgtgatctccgccgggggaggaggaggaggcgggggttgatgggttagatctggcggtttccgggcggcgtggatctgaaaccgtggtggaggtggtaggttttttcgttcgcggattcctttttgctgttctgctcgtttccattttctcgcaagcggagattggagctggagctgacgaggtgtg

SEQ ID NO: 70390 - DNA, 1914 bp, Oryza sativa
  Clone ID: PAT_MRT4530_70968C.1
atggcggaggcgatcgcgtccgcgggtgggatcgccatggccgcctcgacctccctcacgccgggccagggatgtggatcaaagggtgtaaatcatcaggtcatagctgtgcttttgtatggtaggctagtagcaccaaatatatggtggaggtttcattcatccgagctgttggaaaattggcgatataatagcttatatgtagggtttaaggttggaaattcgtctctgctcttctgggatttctttgggttttcaccgcctgggcatatgcggaggttctctattataggaagaatgctgcttctattaaagcgcacttattctagaaaatcgatggacgaggagaggaataattacagccgagatatgttccttttcctttactttcttcttattatcgtagcagctatgacttctttcaaggtccaccaagacaagtcgtcattcacggggaaatctatactgtatctgaataggcaccaaactgaggaatggaagggttggatgcaggtgctgtttttgatgtaccactacttcaatgctaaagagatatacaatgcaattcgtgtgttcattgctgcatatgtctggatgactggatttggtaacttctcctattattatgtgcggaaggatttcagccttgcacgatttgctcagatgatgtggcgcctcaattttttcgtggcattctgttgtattgtgctaaataatgactacaccctctattatatttgccctatgcacacactttttacccttatggtttatggtgctcttggaatactaaataagtataacgagattggatcagtgatggctataaagtttgttgcctgctttttggtggttatcctgatatgggaaatcccaggagtcttcgagattgtctggagcccattcacgtttcttctcggctatactgatccatctaaacctgatctccctcgattgcatgagtggcatttccgatctggactggatcgctacatatggattgtggggatgatttatgcttattaccatccaactgttgagaagtggatggagaagcttgaagaagctgaaacgaaaactaaactctatattaaggccttgatagtttcaattgctttaacggctggttgtttgtggtacgagtacatttataagctagacaagattacctacaacaaataccatccctatacatcctggatccccataacctggctcggaaagattaccttagaaacgtacatatcacagttccatatttggctcagatcaaaagtgcccaatgggcaacctaaatggctattgacaataatcccaaattacccaatgctgaatttcatgctcacaactgctatatatgttgcagtctcccataggctatttgagttgactaacaccttgaagatcgcatttgtgcctagtcgtgacaacaagcgcctctcgtacaattttgtggcgggaattgcaatttcagtggcgctatattctttatcatttcttatagttggcgttgcaggatactagcaagtcctatagttggccttatgtggcatctgcaaagctgatttgattaccttcacggcttggagacttccattgtttcaccctgagcttcgttttttatgagtgttacatggtgaaaaggagtcgggatgcagaacaaaaaatgatcagggagagtgtaacatgtagcattaaaccccaaatgggaatataatgaagtagatatatgcctgtatagccgttgaaaattgaaatgcatatgtaagcgagctcgttggctatagaaacttctctctcttggcctcttggcccgttgagattgagatttgaaataggatagtggaaacatgtaagaatattattcttttgacccttctcgaaataacgttgttagcttggtgcaagctgggt

SEQ ID NO: 70391 - DNA, 204 bp, Oryza sativa
  Clone ID: PAT_MRT4530_70969C.1
gccttcgaaaccacgcactgctacgatgtttgcacggacgggtgggcgatcaggtttttggagagcgcaaggcgcaactactcactgttcatcaatatctacttcgtcttcactaacatgtcgaacactggaggtaacggcaagacaaggagaaggaggctccggtacaaatctggattacacctggagtgcatccctgaatga

SEQ ID NO: 70392 - DNA, 246 bp, Oryza sativa
  Clone ID: PAT_MRT4530_7096C.1
atggtccgccggcccattctctcctccctccccttcccgctgggctggccgcccgagcccctcctctctcccggggtcgccgataggtggggcccacctgtcgagtcctcccccaacctccagccgccgccgcaccctcactcccgcgtcttccgggccacgtcggccttgcccgcgcgtcaccccgtccgcccctctcccgtcggattccgcctccggaacccactccgcgccttgcgccggtga

SEQ ID NO: 70393 - DNA, 522 bp, Oryza sativa
  Clone ID: PAT_MRT4530_70970C.1
gacgaatcaagtttcgtgttagcgcaaatcgacgtggaagatcgtggcagacggcgacgacggcggcgtcgtgcccgcggggtccaagaggctcagccccggaggaccggatcctcagcatcactgagctagagatcgatcatcatatactccaccgtatatatatatatatatgtatatatatatatatatatgtatatatatatgtatatatatatatgtatatatatatatatatatgtatgtatatatgtatatgtatgtacatacatacacacacacacacacacacacacacacacacacatatatatatatatatatatatatatatatatatatatatatatatatatatatatatatatatatatatatatatatatatatatatttatttatatatatatgtgtgtgtgtgtgtggggggccagtgtttctatatatacatttcaaatcagatagtgtcaatttcaaataaaaatatatcaatatatgtataattaattgcgagcataaggg

SEQ ID NO: 70394 - DNA, 405 bp, Oryza sativa
  Clone ID: PAT_MRT4530_70971C.1
tttaccccgtatcgccggcggcgatgcgcagacgccaatgacgacgactacgacgacgacgaaccacagcgccaagagcatactgctgctcgcgctcctgctagtgccgcacctcgccgcggcgttgacgggagatgcgctgatcaggcagcgccgtcgactgctcgactaccacggcggtagatggctgcatggagggggtgacttgtacttggacccagcgataacgttctacaacgcgcggctagtgctacgcgtaataccgcagaagcggcgcgtggaagcagcgccggccttacggacccgcacagacgagctgacacacaggatcgctgccaacgagcgcgcctacgctggcatgctctgtgcggacaagagacaccaccgccagctacgcagctatac

SEQ ID NO: 70395 - DNA, 648 bp, Oryza sativa
  Clone ID: PAT_MRT4530_70972C.1
cggacgcgtgggtttttttgattcctgaatagcgtctaccgcccgattgattagagcaccaaatcatccattcatttcattcgttttatctgcgatcatgctatagtaccaggatggtggatgagcagaaatcgacaaggaaaccatgtgtaatgctgcctctgccgctggaatcttgttcaggatgtgcatgcactatgcagatggaccgggcggttgttctcaatccgcccccagaggattctcctcggggtcgacgcgagaagacaaactcccggtggaaagcagatgccgcggctcatgtaccaccattgacagcagcgtcggagagcgtgctgtgggcgtgattgatgtcttcatcgtgcctcccgttcatctgcgcgcgctgtcgccgatcagtaggatccccatggtttccgtttaatagcttatggaactcttccttcagtctgctgtctttctcctccttcaacctgccatccttttccctggtactcaatggaagcaaaggtactccatttgtacgatccggcatttctgggagtttgttgtccacgaagaatacgactaaattaacggtataccaagcaacaacaacattcacagagtagtgtttgcgagaagcaattataagaagactctgaacta

SEQ ID NO: 70396 - DNA, 795 bp, Oryza sativa
  Clone ID: PAT_MRT4530_70973C.1
atggatgagattggaccacccagtagaggggaggcagaggcagggggcgatttaacgtccaccgctcgtgaggccggccagagacagggaggcgccggggccgtcagagccagccagccagccagcccagtatatcagtatcagccccctgcccctggcaatggcattggcatggcatgccctgtgccagggcaccccatcatagtgttccaacgacttcaacacagcaaagccatcatcgcactgccatgcatcattgccgccaaaaatgcattcaaggtgcataccagttcagtcaaaacacggttgctgattgagctcagcactgagagcgagcagctccaactactgcctccgcaagatcgccaagaggattgccgacgccaaatcctaagcttgtatcgggcgcttatggagtggtggtggaaactctgcggcactacagccgttggccccccaccagagccgttgtcgtcatcgtcagagtccatcaaccaaagccgtggttttccccttgactccccgtacacgcaggccgtaaccgcgacctcatatttatgggaaagaccatcacgcaggtccgacgccacatcatcttatgtagatgccaacaaatctgatggcgcatctacccaaagagaggtgatgatgatgctgcaaggtaggaggacaatgacgcagacaacggttacccgcaaacatatggggcccacgtgggccccactcaccacatcagccaaaaccggctactatagtaccaactttcgagggatcaaagttgacattgtattgtga

SEQ ID NO: 70397 - DNA, 1747 bp, Oryza sativa
  Clone ID: PAT_MRT4530_70974C.1
ttttctcctctctcgttttctcgatctctccacaactcccccccccccctccagctctctccaaagtccaagtctctctcggtgctcacgccgccgccggccaccgccgccccccgtccgtacaccgcgtggcccgcccccgcgcaggtgagggagctagcggccttcgtctgccggcgccggaggcggagccagattgttgggaaacgagttttccgcccgcttctctggtttctcggcggtgtcttttactcctggggcggcgatcccgacgcggggatgcggcgggctgtggcgtgatgtgtggatcggagcatggacttgatcgcgtcgcacggtaggagctgcagcggtcggggtgggagcaggggtcgcgcggcggggtgcggccatgacgatttacatagcgcgggaggcttccaaggtatggaggaaggtgaccacggagacgtcggtggagctctcgctgctgcgcgagaagtggggattgctcctcgccggaattgtgtttcagtatattcatgggctggctgctcgaggagtgcattacatggtatatgccattgtagaggaccttggatttatggcccttccagagtttgggcaagacaaaggttatctaagtgagagcatatttgcttccatcttcgcttcctttgttttagcttcgcaggttttaagaatcattacgttctattccacccagcttccgggcccaaactaccattgtcgtgagggctcaaagttggctactcttccaccacccaacaatgtatttgaagtgctcctgattaactttcctcgtggagtactttttggctgcggtgatctgatattttcatctcacatgatttttactcttgtttttgttcgaacataccacaaatatggttcaaaaaggtttgttaagcttcttgcttggttcatggccatagttcagagtcttcttataattgcttctcgcaaacactactctgtggatgttgttgttgcttggtataccgttaatttagtcgtattcttcgtggacaacaaactcccaggttatatttttgtcacatttgttgccttacgcctttacagggatttgtatggcaaacactttgtaacaagctttgttgagatatttacagaaatgccggatcgtacaaatggagtacctttgcttccattgagtaccagggaaaaggatggcaggttgaaggaggagaaagacagcagactgaaggaagagttccataagctattaaacggaaaccatggggatcctactgatcggcgacagcgcgcgcagatgaacgggaggcacgatgaagacatcaatcacgcccacagcacgctctccgacgctgctgtcaatggtggtacatgagccgcggcatctgctttccaccgggagtttgtcttctcgccccgaccccgaggagaatcctctgggggcggattgagaacaaccgcccggtccatctgcatagtgcatgcacatcctgaacaagattccagcggcagaggcagcattacacatggtttccttgtcgatttctgctcatccaccatcctggtactatagcatgatcgcagataaaacgaatgaaatgaatggatgatttggtgctctaatcaatcgggcggtagacgctattcaggaatcaggatcttggccgccgtagtacgttcttcggagtcactagctgtcgctgtacatagtggccagcttaatctttctgatcaattgtttgtaaaaaaa

SEQ ID NO: 70398 - DNA, 262 bp, Oryza sativa
  unsure (1)..(262): unsure at all n locations
  Clone ID: PAT_MRT4530_70975C.1
acgcacgcattaggggaagcaggcaaggcgagttgggagaaggagaggaggaggagcgagcaatggcggcacagcagcagctttgcccaccgctgccgcttttccccacctctcctccgattaatcccctcctcccatttctccgcctcccctacctactcgcgccgccgccgccgccgccgtcgcattgggcggcaaacggcctgatggagcagtacgaggaggagaagattggagagggcacgtacggggtantgtacaa

SEQ ID NO: 70399 - DNA, 225 bp, Oryza sativa
  Clone ID: PAT_MRT4530_70976C.1
atgcactgtcgcagcctagcgtcctccgccgggcggtgcagcatcgtcagagaatccgctctcaccgccggcgtgaagtgcctgacaagcaacaacacctgcggaggcgggaggcgtggaggagctacaggatacttcgccaaccggaacttgctcatcaccggagatctcggtcggcgcgcggccgacgaccagagctatgcggcagcggcggcgacgcggtag

SEQ ID NO: 70400 - DNA, 360 bp, Oryza sativa
  Clone ID: PAT_MRT4530_70977C.1
atggcctccgcggcagcgacggcgacgacgaggacgagcctccggcgcgcggagctgtgcgcggcggccgcgtcggccgcggacgcggcgtcgtggtgcttcgcggtggcgctcgtcgcgctcgtgctgctgtgcgcgctccgcgcggaggccgtggaggtccacggcccgcggctggggggcgcggcggcgcggccgtgcgaggaggtgtacgtcgtcggggaaggcgagacgctgcacaccatcagcgacaagtgcggggaccccttcatcgtggagaggaacccgcacatacacgaccccgacgacgtcttcccgggcctcgtcatcgcgctccgccctaccaagaacagcatttag

SEQ ID NO: 70401 - DNA, 1693 bp, Oryza sativa
  Clone ID: PAT_MRT4530_70978C.1
atggtctatatctaccacggatacagtagtatacgtagcacggcagcacggaatcaagtcactctgccagcagcaacagcagctgcagctgcagctgatgagcctcaaccgaatcagattcttttccattccaacctcgctgccctgaatccaagagaagaaaggaaaccctccaaaacttgctctccatgccctccccgtctcactgacggtggtccccaccgccccacgctccccccccgtgggccccgttcgtcggcgaccgaccgctagctccggcgaccccctccccgccgacgagatccggccgtctccgttaacaaaaaagatggaagatttacaagattgtgactgcaaaagccttgttgctgttcctggttctgtggttctgcacctctttaggctgtttaatcagcaggataattcctggcagaagtacacattagcctactttcttttggtcaggaatgagtacttctctagggattcaaggaagcattcagatgggaagaaccaacttcttgactgctgtgatgattcagaattagatttggatgtgctgtatgctgatttggatagtaaagaactggagcttaagttgcagaaacctgttgtcaagactcaatcaaaaggtgactcaagtgccagtggatcaaatgattgcttctttcctggccttcacgacgacctggctcaggactgccttgcttgggcgagcagatcagactacccatcgctttcttgtttgaataagaagttcaatttgttaatcaacagcgggtatctgtacagactgagaagaaaatatggcattgttgaacactgggtgtatctagcgtgtagcttgatgccctgggaagcatttgatccttcacgcaagcgatggatgaggctcccaagaatgccatgcgacgagtgcttctcttgtgcagacaaggaatcgcttgccgtcgggacacaactgcttgtgtttggccgtgaatatacaggtcttgctatttggatgtacaatttactggcccgtggttggtcccgatgcactccaatgaacctgcctcgctgcctctttgcctcaggaagctttggtgagattgctattgttgctggtgggtgtgataagaatggacaggtgctgaaatctgccgagctgtacaattcagagactggtcattgggagactttgccagacatgaacttgccgaggaggctctcatctggtttcttcatggatggaaagttttatgtcattgggggtgtgtcaagtcagagggattctttgacttgtggagaggaatacaatcttgaaacaaggacatggagaagaatacatgatatgtaccctggagggactagtgcctctcaatctcctcccctagttgctgttgtgaataatcagctttatgcagctgatcaggcaacaaatgtggtaaagaagtacgacaaaggaaataacacctggaacatagtgaagccattgccagtcagagctgactcttccaatggttggggcctagctttcaaggcatgtggtgatagattgcttgttattggtggccatagagtaccccgtggtgaagtaatattgctgcattcttggtgccctgaagatgggaatggtggtgctgactgggaagtgctctcggtgaaggagcgtgctggtgtattcgtttataactgcgcaataatggggtgc

SEQ ID NO: 70402 - DNA, 1702 bp, Oryza sativa
  Clone ID: PAT_MRT4530_70979C.1
tttcttcattacctggcttttaaacaaagctgtaacaacaagcagcaaattgattatgttacatataaggttataatacgtgtcacaatcctgtcagatcctcatctctccttttttattattaagcctcactcatttcaacagtctacaatatggattacaagccgtaagcctcggtgatgcgttggtcgtaatgcagtccactgcttaatgcaatcgctacatgctactgtatttaataataatacaatactaggtcaagtccaacgctgtaaggtgaaggaatggtttcttgattatccaatgatgtgagcaggcaaaaaccctgatctaggaagcagtaagaatttcactgttcggcataatgttcatcttcagaggctcggccgttgtttcttcttgttgttccctttcaacggtagtacaatacgcctctagctctctccttgcaaaggttgggagaacaaatgcggctctatgcatctctgaattataaaatctaatatcccttcctgcttccatagctccttctagtttttcaattggatttgcaggagtcaggaagttgactggtggaccttctttggcacatagcagaaacccaatcacaccactgggatatgtcgggacactcgtccaggcatagtggacagaacccttgaatgtctcacggcagatcgaaagcatgtcctggataagatgcgtatgcaaccacatgctctcagcctgattacaaagaacaccaccaggcctcaaagctcttgcgattgtgtcaaaaaatggcttctccacaagttcctgggcaggcccaatcgggtctgatgaatcgacaataatagcatcatatgtcccttcaggagcattccttaagaactccacagcatcaccaacatgaagccgaacacgaggatctttgaatccaacagataaatctgggaagaaatctttacaaacatcaataactagctgatcaatttcacatatatcaattgactccacagaaccatgtctacatatctcccgaaggactccaccatcaccacctccaataaccaaaactttctttggggatggaattgagcaaagcggaaggtgagtaatcatttcctggtacgcacattcatccttatcagtcaactggacaataccatcaaggacaagaacttttccataggttgaggactcaaaaactaaaacttcttggtatggtgacttcccctgatacaagatcttctcaactttcagtgaatgggcctctcctggccacatcgggttattgtaatactgcactttgctcgttttaccgccgcgcgagcggggctcggtgaaccatccggacaccacggtggcgtggcacttggcctcggattcaggcgccgccgccctggccttgacgcagcaagggggcagcggcttcccgttcccggcggagccaccaccaccaccagcagcagcatcacccccactcccccctgtccgcgccgccccggtcgtcgagccatttcttgcgcctccaccctccatggatcctgctcctcctcgaagttcccagcctctggggcgcggtggcgagcggcgaggcgggggggtgcggggagaggaggcgccgccgcgagggcataaatagagctcctcctccggtggcggtggtggcttcgcggctattcctcctcctcctcctctcttccttttatttccagtc

SEQ ID NO: 70403 - DNA, 171 bp, Oryza sativa
  Clone ID: PAT_MRT4530_7097C.1
ggccttagcattcacaactgaaattattagaaacttttgcagcgcatagcagccacgccactgcttgcaattcatccacttatttatttaggtattctttatccgcttggacaacttaagaaggatcccgcgacattttaacgacttgggtgcctttgtttgggaggggag

SEQ ID NO: 70404 - DNA, 1935 bp, Oryza sativa
  unsure (1)..(1935): unsure at all n locations
  Clone ID: PAT_MRT4530_70980C.1
ctccccgtctcactgacggtggtccccaccgccccacgctccccccccgtgggccccgttcgtcggcgaccgaccgctagctccggcgaccccctccccgccgacgagatccggccgtctccggttttcttggagccgctcgtcgtggctggggtggcgccggggggaatggaggcggccggcgctcgcgcgggcggtggcggccgggatctcgccggcggcgcgcctcggtgagatgtgatctgtgatctgtccaacctttgtgtactcgggctcattccacagttaacaaaaaagatggaagatttacaagattgtgactgcaaaagccttgttgctgttcctggttctgtggttctgcacctctttaggctgtttaatcagcaggataattcctggcagaagtacacattagcctactttcttttggtcaggaatgagtacttctctagggattcaaggaagcattcagatgggaagaaccaacttcttgactgctgtgatgattcagaattagatttggatgtgctgtatgctgatttggatagtaaagaactggagcttaagttgcagaaacctgttgtcaagactcaatcaaaaggtgactcaagtgccagtggatcaaatgattgcttctttcctggccttcacgacgacctggctcaggactgccttgcttgggcgagcagatcagactacccatcgctttcttgtttgaataagaagttcaatttgttaatcaacagcgggtatctgtacagactgagaagaaaatatggcattgttgaacactgggtgtatctagcgtgtagcttgatgccctgggaagcatttgatccttcacgcaagcgatggatgaggctcccaagaatgccatgcgacgagtgcttctcttgtgcagacaaggaatcgcttgccgtcgggacacaactgcttgtgtttggccgtgaatatacaggtcttgctatttggatgtacaatttactggcccgtggttggtcccgatgcactccaatgaacctgcctcgctgcctctttgcctcaggaagcttcggtgagattgctatagttgctggtgggtgtgataagaatggacaggtgctgaaatctgccgagctgtacaattcanagactggtcattgggagactttnccagacatgaacttgccgaggaggctctcatctggtttnttcatggatggaaagttttatgtcattgggggtgtgtcaagtcagagggattctttaacttgtggagaggaatacaagtcttgaaacaaggacatggagaagaatacatgatatgtaccctggagggactagtgcctctcaatctcctcccctagttgctgttgtgaataatcagctttatgcagctgatcaggcaacaaatgtggtaaagaagtacgacaaaggaaataacacctggaacatagtgaagccattgccagtcagagctgactcttccaatggttggggcctagctttcaaggcatgtggtgatagattgcttgttattggtggccatagagtaccccgtggtgaagtaatattgctgcattcttggtgccctgaagatgggaatggtggtgctgactgggaagtgctctcggtgaaggagcgtgctggtgtattcgtttataactgcgcaataatggggtgctgaattacatttctttcggtataatccgtatatgcctcttgtttagcaacccacccatttcttgctgctgcttagctaccccctataatgacctgtaattcagaaaaatgacaccccccttttcgtggagctctcaatgaaatgtttgggagagagcatagagcattcagttcagtttacctggaacttcttttaactcgttcaaaatttgttcttcttgtccagtatgaaatttatgcagtattctttattcatcaaaaaaaaaaaaaaaa

SEQ ID NO: 70405 - DNA, 168 bp, Oryza sativa
  Clone ID: PAT_MRT4530_70981C.1
attacaaaccacgattatattcatgaatctgtgaagttatcctccatggggggatttcatatacaaacacacggaccagggtcaatgtatatctaatcataacacaaacaccacacgtagggctagctacagtatactcatatacgcggcattaatattgtcctcaaa

SEQ ID NO: 70406 - DNA, 1030 bp, Oryza sativa
  Clone ID: PAT_MRT4530_70982C.1
ttaaatttaacaatgttgtgggaggcaatggtggatgttctggtaactgtaagtggatatgctcgtgagcactcaaatcatggtggagctgcaggtttggtaaagaagatggagcgctttgaatttgtattatattcatcatgcatttcttaatatctttactcagcatcacaaatgagctatatcaaaagctatgcaacggaaggatcatgataccgttgaagctatgggtttgaacttggatgtgaaagagcgtttgcaagatatgggattgatgtgccaaatatgcatggatgatcttattgagttatgggttaatctctgttcagagaaagtacaaggtgagtatccatcaggtgcagcaacccatttccacccgcccaaagctaacccacactgaaatccaacccactatatccacttaaacccagtccattagcaggcttagatgcaactttgcatgaaatgaatcatcacttcaatgaagtctcctccgagcttgtggtatgcatgtcttgccttgatccaagaaactcctcctcaaaattcaatgttaataagcttgttccacttgcaaagatatattctggagatttcacaacatctgactgattattgctaagaagtcagcttcaaaccttcattcttattaatgttaggagaactgatgaatttaatgaatgtactaatatctcaagccttgctcagctgacggttaagacttaagaccactaagcatagaacattaatttccattggtgcatcgtttcattgagcttccattgcccattggtgtatctctgttgagtgcatattttcagcaatgaaaattatcaagactgcagatctgcgcaaataagatatcagataattggcttaatagtttgaaagtataatatactgagctagagatattcaaaagtatcgattatgatgcaatcatgaagcaattctaagccttgaaaacccgcaaagtatctttgtcgacctgaagaataaattgcaatgacacgttgcttcttttagttaa

SEQ ID NO: 70407 - DNA, 258 bp, Oryza sativa
  Clone ID: PAT_MRT4530_70983C.1
aaccaaatcacaaacatatcatatacatagaccgttaaactaacatatgggaggggcccaaaagcacaaaaatgctcacatactcccccacaaactccttctgcccatgtctccttaatcaaactgtacaatgtaccaacacaatttacattacaccacctccctgctgatcacaatataattcttaaattgccttgccaaaatttaaaccaaggctacaacaatgcataaaaaaaaaatgcctaactccattataac

SEQ ID NO: 70408 - DNA, 540 bp, Oryza sativa
  Clone ID: PAT_MRT4530_70984C.1
atggaacgaggaggaagaacggagggaggcactaccgtgcgggcgggcgcagttacgagagccgacggcgcgaaacgtgatcgtttcggcctcgggctgaggaagaggagggggagggcgcgcccggagtccccttccgcgtccttgctcgtgccggctcctccgacacgtgcaacgacgaacggcgacggcgaacagagcacgggaggcggcgacaatggcgtggcggcgagagacgaaaaagagggagattggaggaggaatgagcttgggtttataggggcgacaatgtcggaggagggagcgggggtgacgcggcagaaggaggaggagctctgcctcatttccttggaagctagcgcggggagaggcggggccgagtcgatgacaacagcgatgacggcggggcggtttggagcggagcggcgacacgggcggcaggcgcggacaggcgcggctgaggctgacggcggcggcgaccaggcggtcggccaccatggcacgcgcgcgcgggaagcaatgggtggcgcggcggtttga

SEQ ID NO: 70409 - DNA, 860 bp, Oryza sativa
  Clone ID: PAT_MRT4530_70985C.1
ctcgcaaaataattgcaatctggtcctccacctggtgcatgcgtccccttcggtgtcgtcccttgactctcctctattccctcccgcagtcatagcgggagtgtcatagacgatagcgatgacacggatgctttgactagaatttccgtcaatgatttttgttatagacattcctcgatgtagccgatcatgaagtagccgtggtcgtggtagttacagtagttgatgtagccgcaaatagccgaaggcgaaaaaaaaatatttacgccatggtgtgaagagaaaactgcaattgtgagcatcttgcacccactttggttggtcctttcgcgccgtgtagcaatcatcacaaaagtgatgccgagttgatgcagtcgttgtcgtcgtagatgacgtgatcgacgccgtcgtcggtgacgcggtcgttgccgtcgtaaaggacacggtcgatatcgtcgataaagcggcttgtagattaatctatcataggacgcgggatgtccatccttgtgaacgagcggcggcggcgtgttcccttgttgaagaagaccatcggcgatgttgtgtcggagaagaccatcgtggtgatgatgtagaggtagcagatacggatcgatctcgtcggtgacgtacgtctgtagaagcttggtgaagtcgatcgtcgtggaggtctcgccggcttgacgtgggttgttcatggctgacttccgtggcgaagctggtcgacgaagagatacgtggtgatgattatgcaatgatgacatgatgatgatgtaactgtgacatcgtggccggagagaacgtcctcgttctcctgaatcttggatcgatctccaattccaatgaacgtggatcaccat

SEQ ID NO: 70410 - DNA, 567 bp, Oryza sativa
  Clone ID: PAT_MRT4530_70986C.1
atgagagccgacggcgcgaaacgtgatcgtttcggcctcgggccgaggaagaggagggggagggcgcgcccggagtccccttccgcgtccttgcttgtgccggctcctccgacacgcgcaacgacgaacggcgacggcgaacagagcacgggaggcggcgacaatggcgtggcggcgagagacgaaaacgagggagattggaggagggaggagcttgggtttataggggcgacaatgtcggaggtgacgccggcgagaggaggaaaaagaagaaaggaagagggaaagggggcttgcctccttgccgctttgggaaaaggaggaggaagcgggggggtgacgcggcagagggaggaggagctctgcctcctcttcttggaagctagcgcgtggaggggcggggccgagtcgatgacgacggcgatgacggtggggcggtttggagcggggcgacgacacgggcggcaggcgcgggcaggcgcggcagaggctaacggcggcggcgaccaggcggtcggccaccacggcacgcgcacgcggaaagcaacgggcggcgctgcggtttga

SEQ ID NO: 70411 - DNA, 2321 bp, Oryza sativa
  Clone ID: PAT_MRT4530_70987C.1
atgggcggcctccccaccggcggcgacctcagcgtggggagggatgtatgggtgcggcgacctcggcatggacagggacctagcggctggcgacgatctcgtgcggagagggacccgaggggggtacactttacccacacgacattactaacccggatcacccagcccgtggggatcagccacgtcgggagacctccaagctttcatgacaaggcatttccaaagccgacacagcggcgcgtcgcggcagcgggcacggggagcggcggaggaggaaaaagggagaagggacggtggggattcttaccgaggacggcgacggcgagacgaccacagggaggcggctggcggcggaaagggatggtgaacgcggcggcggcgttccaggggcagggaggggaaacggagtaggggccggggtgcggcgaggaacggcgatgccgatggcggtggtagcgcagcgcggcagcgacgggagcggtggtggcgcgcgactggaggtgacgaaaggcggctgtggctcggtgcacggtgggaatggtgctgcgggggtggaaggggagggacggagtggatgccggggtgtggcacgacgcggcgaagctgttggaggcaaaagcacggccgggcgaggcggcgctcgccggcggggagcggatggaggcggctaaaggcgaaggtggctcggggtggcggtggaagcggcgttgcggcggtggattggcgaagaggagcggtggacggggtgcgcacggcgactgtggtgccggggagggcgacggcgcagtgcggggttggcgagaatggcggctaggggcggccggagctcgccggagagcggcgacggctcgattttgcgtggggagggcgggggagagtgcggggagtacgggaaaattggggaaaagggggagggtggcacggggatcatttttataggctcggggaggagaaatcgtggccggacgggcggcaacggccggcggagtggggaggtgaagtggagctcgtggggaggtcaaaccggcgccgtttcttgcggggtgagtgggggagatggtggaggaaggggatgacgtggggtggaccgcgcccacacgcgcgcgggaaccggaagacgcgcggggaggggcggcgacgtgggcggctcgggcggccatggcagttgccggcccgggctggaggttggggatgaccccgacaggtggggcccacccgaacgaaaatccagtggctcggattcgccggagggagctcgacagcggcggattgcggcagcggcaaccggcggagagaaaagaggaaaacgacgacgaggtcacgaggggccgattcccggtggcgagagcatctacgcggctacgggaatccgtcccttgtgccggattaggaggaaacgcatcgagggaggccggcgacgagaggcgcttccgagcttgggcggcgacggcggcgagcacacggcgagcggcggcaacggtcggggcggcgctggctagcgtgcgggcgggcgcagtgacgagagccgacggcgcgaaacgtgatcgttttggcctcgggccgaggaagaggagggggagggcgcgcccggagtccccttccgcgtccttgctcgtgccggctcctccgacacgcgcaacgacgaacggggacggcgaacagagcacgggaggcggcgacaatggcgtggcggcgagagacgaaaacaagggagattggaggagggaggagcttgggtttataggggcgacaatgtcagtttgggagaggggaaccgacattggacggtcaagccggcgagctggcgcccggctagcggccaaaacgacgacaggaggtgacgccgacgagaggagggaggaggagctctgcctcctctccttggaagctagcgcgtggaggggaggggccgagtcgatgacgacggcgatgacggtggggcgggcagcggggccgggcggcgcagacggcgcaggcgcggcacgggcggcgaccacgcgggcgcgcgcacgcgagcaacggcgcgcgggggccgattttggggcggggagctcgctagggatggaggcagggagagggagagcgagggggaggggtgctcggcgcggcttacgcgcacgcgcgcgcggcgcgcgcgcagagcgagggagagagggagagagagagagagaaagagagagagagagccggggagggaggggaagatgggccgagagagatttggcccatcgaacccgagggaggcaaaatagacttttgcggaggaattgatttgggaaggatttggattcgggattgaactcgacgatagatcggggatt

SEQ ID NO: 70412 - DNA, 167 bp, Oryza sativa
  Clone ID: PAT_MRT4530_70988C.1
ggctaacatgcgcacttgccggcggggatcatcatggtggtacatatatgacagaccgagctgctaattcaggatgatcgtgtgctaatgagagcacatatcgtcctgggcgtggtcactctatcgatcgatcgatcggctcagcatgacaacagtaagctccacct

SEQ ID NO: 70413 - DNA, 904 bp, Oryza sativa
  Clone ID: PAT_MRT4530_70989C.1
caaacccacaataaataagatacgtaataaaaaaaataccgattctatttagctctacaatacaaacactgaatgaatcaaaatgccagtgagcacatggacacgcacacgccaggcatcaatgaaaacagacatcacaggtttcatctcagttgagcgtaacatccatgaatgtctctctttttgtcttcgaagaaaaaagaaaaaataacaacagtaataaactctctttttaggcttcatagtttaactgcttttgctgaatgaatatagatttaattggcagatttagatcgatttgtagtccccgtggaagccagtttggcggcacaacatcaaaatatttcagggtgctttacaactgtcgcggccttcgatggatacgagtacatttgatcttttaacagtgactgccacggctcaaccaacaactaactgctgccgaatctaattcaagttggcccattagctgcttctgcggtggtgaggtcagctgctttagattgaactttgcgagcactgtgtacctctcgatcactccaaccatacatataatagcattaaattctgaagttacaaagctttaaccgcccatgtgcttgagtcatggatcaggccttggagctatataaattgtttgccagaaatcaaactctaaattccaaacatgttgtattcatttgaataaacacctgttccaataggttcttctcaatctgcacaataataatcctgtttggactgttaaggtcaaccttgtgaggttgaggaacagatttggatactgcattgataattttcatcctattgattcttgtattcgaccttgcttcataaaacacaccaaaactgcaaagattaaaatatccaagtaaagaagcataattttagcaaaatcacatgg

SEQ ID NO: 70414 - DNA, 309 bp, Oryza sativa
  Clone ID: PAT_MRT4530_7098C.1
atggcgcgggtgaaaaactgggaagattgggaggggaaaaaggaagggagggcgcctgggtttatagggcggcaatgtcggttttggaaaccgaccttgggcggtcaaggtgcgagctggcgttcggcgctcgcggccaaaacggcgacagaggcggatgacgccggcggggaagaggaaagggaaaaaggaggaggaaaagggggcttaccccttgccactttggggaaaaggaggaggaagagagggcgacgcggcagagggggagagctctgcctccgtcccttggagattcatgttatatggtag

SEQ ID NO: 70415 - DNA, 426 bp, Oryza sativa
  Clone ID: PAT_MRT4530_70990C.1
cccacgcgtccgcccacgcgtccgcccacgcgttctttcttagacaaggttatcatgatatagaatgggtattccgctatctgtggttgaacgagaccaagaaccttatgaggatgactctactatgacccatgtcttttatgagaagagaggattcatgatctacgaatggataaaattaagaccaaatacaaggaggataatggatttcgacaaccaagagagctactaggtgatggtgaactaattacttatatagacaaatccttcaatttggctcatctatattaatgtgaagccagaatgcactggactactaaccatgtcttgcctactaatgtcccaccactcgtgtatagagaaatgagaaagtgatgagtcttatacaggctctgttagagtattggacaaggatctgagatgact

SEQ ID NO: 70416 - DNA, 582 bp, Oryza sativa
  Clone ID: PAT_MRT4530_70991C.1
atggatgccagaagctggaagggagatgttggtcaccactggccatggcagacggtgtcgtcgtccatggcggatgacactacgactacacatgatccctgtccagttgcagaggcttgtggcgcggatccggccggagcggcgagctcgggcggtggcggcgtggttctcgcggcgtggggcgcgacgacgacgacgatgaggcggtgccggcccggatccaggagcggcgagcccgggcgggcggcggcggccgcgacgacgaccgggcggcgccggcgcggatccggccggagcagcgagctcgggcggcggcggcgtggttctcgtggcggcgggcgcaacgacgacgatgacgaggcggcgccgccccggatccaggagcggcgagcccgggagggcagcggcggccgcgacgacgaccgggcggtgccggcgccaatcctgctggagcagcgagctcgggcggtggcagcgtggttctcgcggcggcgggcacaacgacgacgacgacgaggcgccgccgccccggatccaggagcggatgatcttgctgtctttgagaggtacctgggtgcatag

SEQ ID NO: 70417 - DNA, 782 bp, Oryza sativa
  Clone ID: PAT_MRT4530_70992C.1
cccacgcgtccgcacacgcgtgcgtgtgtgcctcttgctagctaagcaaggagatagccggagccatggcagcctacgggaagccgcagccgccgctgaacgacgcgtactacggcccgccgatcccgccgccaccggcggcagcgtactacggcgcagcggcgcctccgcccgcgccacgccggagcggcgcgcaccgtctgttctgctgcctcttcagggtgctcgccgtcgccgtcatcgcgctcggcaccgccgtcctcgtcctctggctcatctaccgccccagcgtcgtcaaggcctacgccgacaccgctgcgctgtcccgcttcgacctcaccaacggcggcagcctcctcgtgtacaacctcaccgtgggcatgcgcgtgcgcaaccccaaccgcttcggcatcaacttcaggagcgtcgacgcgcaggcgtcctacgacggcgaccggttcgggtacgcgccgctgcagccgttatacgttggtcggaagagcgacgccaggttcgacgtgacgctgagcggctcggcggccatcgacgaccgcgacgtggagcgcacataccggagggagacggcgcaggggtcttacgaggttaaggtcagggtgtacgctagacaaggattcaaggtcaggggcttcaggctgaacaacaagagcaaattcacctgcacgctgaacctgccggcgcccaactccggcaacggcaccgcgagcgggacgccgacgacggtgttcacgaggaagcagccgaagtgcgacgtggactattga

SEQ ID NO: 70418 - DNA, 2254 bp, Oryza sativa
  Clone ID: PAT_MRT4530_70993C.1
atggggaagacgcagaagttctccaaggggcacccgctcggcttcgtgccggattaccggcacggcgtggagacggtgggggagtcgaagggctgtatcgggagcccggagcggatcgtatcggggagctcgtgtgctgtgccgaagaggaaatgcggaatcctgaagacagaggatggaggggagcttccggggttcaatgtgccgcgggacgtcttcatgctgccgaggatgtcgccttcggataaaaaggacctcgagatgaggctccgcaaggagcttgagcaggttaaggccctacagagtaggctgtttttgaggccggctgcggtgagcatgaatggcggggcggcgtcagcttctggagacgtagttgcaaagagaaacgatgcgaagcttaaacggagcaattcagtgcagtctggcagaggagtgccaccatcagcagccacacctgtggtcaggtctgcaaactacgcagaagcttttaaacaatgtggcaaccttctgaagaacctcttcaagcatcagtgggctggtccgttccttgcgccggttgatgttgtacagttgaacattcctgattattttgacataatcaagaagccaatggatttgggtaccatcgagaaaaagttgaatgcaggcatgtactctacaccttgggattttgctgcagatgtgaggcttacttttgacaatgccgtgacttataacccagtcggtaatgacgtgaatttaatgggcaaagctttgacatgtatttttgaaactagatggaagtttatcgaaaagaagcttccttcactagatgatagattctctgtgagaagagagccatctcaaaagggtgcagttaagaaagataccattgagaaagattacccttctgagaaaaagcactcgacaaaaggtgtacacaagaaagatatgtttaaaaaagaggatgcttcaactaagccagctttgcaaccaaagaagagaaaagcttctcccttggttcagggttctcttgaaatacctgtagtagaagctgataaggtcattgatgatgctcaagtggtacagccttctaaggtgattgatgatgcccaagtggtgcaggcttttaaggtgattgatgatgctcaagtggtacaggcttctaaggagattatgacggacagacaaaagtatgagctaagcgtaagacttcaatcatatggtgggttgattccaaatcatgtagttgatttcataaggagccaccttcctgatgataatgagggtgatgaagatgagttagagcttgacatgaatgtcctaagtgatagtacattgtttgaacttcagaagcttcttgatgactatgatagggtaaatcagtcaggaaaccctacaaaagatgagcatcgtgaggttgagtttgaaagtgaatatgggcttagcaactcatcgatgcatcatgaagaaggtaatgagctcgttgaagaagatgttgatattggtgggaatgatcttccacctttgacgtatcctcctgcagtatttgaaagtgaaactgcagaaagaagcagcaagcatagcacttctagcagttctagtagtgattcagaatcatcctccagtgattcagattcaagtagctcttctggaagcgatctggatgtcaatgttcctccatcaacaagtggggccaaggacaacacgcaatctgcggttaggttggatcaggaaaacgatccactgagctcgaccaatctaccacaacaaagtagtgatcctgtacctatttctgccgaagatgagggggagaatgtgtctgagaaacaggtcccccctgcaaagcaataccgagctgctgttttgttaaaccgctttgctgatacaatttttaaggctcgtgagaaaactcttgatcagagagctcggatacaagctgaggcaaaagcagctgaagatgctcgcaagagagctgaggcagcagcagctgctgaggctgctgcagaagctaaacgccaaagagaacgtgagagggaagcggctcgtaaagccttgcaacagatggagaaaactgtagacatcaatgaagggaacctctttttgaaagatcttgaaatgcttggaactgttacatcaggtgaacagtttcccagctcggttggtgagacgagtccaactcatacgcctgaaggccttggatttcagctaggtagcaaccctttagaacagcttggtttgtatatgaaaaatgatgatgaagaggatgaggaag

SEQ ID NO: 70419 - DNA, 2376 bp, Oryza sativa
  Clone ID: PAT_MRT4530_70994C.1
atggggaagacgcagaagttctccaaggggcacccgctcggcttcgtgccggattaccggcacggcgtggagacggtgggggagtcgaagggctgtatcgggagcccggagcggatcgtatcggggagctcgtgtgctgtgccgaagaggaaatgcggaatcctgaagacagaggatggaggggagcttccggggttcaatgtgccgcgggacgtcttcatgctgccgaggatgtcgccttcggataaaaaggacctcgagatgaggctccgcaaggagcttgagcaggttaaggccctacagagtaggctgtttttgaggccggctgcggtgagcatgaatggcggggcggcgtcagcttctggagacgtagttgcaaagagaaacgatgcgaagcttaaacggagcaattcagtgcagtctggcagaggagtgccaccatcagcagccacacctgtggtcaggtctgcaaactacgcagaagcttttaaacaatgtggcaaccttctgaagaacctcttcaagcatcagtgggctggtccgttccttgcgccggttgatgttgtacagttgaacattcctgattattttgacataatcaagaagccaatggatttgggtaccatcgagaaaaagttgaatgcaggcatgtactctacaccttgggattttgctgcagatgtgaggcttacttttgacaatgccgtgacttataacccagtcggtaatgacgtgaatttaatgggcaaaactttgaaatgtatttttgaaactagatggaagtttatcgaaaagaagcttccttcactagatgataaattctctgtgagaagagagccatcacaaaagggtgcagttaagaaagataccattgagaaagattacccttctgagaaaaagcactcgacaaaaggtgtacacaagaaagatatgtttaaaaaagaggatgcttcaactaagccagctttgcaaccaaagaagagaaaagcttctcccttggttcagggttctcttgaaatacctgtagtagaagctgataaggtcattgatgatgctcaagtggtacagccttctaaggtgattgatgatgcccaagtggtgcaggcttttaaggtgattgatgatgctcaagtggtacaggcttctaaggagattatgacggacagacaaaagtatgagctaagcgtaagacttcaatcatatggtgggttgattccaaatcatgtagttgatttcataaggagccaccttcctgatgataatgagggtgatgaagatgagttagagcttgacatgaatgtcctaagtgatagtacattgtttgaacttcagaagcttcttgatgactatgatagggtaaatcagtcaggaaaccctacaaaagatgagcatcgtgaggttgagtttgaaagtgaatatgggcttagcaactcatcgatgcatcatgaagaaggtaatgagctcgttgaagaagatgttgatattggtgggaatgatcttccacctttgacgtatcctcctgcagtatttgaaagtgaaactgcagaaagaagcagcaagcatagcacttctagcagttctagtagtgattcagaatcatcctccagtgattcagattcaagcagctcttctggaagcgatctggatgtcaatgttcctccatcaacaagtggggccaaggacaacacgcaatctgcggttaggttggatcaggaaaacgatccactgagctcgaccaatctaccacaacaaagtagtgatcctgtacctatttctgccgaagatgagggggagaatgtgtctgagaaacaggtcccccctgcaaagcaataccgagctgctgttttgttaaaccgctttgctgatacaatttttaaggctcgtgagaaaactcttgatcaggtcgcgaaaaaggatcctgagaaacttcaacacgacatggaggagcttgaaaggttacgaagagaagagagagctcggatacaagctgaggcaaaagcagctgaagatgctcgcaagagagctgaggcagcagcagctgctgaggctgctgcagaagctaaacgccaaagagaacgtgagagggaagcggctcgtaaagccttgcaacagatggagaaaactgtagacatcaatgaagggaacctctttttgaaagatcttgaaatgcttggaactgttacatcaggtgaacagtttcccagctcggttggtgagacgagtccaactcatacgcctgaaggccttggatttcagctaggtagcaaccctttagaacagcttggtttgtatatgaaaaatgatgatgaagaggatgaggaaggtgagtctgcagatgaaccaacgattgatgttgaggagggcgaaatagattga

SEQ ID NO: 70420 - DNA, 549 bp, Oryza sativa
  Clone ID: PAT_MRT4530_70995C.1
gcacgaggagccacaacctagcgtctagcggcgtgaccggcgacggcgggccggcggcgacagcgaggagcatggcgcaggcagagtgctgtgcacgggcaggcagagacaggcggcggcgcagcgccgtagcggcgcaccgggcgacgaggggcgagcagcaggcagtgaggcgcaagcagctagcagatctggctatcaggtcatccatccatcaaagggcatcagggagcgtcgcagcgggggcaagcagcagcagctagcagagcaagcgtcaagccgctagcggtatgaaggagaagacaccaaccaaataggctcgaagtctcgcgagcgggctggacgacatgcactgaagaacgaggtagaacacgcctttgtatcaccgctggtagtgaagtgctcgtcggagctagcgtcccagctgctgcctgcacgcctctcaggccgaccgacatcgtccggcagcaagtcgagaagctgtcggacgtggtgccttgctgcattctttttcattgtaactattttattcctttggaagttaatatc

SEQ ID NO: 70421 - DNA, 167 bp, Oryza sativa
  Clone ID: PAT_MRT4530_70996C.1
atgggggcaaaacattcctatggcgacaccttttttaggatggaatctattaccaatactataaccccaaattacaagttaaggacaatatcttcgaaatgccacttgcttaggccccatggcatggcacgcatgacctattagtacctatactaaatagtaacact

SEQ ID NO: 70422 - DNA, 786 bp, Oryza sativa
  Clone ID: PAT_MRT4530_70997C.1
atggccgctcgattttctgtggtgtttgattggagggcaaggccggttggcggggtgaggcgggagaggagggcggcgccacgacggcggccgacggcggcagcagcccggccgagctcctcgcacggccggtgggggaagccttggagttgggcggcatcgaaggcatggggaggagacaggcaacggccagcgaaggggcggcgacgcgcagtggggtggcggatggggaagcggcgcggcatggcggatggggaaacgaccgcggcgaggatggcggcgggcgagcaggagcggcaaggcggcggtgtgcagcggggcggcgtccacctctcccctctctacctctatttcctccgagtcttcaccgacgaggaggcagcggcgcgcgacggcctgtggaagaggagcggcgcgcggcggctcgcgggagaggagcagcgtgcggcggccaatctcccggtctcctcctcctccgccgctgccgtatggatcccgccgctcagctgccggatttgcacggccgcggcgatggtcctctcgccgccgggcatggctcgccgtgttggaacgcggaagggcgggcggagtagcggggcgacgacggtagcaggccacgagcggagcggaagcggcggccgaggtcgaggccgaagacgtgtggtgcggtgtacagcgggaggcggcgtgaccacgggggacgaagccggtggtggtcgccaaggaggagccctgcggcgtcgtcgtcttcggcggcggcgcgtgtacggcgaggagcgggggtga

SEQ ID NO: 70423 - DNA, 468 bp, Oryza sativa
  Clone ID: PAT_MRT4530_70998C.1
atggcggcggacggcgccggcggaggcggaggttgcttgggcgctagcggcggcggtgaaggcggaggtcgcgcaggcggccggcggcggacgcagaggtcgcgcgggcggcggccggtggaggcgcagatcacggcggctggcagcggaggcgaaggcgggcgcagcagagcggaggcggtagaggaggaacacggccgcgcctcgcccatgtacctacggatccagtctgctggcgacgacgacacgtcggcggtgaccgtgttcggtggcgaggcgacgcggggagcagccgggccgctcttgtcctcggggtgggaggggaggaagatcaaagggaaggagaggtggccgccgcttgcctctccgccacggctccgtctcgccgccttcaccggccaccgttcgcatctctgccacgccccgcctcgcccaccacgggcgccgccgtgcggcctgggacgatga

SEQ ID NO: 70424 - DNA, 395 bp, Oryza sativa
  Clone ID: PAT_MRT4530_70999C.1
cttgcctttcccgccgcgcttcccggcaaagaaggtcgtcggcgacgcgatgatgaggaggcggtggtctcgcgcggccgtcgtcgcctgcttactgctgctcgccgccgcgtgcgcggagtcggcgcgcccactgccggccccggccaaggcggcggcggcggttgtcgtcgtcaggccgaggagcgcgttcgacgtggtggtggccgggctcgtcggcatcgggctcgggcaccggtggcggcccggcggcggcgacctggtcgacgacgagaagcggcgggtgccgacggggcccaacccgctgcacaaccgatgacttaccgccagggcgcggtaaccccggccccaacggtttgagaaaccctggcagcggctgacatccgagttcatgt

SEQ ID NO: 70425 - DNA, 388 bp, Oryza sativa
  Clone ID: PAT_MRT4530_7099C.1
gctactttaattaaacatatctataaaaataaaatattttaaataaaaagagtaaaatattataatagtttattctaatgtaagaatccgcaagagaatttatgggaggtaaaggtaccactaaaaatcaaagtatttatgtgatttcttaaaaaaaagtaatcttgacaaaaaataacctcataaagagaaaatggagggggaacaagcaatgttgttttttaatatacaagagatcatccaatattttttctttgactgtcatgaacaacaggatactatacgtaatggtgccacacgcttggaattagtagctaaggaacttttattccagtttggatggcgtatccgtctttcatttttccttgttggccacgtccacaagccc

SEQ ID NO: 70426 - DNA, 410 bp, Oryza sativa
  unsure (1)..(410): unsure at all n locations
  Clone ID: PAT_MRT4530_709C.1
tgctgaatgggtatgcactatacataggccgtgcagctcatggattgcctactatagtaaccccggcaagatttgcatgtcttgattttaatcctcatattatatatatgcatttgggtgttcaagtccctgtattagatccaatggattcagatataattcgncagatatattcngatatatcataggagcgatttgatataattncnatggctcgtgctatatgttgatagatccctatgggaattgatgatatgctcatctgaagtatctnccttgatggctggatccatctgctctaatggcgtctgcgtatggatggatttgcgccatngnngcccaggcnatntggtgcaacntntgnatcctatatcttgctgatattgatatgtgattatactattcgatct

SEQ ID NO: 70427 - DNA, 1764 bp, Oryza sativa
  Clone ID: PAT_MRT4530_70C.1
atggcccgtttggattgcaccggcaacttcgccgtctctggcctccctttgcctctcaccaaccggctggtgctcgcctatgcggtgtttggggacacggaggcagcgtgccaggtgttcaacgaaatgtcagacaagagcggaatcacctgggcgatcatggtctcggcctactccgatggcacaatgcgccgccaccgtccctacctcgacggcgtcgccgccgccgccgcaaccttcctcctcgccgtcctcctccacgcgccgctcgccgccggagaggacgagcctccgccatgggtcctgtgcgggccgtaccctcccagcggcaactactcgaagaacggcacgtaccaggtcaacctcgacctcctctccaccaccctccccaagaacacctcctcgtctccggccatgtacgccacgggcaccgtcggcgacgtccccgacaaggtgtacggcctcgcgctgtgccgcggcgacgccaacgcctccgcctgcgagcgctgcgtcgcggccgccctccgcgacgcgccgcggaggtgcccgctcgtcaaggacgtgctcgtcttctacgacctctgccagctccgctactccaaccgcgacttcttcctcgacgatgactacttcgtcaccacctacaccctccagcgctcccgccgcgtgggcgccgcggcggcggcagcgttcgacgcggccgtcgcagtgctcgtcaacgccaccgcggactacgcggcggcggactcgtcgaggcggtacggcacgggggaggaggagggcgtcgacggcgacagcgaccgccccaagatctacgcgctggcgcagtgcacgccggacaagacgcccgaagtctgccggacctgcctctcgacggtgatcgggcaactgcccaaagaattcagcgggaggacgggagggggcatgttcggggtgtggtgcaacttccggtacgaggtgttccctttcttctccggccgcccgctgctgcagcttccggcgttcgtggagacgccgccgccgccgccttcgccatcggcgaccagtggagacgatattcagagcattgattcgcttatacttgatctaccaacaatacgagttgctacagatgattttgctgatactaaaatgatcggccaaggaggatttggtatggtttacaagggagtcctacctgatggccaagaaatagccgtgaagaggctttgccagagttccagacaaggaataggagagctgaaaaataccgacaagaacagggagctagattgggggaaaagattcaagattataaatgggattgctcgaggcttgcaataccttcatgaagattctcaattgaagatagtgcaccgggacctcaaagcaagcaacatcctattggactttgattacagccctaagatttctgattttggcttagcaaagatatttggaggggatcaatcagaagatgtcactaatcgaatcgccggaacatatggatacatggcaccagaatacgctatgcgtggtaattattcaatcaaatcggacgtgttcagcttcggcgttttggtattagagattatcaccggaagaagaaacactggctcatatgatagtgggcaagatgttgatctcttaaacctagtgtgggagcactggacaaggggaaacgttgtagagctgattgatccatccatgggcgaccatcctccaatcgagcagatgttgaagtgcatccacatcgggccggcgttctgcatccaggaggagtga

SEQ ID NO: 70428 - DNA, 411 bp, Oryza sativa
  Clone ID: PAT_MRT4530_71000C.1
gagctaaaacactggtggtaccatgaaaaagtttatccccctggaggactggacattaaaaatttaccacttaacttacccccttacccatgctttcaaatccatgcgtgggggaaacaatttccacaacacacacagggagggtgaattttataaaattcattttttttttttttctccccccaatttattaacattttatacatgcattctccacaaaaaaaaaaaaagaagaaaccggaagagaacttttttcattgcccaatttttggttttaccagcctgaacttataaagcttcttgaaaagccctggccctgatgaaattgatcacacccttaacctgacaaagtttggataatggggttgtgccacgggtcaaacaggtgctgcaacaggttgtcaaagggcc

SEQ ID NO: 70429 - DNA, 1487 bp, Oryza sativa
  Clone ID: PAT_MRT4530_71001C.1
atggacgcggtccgtccactccagccagccgatcgcgagtggccccccaacccgacaaaacctcctcgcctttcactcgctacatcgatttgccagccacgctacataaaccgtacaaaaccatatcctcccccatcgcctcgcctcgccgatcgatcgacggacgacggccggaacatagctgtagatcgagctgaatcgccggcggcggccatgggacgggtgaagctgcagatcaagaggatcgagaacatcccgaacaggcaggtgacgttctccaagcggcgaaacgggctgatcaagaaggcctacgagctgtccgtcctctgcgacatcgacatcgccctcctcatgttctccccctccggccgcctcagccacttctccggccgccgcaggatcgaggacgtgctcacaaggtacatcaatctcccagaaagtgacagaggagggtacgtaaacttcttcgacggaaaagtttcacaacgagattttaacctgaacctagcactcttcctcgtgtttgttcttaatctcggtgctcttgctgatccaggagcagtaaggcgccggttaactccaacattgaggatgtttgagccggacccggccaggtctgcatccatggaggacgtcgaggccagcgagaagttcatcgccggcatcctcagccgcgtcgaggagaggaagaggtatttgctgtgcagcatgggctcgttcgacgtgacggcgtcaacatctgccatgcagcatctgtatctaccgcagcagcatcagcacggggacatcactgataatgggtttggaagcgatgaggtggcctcgtgggtctctgaggggatgccgccgacaacctcgtcggtggcgtcgatattcgccggaacttcagattccatgatgtcttttagagatcaagcggtgtacgacacgatgagacaagatgcatgtgtggatcagacagtggtcccggagatggggatgtgccatgtggaccagcagaaccagagtgacgactggcaggcgtacacgtcggcggagttcctcaacgcgctaatcccgcccacgccgttccctctcgacgacgaggatacgatgggcccgatgttggcgtcatcaccgctattgatgcccggcatccatgaccagcagccgccggtggaggatatggcgacggcgggctgctcgcaagcgccggctaacgatggcaacgggttatacgcagctgaggacattgctccggttaacgttggttaattagatgcttttgtactagaaatttatggaatatatagtgttgtcatgttactagtgtgccaggaattgaagctaaggatttttagtttggaattttttttctttgatcatgatgggctgggtgtgccacaattaatgttatatgatccatataatacaccatgcacaatgtaagataatgttacgtactagcatgtaataagatattatccagtaagatcgagttatttatc

SEQ ID NO: 70430 - DNA, 240 bp, Oryza sativa
  unsure (1)..(240): unsure at all n locations
  Clone ID: PAT_MRT4530_71002C.1
ggcagcacatggccttccaacaaggtagtgttctcagtgttgcttctgcgccgtcgtctccgtgctcgcgcgacgcgacatggcgagtaccaccaccagaccaggtggtctacacccgggcccgctctgtcagccaggatgggctaccgatgtaccgatacgtgttaccggcgttggtgaagcgcagtgacgtcgcgtggcacgacgctgcgcgcgaggttagggactgctacgcgtgng

SEQ ID NO: 70431 - DNA, 486 bp, Oryza sativa
  Clone ID: PAT_MRT4530_71003C.1
tagtggatccccgggctgcaggttgcatgtcatgttgccgcagccgacgaggagaaggtaatcaagaggaagccggtgtcgcggcgcgcgctccgcaagatcctgtcacggctgcgggttgacgcgtggacgagccagcacgacgccgggagggcgccggcagtggcgagatggccgacggggactcatgacgccggcgtgggggagagaaagagagaaggaagggagagggaggagatgagtgggtccatatgtacgtttttaattttaatgccatctaagcgccaatcaacggtagacaaggtcaccactgccatgtagacgtcatatcagtgaaaccgccctccaaaaccaccgaggaagtcaaattgcaccagttttaagagtttaggggtcgagatatctagtttagtggtttagggtcacggattacatttcaatcacttttgagggtcacaaagtaaacttattcccgtcaacaacaat

SEQ ID NO: 70432 - DNA, 129 bp, Oryza sativa
  unsure (1)..(129): unsure at all n locations
  Clone ID: PAT_MRT4530_71004C.1
gaaatctattaaactacacaactatntattgggggcctttcataaactctggtcaaataaggaagatcagagaggtacataaacaaggcgaataacaggttcaacgtaccatacacgaaatttagcagc

SEQ ID NO: 70433 - DNA, 461 bp, Oryza sativa
  Clone ID: PAT_MRT4530_71005C.1
tttttttttttttttttttttttttttttttttttttttttttttggttttttttttttttttttttttttttttttttttcggacccgggggcggacccgtggggcgggcacccgggggaccaacccggaaaaactcgggaccggaacccgggaggcgacccacggtttccctaaagggagtcgaataaaacctggggggaaccagggccaaagctgtacccggggagaaaaagaaatccgcccacaattccacacaaaaaacgacccggaaacaaaaagggaaaacccgggggggccaaaggagagagctaacccacattaatgggggggcccacacggccccatatccagggggaaaacctgacttgccaaggggaaaaaaaaaacgggcaacccccggaaaaaggcggatcacaaaatgggcacaaggggggtttttttttacaccaaagaagaggg

SEQ ID NO: 70434 - DNA, 396 bp, Oryza sativa
  unsure (1)..(396): unsure at all n locations
  Clone ID: PAT_MRT4530_71006C.1
attcgctgccgcccactccgtgctcgcctcgcctcccctcagagagattaaagcagcagcggctttctttcctctgcgtttcttggattgcagcaaaatcgatcccccccccccntttgnnccccgtcccagtnnnggtggnggattgnagttcttgtgccatcgatttgggtgggattcgggcgccgcgtgggaaggagaggtttcttctggggtgcccagttgggctaaatttctgggtagctcccgccattgtcgaagctcttcagttcttttgcgtttcttgggccttgtatcagatccgtgcccttgcgatttcttgtaattggaggtnaganagagagaganagagagaggtcgatccatggaggtgcaggaaagtgaataatcggggga

SEQ ID NO: 70435 - DNA, 208 bp, Oryza sativa
  Clone ID: PAT_MRT4530_71007C.1
tgtaaggaaggaaccccctgcctatgattaagctttgggcatgcctaatctaggggtaggaacttgatgctgaagcacactgccacagcacgtgacttggtgggctgaaaattgatgtgtgttgcttgatttaagttggtgtggttgttaatgttgtggtgtgtgtataagttcgggcgtgttgggattattgaattttgggtatgtg

SEQ ID NO: 70436 - DNA, 377 bp, Oryza sativa
  unsure (1)..(377): unsure at all n locations
  Clone ID: PAT_MRT4530_71008C.1
tgtcctgctgctattttcaataatggaaataaatatccccaccgctgcactttaaggatgcactaaataatcctgattaccttatacctcccttnaattactgaaaaaaaaaaaaaaaaaaaaaaaaaaaaaaaaaaaaaaaaaaaaaaaaaaaaaaaaaagaaaaaaaaaaaaaaaaaaaaaaaaaaaaaaaaaaaaaaaaaaaaaaaaatgaatggaaaaaaaaaaaaaaaaaagaaaaaaaaaataaatatataaaaaaaaaaaaaaaaaactaaaaaaataaaaaaaaaaagggggggggaattaaaatgagtattaagtgctttgccatttgatgaattggctaattcttatagaatgtgaaagaaaaaaga

SEQ ID NO: 70437 - DNA, 207 bp, Oryza sativa
  Clone ID: PAT_MRT4530_71009C.1
atgaggttgacgaggagcggccgcttcatgtcgtcgatctccatggccgggatctccatcactcctctccggcggtcgaacgtcacgccgaacctgtactccggcgccgccgcctcgcccagaacgaaggtgacccccggcctcgaggagctcggtggcgcgcggtatcgtccgcggacacggcggtgcgacattggattacgatag

SEQ ID NO: 70438 - DNA, 2679 bp, Oryza sativa
  Clone ID: PAT_MRT4530_7100C.1
atgtcgctccggccgagcgagcggatggggatccgccagaagggctacaaggcgtcgatggacgcggcggaggggcggcggcggcgggaggacatcaccgtgatactccgcaaggccgaccgcgatcgcgccctcaaggagaagaggcggcgccccacggccaccgccgccgccgaggggttgccgcaggcggcgcactcgtcggccatcgagaagaagttggagagcctgccgatgatggtgcaggggttgtactcggatgacagcagcatgcagttggagtcgaccacgcagttcaggaagctgctctctgtcgaccattgtcctccaattgatgaggtgattagatctggagtgctccctcgctttgtggaattcctcaccagggaggagtacccccagctccagtttgaggcagcatgggctctcaccaatattgcttcaggaacagcagccaacacaatggcagttattgaacatggtgctgtgcccatctttgtgaagctcctcagctcaccaagagaggatgctgtctgggccctgggaaatgtggctggggattccacaaaatgccgtaacctggttcttatgcatggtgcaatgttaccgctactgcagcagctcaatgagcatgctaaactctcgatgctgaggaacagtgcctggaccctttctaacttctgccgtggcaagccgcagcctgacttcaagcatgttgaacctgcgcttccagtgctgcgggagctcatcctctctcaagatgaggagatcctaacggactcatgttgggcactctcttacctgtcagatggttctaatgacaatatacaagctgtgattgaaactggcgtgtgtgattggcttgttgagctccttagccatccttcacctgtggtgctcattcctgctctccgcacggttggcaacattgtaactggggatgatgcgcagacccagagtaaattaaccaaaactgcagatactggacaaaattatttgcaaaactacggatttaatccacaatactatggaaccacagatttagtgctgactttaagcatgtgtattgttggtcatccccaagcacttccctgtcttttcaatcttttgacaacaactcaaaagaaaagcgtcaagagagaagcttgctggacaatctccaacatcacagctggaactaaagagcagattcaggctgtgatcgattcaaacataattgctcctctattgcatctgttgcaacatgctgagtttgatgtcaaaaaggaggctgtttgggcaatttctaatgccacatctggtgggacattcaatcagatagagtatcttgttagtcagggttgcatcaagccgctttgtgatttacttgttcaccaagattccaaaacagtgttaacttgtttggaggcccttgataatatcttgagggttggggaggctaagaagaacttgggggcttgtaatatgaacatatttgtgccgatggttgatgaagctgatggcttggacaaaattgaggatctccagaaccatgacaatgttgagatatataataaggcagtttatgtgcttgagtcatactgggtgcaggaggatgaccaacagccctttcttattccatctgtatctgaatctgaatctgacaatgaaatgtttcagtttggcagtttcggtaaagtttcggtgaagtgcccgatttggatggaaatgcaccgtagctgtctgttcagggggctttccagaatcggagagtcaagttatccgagtcatggtttggtcctgctaacttgttatgaggcagcagtcaggcggttggttcatatggattatggttctccacacaagggggtgggtactggaaattggtcggtcggggaagggcatactcttgcttgtgttgtcgggttagctatttctttcgccttccttccactagcgagaacacggttgcccgtgctcctttattcacaacctccatgaacaaaccggaagcaagaactagagaaaaaatacgaacgattctcttctccaaccaacgctgtgttaatccggatgggctccaccgatcggaaggtggtggggatcggcgtggcggaggaagggaggaggagctgcgtcgaatgccgcgccaccaccacgcccatgtggcgcagcggcccgaccggccccaggtctctatgcaacgcttgcggaatccggtaccggaagaagaggaggcaggatcttgggctggacctgaaccagccacagaagcaggagcatggtgaggtaatacctgaagtaaaagacagtaacagcaacagcaacaactgcaacagtgggagtggaaatagcagcagcaacttgcaggttgttccgaaaaggaggcttctgatgggtgtggaggaggctgcattgttgctaatgacattgtcgtccccatctgcatccacattgctacatggctgacaatatcctgctcacccccaatcgccaaatgtccatagtacatactacatacaaagcacacaccaccaatggttccagatcatacatggctttttggttaatcaaggatcaaataggggcacgggcccttatctgaaaaacatgatgatgataatggcataatccgagggcagggatttgtggcaatctgtgacttcctttcgtctttttcgtccctttccatcgttatca

SEQ ID NO: 70439 - DNA, 324 bp, Oryza sativa
  Clone ID: PAT_MRT4530_71010C.1
atggaaagtagcggtggaagccagctgggaaagaattccaaaacaagtgatggtcgtgaaacaaaagccacttcatccttgcttctcttaattacggctattcatttcgtagcattatgtccaaaaggggaaaatgaagatgccagaaaagaagttaatagcactgcgcaaaattttgttcatttcacagaagaagaggaagatattgttttcagaatgcacaggcttgtcgggaacaggtgggaacttatagctggaagaataccgggaaggacagcagaagaagtagagaagttctgggcaattaaacatcaagccacatga

SEQ ID NO: 70440 - DNA, 201 bp, Oryza sativa
  Clone ID: PAT_MRT4530_71011C.1
atggcaacggccgtggcttcaacgggcttcggctcgggggcggtggcggcaaagcgtggtgctgcgagggccggtggtgcagatctggccctccagccgccctcggccggcgcgctggcgcccttttccgccgccttcgcggccggtgttgctcggatccattgctactgtggcagcggtgaccccctacgcatgttctag

SEQ ID NO: 70441 - DNA, 696 bp, Oryza sativa
  Clone ID: PAT_MRT4530_71012C.1
cggcacgaggcctccttcctacctccacctcgccgccgcccgagcaagcctctagacatcatggctgtaagaatggcggcaactaggccttcctctccccctaatccctcgatctggtcagagcccgtgaccatatctaggatggcaacggccgcggcttcaacgggcttcggctcgggggcggtggcggcaaagcgtggtgctgcgagggccggtggtgcagatctggccctccagccgccctcggccggcgtttgtgctttgggagctaggacgagtcgacgacggcgtggggtggtcggcggcgggaccttggctcctctctgctagatctggtgcctctatcttcattgacggtggccaagttggtgttggaggctgtgacaggcgctggcgcccttttccgccgccttcgcggccggtgttgctcggatccattgctactgtggcagcggtgaccccctacgcatgttctagctgcgacacggcactctcgttgtccctagcttggttgcaacaaacctcttccccttcccctcccactagtgcccttgttcttgcgccctctttcctccccgatctaatctgttcttgcgccctctttcttccccgatctaatcttggtcctgttccatcattcttgagtttgctggtgtctttccctattaacatctcaatattcaattccagcatgct

SEQ ID NO: 70442 - DNA, 1881 bp, Oryza sativa
  Clone ID: PAT_MRT4530_71013C.1
tactattattgcctgctataataaaaataaattaccatgcaatcaaaaggaaattacaccattcgaggaatgggagaaaaagaagttaaatctctcatacttgcgcaaatggggatgtttggctaaggtcaatgttcctatagtaaaaaagcgcaaacttggaccaaagcctgtagattgtgtgttccttaattatgttattcatagtatgtgatatatattcttaatagtaaattctagagtacctgacatgcgtgttggcacaataactgactccagagatgctatattttttgaatgaattttctatgaacgatgcacctagcacttctagttaagtacctattttatcccccgagtcatttgtgccgatagaatacaatgattaaacacctgaggaaaatcctaaggaggataatattgtagctacttgacaaaggactgcaaagtcttttggtgataactacattgtatatattgtggatgacactccaaaaaccatagaaaaggcatattcatctcctgacgccgactattggaaggaagcggtacgtactgagatggactctattttgtctaatggtacttgggaaatcgtcgagcgtccatatgggtgcaagcctgtaggatgcaaaagggtcttcaagaaaaagtttaggcctgatggtataattgaaaagtacaaggcaagacttgtggccaagggttatacttaaaaggaaggcgagtaatttttgtacacttactcaccagttactagcttgaccacgattcgagtattacttgctctggcagcctctcatagtcttcttgtccaccagaaggacgttaagacagctttccttcatcaagagttggaggagtagatctatatggatcaaccagacgtttatgtattagaagatcaagagggaatggtgtgcaagctattgaagtccttgtatggccttaaacaagcacctaagtagtgacatgagaagtttgacaaaacaatgacacttgttgacgttgttatgaacgagactgacaaatgtgtatactattgctatggtggtgggggcgagagtgatcttctgtttatatgtcgatgacatattaatatttgggaccaacctcaatgtgattgaggaggtcaaggacttactttccaaaaactttgagataaaggacttcagtggttgatgttattgttaactttaagctaccaagaggagatgatggtgggattacacttgcgcaatatcactatgtggacaaggtattgtgtcactttggttatagcgactgcaagccagcttctactctttatgatcccagtgtgctattaaggaaataccttagaatagcaagggatcaactgagacactcctagatcattggttaattgatgtatttagctagtgaaacaaggcgtgacatctcatttgctgtgagcaagttgagccggtttgtttcaaatccaggagatgatcactggcaagctttggaaagattaatgcgctatctaaaaggcacaataagcagaccatttcaacgagttcaacaatagaagctgaactcacagcattagacactgtcacggttgaggtcgagtggcttcgtgagctcctaatggatttgccgatggttgaaaaaccagtaccagctatcctgatgatctgtgataatcaaacattgaatattaagatgaacaattcaaatgacaacatgaagtcatccaggcatgtaaagagaagactgaaatctgtcagaaagcagaaaaactccggagtgatagcattggactatgtccagactgctaaaaatctagcagatcaatttactaaaggactatcacgtaatgtgatagataatgcatcgagggagggcttgagacccact

SEQ ID NO: 70443 - DNA, 204 bp, Oryza sativa
  unsure (1)..(204): unsure at all n locations
  Clone ID: PAT_MRT4530_71014C.1
gcaagacaaggagaaggaantacacctgggactatcgactggttgttcggattttctattggatctatacatgctcgctctgtgcgccggggattcgatcgatggacagggcagcgatctctgcttcgagggtttcgacgaattgaactgcatattcgttgccatatcttcgcataggggtttctgcctctcccttggggaggg

SEQ ID NO: 70444 - DNA, 543 bp, Oryza sativa
  Clone ID: PAT_MRT4530_71015C.1
atgtcaccaaggcactcaaatgaaggcatcagacttgactttgctaagacaaacaaatgctggcaccacaccttgctcgacattgccaagccacacttaatgcattttcatggggcgttctcttttgtatgtggactttatgatgccattcaggatggtggttgtgtgaggtttggagaatggctgtggcatgccacccctgggggaggtgcttttgtggagatcaggtggtaccaactcgaaggtggcttggctatgacatgcgggctgcttcgtcagaaagagcgttcagatgacccggtgcctaagataaaccacattactcaatgttgtctgattgtccaagttattatcagtgtgttggaatcaaatgtcaacgagctgaacatcgctgagctaagaggtttggaggaagcgatgactaatgctttgacagttgttaagaacaaactgatgatgaaggtggctagtgtgctcccccaaagcgagaagaagaggaagagttgctcgatttcagagccaagatcaggagtgagctcttaa

SEQ ID NO: 70445 - DNA, 456 bp, Oryza sativa
  Clone ID: PAT_MRT4530_71016C.1
atgatgataagcggaaaaaagtgggacgccaagacgccgatgaactcaagctgtgaaagtcttcttttagagagagaagaaagtcgtccgaatttcatttccagggtcccgaagaggttcgaaaaggcgcggccgcgtgcggcgagcggcggatgcagctgcggcggcgcaggcggcggccgcgcgcggcgagcggcggcggctgggctgcggcccggcggagggcggtggcgggcggcggatacagcggcggcggcgcaggcggcggccgcgcgcggcgagcagcagatgcagctgcggcggcagctaggcggcgggccggcggagggtggaggcggcgcaggcggcgcgtgcggcagaagcggccggcgcggcgagcggcggatgcagcccgtggcgacgactgggcggcgggccggcggagggtggcggcggcgcaagcggcgcgtgcggtag

SEQ ID NO: 70446 - DNA, 425 bp, Oryza sativa
  Clone ID: PAT_MRT4530_71017C.1
ctcgcgttcgtcctcaccgtcaccgccgtcaaggacgcgtacgaggactggcggcgacaccgctctgaccgcgccgagaacggccgcctcgccgccgtcctcctatcccctggcgcgggcacccacttcgccccgaccaagtggaagcacgtccgcgtcggcgacgtcgtgcgcgtctactccgacgagtccctcccggctgacatggtcctcctcgctaccagcgatcccaccggcgtcgcctacgtgcagacgctcaaccttgatggcgagtccaacctcaagacgcgctacgcaaagcaagaaacgctcaccacgccgtcggagcagctcaccggcgccgtcatccgctgcgagcgcccgaaccgcaacatctacgggttccaggccaacctcgagctggagggggagggccgccggatacc

SEQ ID NO: 70447 - DNA, 2625 bp, Oryza sativa
  Clone ID: PAT_MRT4530_71018C.1
atgtggaagagagttctggagacgacgaagaaggccgccgccgccgctaccgctaccgccgcaactggcccgcagctcgccacgcggaaaaacccttcctccagccgccgcaaggccgtcacgccggccaccgcggtctcccccgccgccctcctccgcctcaagcaggccgcctcctcgaagaggaccaacctgccctccaccctccccgacgcccaagatgtagccgctgtggaggacgagaacccttccggcggtttcaccaaggagatcctgtccatcttaaatggacctgatgatgcagaagaattgaggggggcgcaagcgccaccggaggagtctgaagatgccgaagagtctgtcgtgaacaggatactggacacggagtggtttgcggcgccaccacctagcaacccactggcggcctggcggaaggaggtggcaagggagaagaagaaacggtacatattcaagaacacagagagccgccgcttcaccaggttgatgcagaagtgtgccgataagcttggagcagagcccgcgcttgaattctttgggaagctggggagggatactggggctaaggagtttaatgctttgatcaggatttgtttgggcaaggcaaaggaatgcatggatattgactcagcagtggagcatatttatagggcatatcgcctctttgagctgatgagagaaaggggttatcagattgtggaagattgttatggaccattccttctgtatctggtggatgtagggatgtcagaggagtttgatatgttcagtgtgttctttaaggatgcaaatccacggtccagctcgagaatagcttattacgagatgttgttatggattagagctcaagatgaagaaaagattcaagaactttgccgctctgttgaagacttcaatgaagaaggtgactatgatatggcagaaagttatatgctggcctttgctgaaagcgacaggaggctggatttcatcagcttgcttgagtcacttgatccaacaagaattttacgctcaaagtacttattgaccatattccagtctttgggtaggttagaattgaagaactatgctgagaagcttcttcagcagatgaggtcgaaagaatctggtgttggaaaattttcatcgataatatttgagtatgcttcaaatataccaaacatagcggttgaagatgttatagtatcattcaatagatggcatgagcagtttgaggtagcaccctctatttctgcatctgagaagatcatctctgtttgttgcaaatcgtcaaagatcagcttagctcttgatgtagctgagtgcttatgtaaatccaaccccgatatgccagttgaattgtttcatccaataatacaggcctgtgaacaaggctctgaatttcacttggttcatccaatatatgatttgatgcgtcgccacaagatgaaattgaaaaccgaaacattcagaaacatgataaatttatgtgtaaagatgaaagattttgaaggtgcttaccgtatactcacagatgcagaagagtctggggatatatccactgtaagcctgtataatgctatcatgcttggatatttcagagagaaaaaccacaatggagcacagatggtcatggcgcaaatgcagattgccggagtaaaaccagattctgaaacatactgttatttgatatttaactgtgagttcgaagagaaaatctctgagtatcttgatcaattacggcaagatggaatacacatgtccaagcatatatatatgtcactagttagtgcatatgcaagacttgggaattttgacatggctaaacaggttctcgaaaacaaggaaataccacctaagtacctcaatgaaattaagagtgcgcttataggagctcttgcatcaaatgggaaggtattagatggacttatcatgtatgatgaaatcaagcaatctggatgccaccttgagccaaaatcagcaatagccctgattgagaatacccaaacaaaaggtgagctggatagactgtatcaacttctggaagagcttggtgactcaaacatgtggtttgacggtgctgccattggtttgcttaagcagcttaaggagaaagatgaattgagtacatatatggttattgatcaggtcttcagtcaaatatgggatatggatcctgtaaatttggattttggaatgaagattctccatgctgtgaaagagcttgggcttaatgtttctcggacaagccttgactttcttcttagtgcttgtgtaaagggaaaggcttcaaagcgtgccaagctgatatggacagataatgaatcaacaggactgccaaatactatactgacttccttcaggatgtattaaggtcttttgttgtaccagaagaagaaggcgactaagaagttgctgcggaagataccaaaggaagatgttcatgtgcgttacataatagattcttgtcaaatggcatactgcagccagaatcttaagctaccttctgccagtaggtccagttcaataaagagagctgcttccaaggctgggagcacctgtaagcctgctgcttcaggaaccgaggtgtttcgaaatgaagctgaagaggcacatactggcccttga

SEQ ID NO: 70448 - DNA, 913 bp, Oryza sativa
  Clone ID: PAT_MRT4530_71019C.1
attgatagaaatagtggagttgatgaagcagggagcgaggcgagtgctggttggcaagaacatcaaggaaggatgcgccatcaacaagcagccattcgcgcccttctacaaggccgtgctcaagatcaccgggacgccgcggcggaatccgtcgccgtcgccgtcgccggccaccaggtcgccgtcgacgacgttgggccgcgacagatactgctgcctcacgcgggaggacatcgtgcgcttcctcatcaactgcctcggcgcgctcgcccccatcccgatgcaatccatcgcctccctcggcgcgatcagccgcgcctactcccacgtcgaggactcctcccccgccattggcgccgcctgggagctcccctccgacccgcgcgccgtcgccgtcgtgcggactggccacgacggctcgcgggtgattcttggcgagatctccggccacaagctgtggaagaaagactacgcggccgccgcggaggcgatggcgaccatgtcggcgatggacttcgccaccggcgtcgacgagagcgggccgtcgcctaccgccaccgccgccgccgccgctggcaatgtcggcggcggcggcgcgcgtgcgcggatggggagcgtcgaggaggagatcgcgcctgtgccgaggctgacgaggttcagcagcaggaagatcgggttctcggcgagcttggcgaacatgatcatggtgagccaccggaagaaccgggtgctgacctgcaaggcgacgagctcgctcgccgccgtcatggcgcagatgctgtcgcacagggccacgcatctctgggtcgtcgaggatggcgacgccgacaaaggcgccgtcttggttggcatgattgggtacatggagatcctcagggcggtcactagaggtgttgttgtccctccggcttga

SEQ ID NO: 70449 - DNA, 556 bp, Oryza sativa
  Clone ID: PAT_MRT4530_7101C.1
aaagaaaagaaaagagatgagagtgctatacaaaatgaagtgacacttcaacaagtgttgcactaatattggaacacttattagggtacttaagaacttgaaattacgaaaatccaagcctaatttgcgcatattatatacttcagattaggaaactgtccggatcatgagaggagacaaatccgaggctatatgaagtctttggaaaaaggcctaaaaatggaattaattgtttctaccactatcaaaatgctacgagaatgcccaaaaacacatcaactctcccaattctctcatacaactattcaagacaagtacaagatgatctaaaagtttgacgacagaagtggatatatacacatgaacactttcttccgtaaacgtggtcgttgttgctatgagcgctgtgaattcgattttgtcaacttcaacttcaaattaagggactaattaaaagaggaacaaatcaagccgacgacaagtcactaatctccaaaatccaaagtcaaatcataagccggcaagatcgtcaccgtcgtcgtcgtcggtagtcgac

SEQ ID NO: 70450 - DNA, 181 bp, Oryza sativa
  Clone ID: PAT_MRT4530_71020C.1
ttcggccttcctttttttttttttttttaaattgattgctgaaatttggtaaccttggtacaaatgcggccagcatgcgagcaatgaggggcaagcaaggatcacaattaattgattgaaatgcaagactatgggcgttatcattcaacggtggccgcgaagtccaactaaaatatttatt

SEQ ID NO: 70451 - DNA, 157 bp, Oryza sativa
  unsure (1)..(157): unsure at all n locations
  Clone ID: PAT_MRT4530_71021C.1
cgtnaatcagtcttctcgccatcggtgcgtatcctcgtcgatcctggaaccctgcgggaccacccgagaanatatcctacataaggtcctttcttccaaggggccagcccagagtccatccacggggcatatcggagacacatttccaccgtatcgt

SEQ ID NO: 70452 - DNA, 192 bp, Oryza sativa
  Clone ID: PAT_MRT4530_71022C.1
atggagatcggcgcccctcccctcccctgccaaatgggcggcccggcccatcacggcaaggggcccgctgatggcacggcaactgtaatgggccgtacggtgccagatcttgggcagaacggcccaaggaggtgttgggccgtgtcgggccggcacggctactgttgcatggaccggtggcccacccactag

SEQ ID NO: 70453 - DNA, 435 bp, Oryza sativa
  Clone ID: PAT_MRT4530_71023C.1
atggcggccgagaagacgcagattattccggtactctgccttggaaacggcggcagcggcccaaacagagcggtttcggaggacccggggagcgagcatacggcggaggatgagacggcgcgtgagatcgtggacgcggaggtgcgtcgccaagtcgccaggtacaaacacaagctcagggaattcaagctgacagtcatcggcaccgctgtcttcctcgtattttgggtggttttgttgctcatcgggaccctcgaccaccacatgtccgtgtcgtggcgccggttcttcgtcacctgtggtgtgtttgagtgcctattctggctatacctcgtcgtcggccatctcagagagtatggcttgtccatccccaagatctccgacttcagcaacgaagagcatcaactgccgcccgtggggcacgaccgttgctga

SEQ ID NO: 70454 - DNA, 1797 bp, Oryza sativa
  Clone ID: PAT_MRT4530_71024C.1
catttcggggggggtagtttataagggcttgcgcgaggagggggaggagtagcgggtagcggcgggctcgagtcgagtcgagtcgccgtcgtcgtcgggcggcggcggccgagagagatcgggatcgatggtgcgggggaggacggagctgaagcggattgagaacccgacgagccggcaggtgaccttctccaagcgccggaatggcctcctcaagaaggcgttcgagctctccgtcctctgcgacgccgaggtcgccctcatcgtcttctccccccgcggccgcctctacgagttcgccagcgcccccagcctacagaaaaccatcgaccgctataaagcatacacaaaggatcatgtcaacaataagacaattcaacaagatatccagcaagtcaaagatgatactttaggtttggccaagaaacttgaagctcttgatgagtccagacggaaaatattgggagaaaatttagaaggatgctctattgaagaactgcgtggtctagaaatgaaacttgagaagagcctccacaacataagactaaagaagaccgagcttctggagcggcagatagccaagctgaaagagaaggagcggactttgcttaaagacaacgaaaatttacgcggaaagcatcgcaaccttgaggctgcggcgctggtggctaaccacatgacgacgacgacggcgccggcggcgtggccgcgggacgtgcctatgacgagcagcacagccggcgccgccgacgccatggacgtggagactgatctgtacattggattgcccggcactgagcgctcctccaaccggtcggagacaggttgaagaaggccagccacagcaacagctgctatatagcatgcagtagcagcaacgacgccagtgacatcctgttcatctcacaagaataaccagagctctacgcatgcgcacatgaaacccaggcatgcagttctcggtgggtaaattattatctcgcattattagctatatgcgtgtccttgtctttttctttaggcaatggaataaaatttccggtaagtacaaacacaaacggaaacaaagaattaacaaagctgtagcagaccagatcggcaaattgaaatgccaggtaatccagtatatatttcagccgaggtggatgctctggatatctccgatgtgccggcttacatgaatggcgaacaagacgtactcttcactgaggacatgctgcttggagacttcgctgaagaagatgacctcgacctcgacgacatcggtgatgacttctgcgaggatttcccagagatacccagcggctacgacttcggccgtggtgatatgttccggcaggtggatttctgcgtgtgaattaagagcttgctaaagttattcatgttggtgtgatgggcctgtgagtgtgggtgcttgggaggagatttcttgggttttttccccgagcaaaatcaatctgctcgtgcccttgagatttcagttccgcccataagaactccaacgcacatttagcattcggagagtaattttgttaggttaaaagtatggtaagttataggtggtatgttatgtttttctttttcttttctcaatgttatctggtacctaagtttgtcaagaaaatcatagtggacaagtcaagtatttggggctgtcgtctctgttatggaaagaaaaataagttttgattacattacatatcttttgctctcgagatctggtcatgtcgtcgcattgcaactcgtctcgtctgtatgcattttactctgctggtttaatgttgagattgtgtagtt

SEQ ID NO: 70455 - DNA, 1101 bp, Oryza sativa
  Clone ID: PAT_MRT4530_71025C.1
atggtgcgggggaggacggagctgaagcggattgagaacccgacgagccggcaggtgaccttctccaagcgccggaatggcctcctcaagaaggcgttcgagctctccgtcctctgcgacgccgaggtcgccctcatcgtcttctccccccgcggccgcctctacgagttcgccagcgcccccagtactcgtattgtgtatcttactcctagttctcttgcacccactccagctggagagtggagagagtggagagaagatctatctagaaaattcttgagtttgcaagctatgatatgcaacgaactttcttctaatgtggagctgaaaccgtttggttgggctctagctcaaggagaggtggagttggagctttgccgtatgggcccaatgtatataaaaaatatctataatttggttatagagtatttgtatttcaatgggaaaaagctgagctcgaactattctttagtgtacaggcaacacgccccaattctacaagtgctgcaaccaaagctttcaatactggttttgccggaaatacccgtaccgcttgctggttgttacttcttccgtttcataatcctacagaaaaccatcgaccgctataaagcatacacaaaggatcatgtcaacaataagacaattcaacaagatatccagcaagtcaaagatgatactttaggcttggccaagaaacttgaagctcttgatgagtccagacggaaaatattgggagaaaatttagaaggattctctattgaagaactgcgtggtctagaaatgaaacttgagaagagcctccacaagataagactaaagaagaccgagcttctggagcagcagatagccaagctgaaagagaaggagcggactttgcttaaagacaacgaaaatttacgcggaaagcatcgcaaccttgaggctgcggcgctggtggctaaccacatgacgacgacgacggcgccggcggcgtggccgcgggacgtgcctatgacgagcagcacagccggcgccgccgacgccatggacgtggagactgatctgtacattggattgcccggcactgagcgctcctccaaccggtcggagacaggttga

SEQ ID NO: 70456 - DNA, 213 bp, Oryza sativa
  Clone ID: PAT_MRT4530_71026C.1
cctaccgcagagtgagcggtcgttgtgtgcgcatcgcaccattgcgacgtacgccattgccgaggggttcaagtccaccgccggcatgccacgtagcccgccgtctccggcaactccagtcttcggcaacgtagcaatggcggtcgaaatcagtgacgtcaggtgtggcgattgaggacttaagagtcgagaccttctactcagctactgaga

SEQ ID NO: 70457 - DNA, 2434 bp, Oryza sativa
  Clone ID: PAT_MRT4530_71027C.1
ttttacgcgtggggccgttttggtcggggttttagcgagcgcgtgggaggccggaggcgacgacgacgaccgcgccgccgtcggagaagaaggccgcggaagcaccagtaccagcacccgtatatgtcttctagccccttctccgatctggtggtagtcgtgctcctcgtctgcgccgtcgtcgccgcagccgtcctcctccccctcgtctgcgcccgccgatctatgcaccagaggctccacggctggaacaagtccacgtcgatgctcagggacgggttcggggtcaagtattccgggttcctccacataaggccgtgtggtttctgtcgaggagattgacggattcgatcgattcgtgttcgtctccgtcaaatttttgcacaagagaaaaaaaaagtttcccccttttagagtttttccccttcagttttgtcagttttggtgaggaattttagagttcttttccggcaagagttagaagaagagagaaatggccccttccaagcagcagcagcagctgatgctcctcaagaaggtgatggcgaagaagcccaagacgaagaggctatccgggtttggccttaaaccctctgctgctttctccaggccccatgtgccgtcggcggcggcctccctgcagccaagccgtcgcgtccgcgtcgtgttcgaggaccctgacgcgacggactccgactctgacgacgacgaggacgccggcgccgcctcaaagaagcgctactttgagctcttcattggcaagccagcttcgtcgacgaagcaggcctctccggcgtccaccgtcgctgcctacgccaacatcggcaaggttgggagcacctgctaccgtggtgtgcgcctccggaagtggggcaagtgggcggcggagatccgcaaccccttcaccggccatagggagtggcttggcacctttgacactgctgatgcggcctccgccgcctaccagtctgcctcccgcaacttcgccgaagagaagcgccgccgtggtgtggcctcctctgcctcacctgctagttcggcgacccctactccgactgcgtcctcgtcgtcctcgacttctgccgcgccattcgcccacccttcgccgtcgtctgtgctcgaagccaccaagccagctccaaagccagagtcgccgccgctgccggagcaagctgcaactcccctcctggtggaggctaccaacgagaccgccgagctgccggatgacccagagttctacaaggatatactgcgcggtctacagctgccggacattgacccgatggatttccgagctgggctggatgctctggatatctccgatgtgccggcttacatgaatggcgaacaagacgtactcttcactgaggacatgctgcttggagacttcgctgaagaagatgacctcgacctcgacgacatcggtgatgacttctgcgaggatttcccagagatacccagcggctacgacttcggccgtggtgatatgttccggcaggtggatttctgcgtgtgaattaagagcttgctaaagttattcatgttggtgtgatgggcctgtgagtgtgggtgcttgggaggagatttcttgggttttttccccgagcaaaatcaatctgctcgtgcccttgagatttcagttccgcccataagaactccaacgcacatttagcattcggagagtaattttgttaggttaaaagtatggtaagttataggtggtatgttatgtttttctttttcttttctcaatgttatctggtacctaagtttgtcaagaaaatcatagtggacaagtcaagtatttggggctgtcgtctctgttatggaaagaaaaataagtttttgattacacgataaaaaaaaaaagtcaaatttttgcacaagagaaaaaaaaaagtttcccccttttagagtttttccccttcagttttgtcagttttggtgaggaattttagagttcttttccggcaagagttagaagaagagagaaatggccccttccaagcagcagcagcagatgctcctcaagaaggtgatggcgaagaagcctaagacgaagaggctatccgggtttggccttaaaccctctgctgcttctccaggccccatgtgccgtcggcggcggcctccctgcgccaagccgtcgcgtccgcgtcgtgttcgaggaccctgacgcgacggaccgacctacgcagttttgacaggatctatgcttcgtgttgccgatcaggagtatactactgctactatccctctggctattgccgcttacggcgaagacaaaacatcaaaatcgcaaacgtgtccatatactactactgctggtgacaagtccgtcctcctgcgagaagatccaaagctgccgcgtctgaccgaccagctgccggtcgacatggtgagctccgcccccgatttctcaacgttttcctga

SEQ ID NO: 70458 - DNA, 885 bp, Oryza sativa
  Clone ID: PAT_MRT4530_71028C.1
atgccgaagctttctgtgattagtgtcagtggtggacattgtctggtggcttggagccaagtctgctcgcctgatgagtatggtggtcttggaatcaaggatttacatcctgttcggtcgagcactgcgtatgaagtggctggcactgacgcaaaaagggttgaggtaggaaacgtcgtcaacattgatttctggaggtccaattggttgcccagcatcagctcctcgatgccatgcctgtcctgctttgtgtgccaagatggtctcttggtatgggacttagtagaagagaagaaactgaaccagcgagaagaagatgtgtttttctggacaacggcgaggggtggtaacttctcagtcgactcgggtgtacaacatgttcttcctggccagaacgagatggtcttgggacaggatggtctgagagacaagagcaccatccaagatcaagttattcatgtggcttacctcaaagggagatgcctcacggcagacaatctacaaaagagaggctggccccatcatcaacactgccacctctgttctttagcgagtgaggattgtacccacctgtttgctgcctgcaacttcactaatgcagtttgggatatgttgaggaactggctcaacattggttttcagctaccacgggatcaggccctcgatcttggtgagtggtggcttcagtcaagagtgtgttgtcgtgctgctcacaggaaatcctttgattcctttttttcatggtatgctggttcatatggaaggagaggaatgcaggggtctccgagaacagagcaagcacgcctagtagtgtatatggagcaattaaggatgaaatcttggtctggagggctgcgggtttgttcaaaagagattagtccctag

SEQ ID NO: 70459 - DNA, 541 bp, Oryza sativa
  Clone ID: PAT_MRT4530_71029C.1
cccccccgtgcgactccccacggttcgcacgccgccgcaatggggccccgcctgcgacgccgccgtcgaggagctcactcgcctcctggaccaagtcgaggagccgctgaacagacgttccaggtacgtattgggtcttttggtgtgatctttagcctgttgattcatggctttcgtgtcaggtctgatctttttttatgctgtacagtttgatcagagagattcaggccattgcttagttcatttcgatagtttgcagaaactgaatttgttttagatgtaccaagttttctccattttttatgatttataaattataaacttacagtaagcttggatgatgtctcgatcgtaatcagtactaggagaattttgcgtctggggaacataatggatctatgaacaacatttgaaggttgggaaagttggagctaaggttgttaggatgaaaggtgttctgctgttctcttctttaggccacatatttgggactttttttagggtaatttttagtggttcccccaaaaaaaaaaaaaaaaaa

SEQ ID NO: 70460 - DNA, 768 bp, Oryza sativa
  Clone ID: PAT_MRT4530_7102C.1
atggggagagggaagattgccatcaagaggatcgacaacacgatgaaccggcaggtgaccttctcgaagcggcgcggcgggctgatgaagaaggcccgggagctggccatcctctgcgacgccgacgtcggcctcattgtcttctcctgcaccggccgcctctacgacttctccagctcaagcatgaaatcaataatagagcggtaccaggaggcaggagaggagcattgtcggttgctgaacccaatgtcagaggctaagttttggcagcgggaggttacaactttgaggcagcaagtgcaaaacttacaccacaacaacagtttttacttgtctgcaaactatttaaacgaaaacagtgcatactactttattaggatcaaccaatatgaaggtgaaaatgaaatcttttttaaggcccatgtggaaattcatgtttcaaataaaaggcaacttttgggagaggaaatctccaacttcacagttagagatctgcagcttctccagaaccaagttgagatgagcctacattccataagaaataaaaaggggtctcttgttcaaaaggagaacagtgaacttcgcaagaagttcaacattgctcatcaacgcaacatagaattacacaagaagcttaactctggagaaagcacgtcaagtgagcaagttaccagaagctcaaaggatcccggagaatcgagtacaccccgtgattcacgtgtgtgtattgaccttgaattgagtcaaaaagaagttgaagatgaataa

SEQ ID NO: 70461 - DNA, 519 bp, Oryza sativa
  unsure (1)..(519): unsure at all n locations
  Clone ID: PAT_MRT4530_71030C.1
ggtttttttntttttnanaaaaaaatttggggggggggggggtnnccccgnnntncnaaaaanaggggggngggaaaaaaaaaaggccannnggaaaaaaaaaaaatttttaaaacaccnnttgggggggggtttttttttttttttggnggggggngaatngggnnnggggnacccnattnccggtnggggggggtngaancncggggtttttttnaaaangggggaanaaaaaaatcccggggggtttttggttgggggggggnttganggaaaaaggggntnctttttttntttaaaggttatttaagggngntnagctaagnngttttttccccnnaaananttngcanagnntttnaaaggttnggtttnacaanattaaacaaaaatcngggggntttcntttgggggnaanttccttttccttttcagattaaaanagntnggggnggtaaattgaaccccatgttccagngacnggacaaataaaaccatttgnttnggcnaaaannaana

SEQ ID NO: 70462 - DNA, 564 bp, Oryza sativa
  Clone ID: PAT_MRT4530_71031C.1
ttatatatggtaatcgcctcgcccatagcggtaatcgccccacctatagttatagtacccaaattctatcttgaacttccaaggtccaacaaggttggtcgcagtctgaacaatagcaagggcatccggaacggcttggcgacattgtggacaccgagcgaatggcgacggcgtgcttcggcaaacgatcggagagcgggggatcgacgttggaagccagtggccggagttggagaagaaaaccccgatctcctcatcgctgcatccccaaccaaggaagataggggcgttgtagagggcggttttcaggatggtgatggcgcaagggttcagccggatctgcacttggaagctttctgtcttggtttcaactgctgagacatgaacgtggaagacgagaaatggttcagggagcttaggggatgtaggcaagttctccatagaggcgtcggtgggggtgaagtggaggccgggctggagctttgccgacgtggcatgaaggagcttccacgacgtcttccgcgtcaatgaccaggtcaatatgaccaaaaggcgcaaggtcat

SEQ ID NO: 70463 - DNA, 868 bp, Oryza sativa
  Clone ID: PAT_MRT4530_71032C.1
aacaatcttagcgaggaaaaagcgagcgcttttttcttatcctgttccgcgggcgcgctggcgcgaccgaacctgggagtgatacttgcgaattacacgatcggttgtggcactatgaatgggcggcgagtgcaaggtccaccagctccaggccgccggcgacgggggcccaggcgccgtcgcgccgttcgtggcgaagacgttccacatggtgagcgacccgtcgacgaacgccgtcgtgcgctggggaggcgccggcaacacgttcctcgtgctcgaccccgccgccttctccgacttcctcctcccctcctacttcaagcaccgcaacttcgccagcttcgtccggcagctcaacacctacggattccgcaaggtggatccggacaggtgggagttcgcgcacgagtcgttcctgcgggggcaggcgcagctgctgccgcggatcgtgcgcaagaagaagaagggcggggcggcgccggggtgcagggagctgtgcgaggaaggggaggaggtgcggggcaccatcgaggcggtgcagcggctgcgggaggagcagaggggcatggaggaggagctccaggccatggaccagaggctgcgcgccgccgagagccgcccgggccagatgatggcgttcctcgccaagctcgccgacgaaccgggcgtcgtgctgcgcgccatgctcgccaagaaggaggagctggccgcggccggcaacaacgggtccgatccctgcaagaggcggcggatcggggccgacacggggcgcggcggcgtggcgaccggcggcgacgcggccgagatggcgcagagcagaggcaccgtgccgttcccgttctctgttcttggccaagtgttctactag

SEQ ID NO: 70464 - DNA, 213 bp, Oryza sativa
  Clone ID: PAT_MRT4530_71033C.1
aagcttttttttttgggtaaatttcttatagtattaaaatcattcgtaagcttcccatttaagtttcctatcagtgtctctcagctaatctcttaagtttcttacaatttaaaatagctaacgttcaatttcaaagcattaatatggacaattcaatgtctgaggtctaactctggtgctgtgggacaaatctcccttccaagctccaagctt

SEQ ID NO: 70465 - DNA, 371 bp, Oryza sativa
  Clone ID: PAT_MRT4530_71034C.1
gtgttctggccactcatgacatactatacccagtcagatattcaggccacggtgggattgtcacagatgaacatacccaactagtggtgcgagaagttctcatggctttaccatttcatatgcttatctctggaggcttgacatgagctacttgctcacgtcgtcttggagacccacagcttctagaggaggctcatgacttccatgctagcagacacagcgcatgtggaggcatcgaatgacatgatgatatgatacaacgtgaatacggcgttctatatcactacgatgttctacataagcgatgaactgtttacatgacatactactatcctgttatccgttgatacactatgtatactactagcatg

SEQ ID NO: 70466 - DNA, 1374 bp, Oryza sativa
  Clone ID: PAT_MRT4530_71035C.1
atggtattccacctcagatccgcgagcgtgccttccagcccttgctccaatgaaaccaacatcgaagaacagctggcgagcctcagggagatcatctgttcaccctctgcaaccatggaaacaatgtgcaatggtttcaggaggcttacagatgtgtacagctgcatggatgagatcatgtgcttgcccagcagccaagctagcctttgcaagcatcagcagaggagagaagtggagaaagagctggagcggtctctcaccttgcttgacctctgcaacgccatgcaagagagcttctctgagctcaaggcaaccacccaggagatgcagttggccatcaagagaggagaagatgcagcagttcagaccaatgttcagtcttacacccgcctgaccaagaaggcacataaacagtgcaagaagatcaacaagaagcctgctagttcagctgatcaggagagctgcagggtggtcaagctgatggctgatgccagagagatcactttctcagtgcttgaatcaactttgcatctcctgtcaaagcagattgcggtgccgagttccagcaagtggtctcttaaggcattccagaagacaagggttacatgccaggaggagcaattacagatgctaaatgctgtgagcacagcaggcaagccagtgatgcaatgctgcaagatcagtgagcagattctaccagataagaaacacggtgaacttgccgccaataatcaggacatgacagcattttcaaccatcgagacgatgagcagtggctggaagaagcttgggagtatctacaactgcatcgatgagatcatgtgtctgcccagcagccaagctctcctttgccaaccactgcagaggaaagcagtggagcaagagttagaaggctctctcgtcgtgctagacctctgcaacgccattcacgagagcttttccgggctcaaggcatgcatccaggacatgcagctggctgtcaagagaggagatgatgcagctgtccaagccaagatacagtcttacatccgcctcgccaagaaggggcgaaaacagttcaagcatatcagcaagaagtcttcttcagcagatcaggagagctgcagggtgatcaagctgttggctgaagctagagagatagctctgtcaatgctcgagtcgtcatcacatctcctgtcgaagcagattgctttgccatgctctagcaaatggtctcttgtctccaagacattccagaaaagaaggcttgtctgcgaggaggagcaattgcaggtgttggagttagacattgttgatctagagactggagtcgagaatctgttcagaaaatcaatccagagcagagtttctcttctcaacattctcagcttgtag

SEQ ID NO: 70467 - DNA, 210 bp, Oryza sativa
  Clone ID: PAT_MRT4530_71036C.1
atggggagcaggggcggatccaacgtgagtgcaggggggttcgagtccccctgcacccacaagatctatggatacccctggagcacccccttcaattttttcaccatgaatgataaattaaaggccccaagcattcgcggtggcctgtggcctgccttccggctgagcctcaccggccacggcaagaaactgcgacgagctgattcatag

SEQ ID NO: 70468 - DNA, 369 bp, Oryza sativa
  Clone ID: PAT_MRT4530_71037C.1
gtgagaggcgcgctgggaaactatcttctccggaaataactatctcctcctcctcctcctctccccatcagctccgccgctcgccgccggccaccctccccccttccatggtacaccatgcttctggcggcggcaactgccacagcagcgccggtgtcgtctagctctagcttcttcgccgcgacgacaagagccaccaccaccacccgcttcactgcccagctccagctctcgctgccacgccggtgccgatcctggtggggcaatgggaaagcgcgccggagcagccgccggcgcagccaccattgctgggccggtggcggcgccccgaccccggaggaccacatggacgaagctgccgccgggaga

SEQ ID NO: 70469 - DNA, 278 bp, Oryza sativa
  Clone ID: PAT_MRT4530_71038C.1
atggcgacggacgggcgcgcgtacgtcttccctaatcccgatagaacagaagatcgcccctgccaaacctgcacagcggcgtcgccatgctgctctcaccgacaacttgctgctggggctcgacgtccgtccaccatcgccaccgccaccgccggccgggtgagctctagatcgagctcgtcgcacgccggtgtgaagaaattaggaaaaggtggtgaggatgctgacacctgggtcccacatatctcttcaggttcaggggagctgccatgtgacat

SEQ ID NO: 70470 - DNA, 139 bp, Oryza sativa
  Clone ID: PAT_MRT4530_71039C.1
ttacagaggacggtatttaggccggagggcactggaaatcatccatatgttatagagttcatctgagttgagccatatagttccctccggtttcctagttcgttattactagtctgtccatcagctcgatcatgctaag

SEQ ID NO: 70471 - DNA, 486 bp, Oryza sativa
  Clone ID: PAT_MRT4530_7103C.1
atgagacacgtggggctaaagttcgtcgcaaggcggagtcggccagccccagccgacgccggggagacgacgacgtacgacgtggtgttcgacgaccgcgggggcgtgatggagatccccgccatcctgatcgacgacgcgagacggccgctgctggcgaacctgatcgcgttcgagcagagccagggcggcgaggtggccaggctcctgagcagctacgtggcgctgatgagccagctcatcatgacggcgcgcgatgtcgagctgctccggcggcgcggcgtggtggagaacctgttggacaacgacgaggaggcggcgcggttcttcaaccgcctgggcgacatcgacccggtggactacgacacgcaggcgttcgcggggctgtacgaggacgtgacgcgctactgcgggacgtggcgcaacaggcacatggcggggctccgccgcaactattttgccagcactggacaccgcgccaattaa

SEQ ID NO: 70472 - DNA, 305 bp, Oryza sativa
  unsure (1)..(305): unsure at all n locations
  Clone ID: PAT_MRT4530_71040C.1
gcagttgcagcagcagcagtntcttcttgcagagaaagaaggaaggaacacgaaggaaggaaggcngcgacgtcgagatngtggtgctggtggtcnncacnacntccgacgncgcgtcgnccactccggccgncgcgttcctcgccatnnccngctggaccnccngcccctccattccggacngcgtggagagcttcgcanacngctcnngggtncggctnctgcggcacggcgctggaatcgtngaggaggacgacctggacctgcggtnggaggccgccacgggtgagcgcgtctcctaggtt

SEQ ID NO: 70473 - DNA, 459 bp, Oryza sativa
  Clone ID: PAT_MRT4530_71041C.1
ctagccttgatgtaatcctggctgtccattgttccttagatccgaaggaagcctcctggatagtcgccacgttgttgatccgagctctccacgttgcgcgccctcgtgcgatccgcgtgattccacttcaagccaatcagcgtgcaccgatccgcgtcgtgctcctccaagccaacgcatccgcgccacgcgtcccagagagcgcgtgcctgctcctctcacgcctgcgcgccaccagtccgaagccgccacgtcgccgttcctcccaccgagccgcttctgtgcatttgctgagccgagctgggccgtcgtcatgtctagggcctgctcggcctggccttcaccatcttgagtcagcaacgtgcttaggccgggttggttcggccttccctgccaaccgaactgccagcccacaagcctagtggccagctcctgttggtctccttgccattcaatcat

SEQ ID NO: 70474 - DNA, 604 bp, Oryza sativa
  Clone ID: PAT_MRT4530_71042C.1
cgctttttcctcatccgcctcgccccgcagaagaaggagggacccgcaggcggtagatcccatcgggattcccgtagccgtagagtctccaggcagtctcaccctcctcctcctcctcctcctccagcgaagtcgacggtgaattccacgcgacctccgaggtccgagaatggcgccaggcgagggtgccgccgcggaagcagaacagaccccttccttctttttcttgggagggacgacctctctctctttgaaaggaaagttctctacaaaaggcccacgcctgtcacgcccagattctgggaagtattacaatctgatatttggaattttttgtcccatggctatttcggtcattatgataaaattatacaatactaacggaagctaactagacgacgatggtatgttatagaagttaagcaaagtgctatagcatattagaacttgacaaacctagtgacatatttagaataaggacaaaatcaataacacacgatggattctctatatattttatggttgtttagttcattacctatctactatcgtgcgacatttttataaaaagttaaatcttatactaaaagaaaaaaaaaagagg

SEQ ID NO: 70475 - DNA, 849 bp, Oryza sativa
  Clone ID: PAT_MRT4530_71043C.1
ggaagacagcaggtgacacctttgcggacacaccaaaactgccggccatagcccatattcccacaagaagatggcgatcccggtttacagcatcacaagggcagagatcgaggagttctggaggagaaaggagatggaagaagaggagcagcgcctcaccgccgagaaggaagctgcaagaatcaaagccaagacacttatgattgaagattatgcgatcttcgagcaaatgataagggagattcttgaggagggtatcaaaggtgacagcgcaagggcggagagagacatcaccacgaacggcgccgctgccaccaagagcactgagggaaggattggcatcaaagattggtggagaaaaagcacttatgcttatctgaatgaaccagcaatgacatccacggatgagaacggcagaaggaagcacgccatcaaatacatcccacaggagagatgcatgaacttcttctcatcgattccaagtcaacataatactactacttttgcaatcttctaaatgggcaagccaatgataagctgaggcatattggcaaattagaaaatatgcaagtggtatatgcatcagcaatgctatgggtggaataaactacattgtttttaagtgtataagtatgtccaaactgaatggtactttaaagttaatcattttgtaaccttgttgccttgcgtggtatagaaagcaggccattttaacttattattcattgtaaaaaaaacaattttagttggtgcttgcaatgatatatcagaagctattgccaacacttctgtgatggtaaaaaaaaaaaaaaaaaaaaaaaaaaaaaaaaaaaaaaaaaaaaaaaaaaa

SEQ ID NO: 70476 - DNA, 519 bp, Oryza sativa
  Clone ID: PAT_MRT4530_71044C.1
atggacatctctaggacaaatgaaggctacacgagctgcggcccggtagtcgagatgtcatggcacagggccggtgtcctgctgctgggggctcagtcctgcctacctgtcccgggggttccggccgtaggtggggttgggtcgccgtgctccgccgtcgctccagctgtcgccgccgctcgggaagaccgccgtcgtcatcgccaagtcgccgccgtcctcgtctgccccttcgcagccgtcggaacccgccggagcatcgtcgccgtcgtcaacccgaaggtagccgccgcttccttctcgtcgccgtcgccgtccgttccttttccgccgccgttttggtcaccggtgtgttcgccgcgttgtcctctacgtgctggtgccctccgttggtgccgtggtgccgccgttcgccggcgagtgtccgccgcccgagccgtcttcttcgccgagccgccgccgtcgtcggtgacgtcatcgctgacgtcatcgggatcctatcccgtgagccggtcgtag

SEQ ID NO: 70477 - DNA, 343 bp, Oryza sativa
  Clone ID: PAT_MRT4530_71045C.1
ggctatgaacgaaaaacctctcttgtatttagaaccttataagaaaacaggggaaccaatgacccaatagtgacccaccctcctatacacctgttcgtacactcacatttcatccactcatttttttcctcgtttcgaaattaccagtcctatggatcacaacatatcgaactcattgttctcgcctttacaagtctgtgacttactataatgcctgtctctcaagacatccttaaagccacactaaactcaatactcaaactgatctgcatcccccttaactttttccacagtagccccattatcaattgttactttatattcacgaactttctgtaattta

SEQ ID NO: 70478 - DNA, 1089 bp, Oryza sativa
  Clone ID: PAT_MRT4530_71046C.1
attgaaaaaggtcttaaaaagtctcttttggctttgggccgaaagtcggcccaaaacctctcttctctctcctcggcccagccggcccagtccgccgcgcgcgagcgcgcgtccgcccgctgacaggtggggcccaccgttcctttccttctccggccgatttgttagaggggaaatgatctccgggatctcctctaccttttctcctttggaatcttcggttaaatcgttttggaaagctttggaatcgagttcgactcggatcggtttccctctctccaagccgaaggtttccttcgccgttgccgtcgccgtgggccttcgccgccgcctccgagcccccgtcgccaccctcgccttcgcctctcgtcgccggaagagctctagcgccgtgtgccctagcttttgccgtcgccgccgccgctccagccgtgtgccgccgtcgtttcagccgtcgccgtcgctcgggaagaccgccgtcgtgctcgccaagtcgccgccgtcctcgtccgccccttcgctgccgtcggagaccgccggagcatcgtcgccgtcgtcaagccgaagaccgccgccgtttcaacctcgtcgccgttgccgtccgttggtcgtccgccgtcgctttggtcgtcggtgagttcgccgtgccgtccgctacccgttggtgtcctccgttcgtgccgtagcgccgccgttcgccggtgagcgtgcgccgctcgagtcgtctgcctcgccgagccgccgccgccatcggtgacatcattgctggcgtcatcaaggccgtccgccgtgaaccgccgtggtcccgatcgatctcggccgtccgatttggatcggatcaatctcggccgtccgttcgtgtgaaccgccgcccgtgcgcccggtccacccaaaccctagccgctgacgcaataaatccccttttccttgcaatcattcatcagaggaagagttcttcaatgaggctgatggtgtggaggattaggtgtagccttggtcaagctgcctgtggagtggagccgtctgcgccgtttatttattttccgctgcttagaactttattgattgagaggaactatctacctctgt

SEQ ID NO: 70479 - DNA, 318 bp, Oryza sativa
  Clone ID: PAT_MRT4530_71047C.1
atgacgtcaacgatgacatcaccaacgacggcggcggctcggcgaagaagacggctcgggcggcggacactcgccggcgaacggcggcaccacggcaccaacggagggcaccagcacgtagaggacaacgcggcgaacacaccgggctaccttcgggttgtcgacggcgacgaagctccggcgggttccgacggctgcgaaggggcggacgaggacggcggcgacttggcgatgacgacggcggtcttcccgagcggcggcgacagctggagcgacggcggagcacggctgaagcggcggcggcgaaggcaaagctag

SEQ ID NO: 70480 - DNA, 346 bp, Oryza sativa
  unsure (1)..(346): unsure at all n locations
  Clone ID: PAT_MRT4530_71048C.1
ctctccaatctccatatgattattanctccaaacataacanatacaacaacaaagaactaataaacataatacaaaagtggcttaattaattaacaccagtaagagggtaataaaaaaaaacctcaagctaatcactcagctgatagtaaatataatcctgatcccacctaatagctagctagcaagtttcttctcgtttatttcatccttagacatatgatcactatctctccttcatcctgatctagtgatctcctcaacaacacaaaacaacaaatgatcacaaggcacacacaaaatattgctactagtggtacataatactctaattgttgccctcatcaa

SEQ ID NO: 70481 - DNA, 208 bp, Oryza sativa
  Clone ID: PAT_MRT4530_71049C.1
ccctttcaggaagctgccgaggcgtacctggtggttctcctgtcgaggacacccagaccatgctgcggccatccatcgcacaatgcgacgtgacaccatcatgccaccacaggacattcagccatgcgtctgagggagggatccgtcgctcgagagcgcttgacggctttgctgctatgctgctggggaggggctgctcgcgggtttg

SEQ ID NO: 70482 - DNA, 206 bp, Oryza sativa
  Clone ID: PAT_MRT4530_7104C.1
gaattcggcacgagggcgaggtgtacgtctgcctgtgtggttgagcgtgcctgccagcgtgggctgcacgcatggacctgaccaaggtccatggtgtaaattagggcgtagggaaattttgatcaggaggaattgtacagtgttcttgctgattgaggtgttgtttgttgtttcgtcaggaaataaagggaacgttcgatctgtcc

SEQ ID NO: 70483 - DNA, 859 bp, Oryza sativa
  Clone ID: PAT_MRT4530_71050C.1
aaagtcttcttttggctttgggccgaaagtcggcccaaaaccgttctctctctcctcggcccagtccggcccagtccgcagccgcgcgcgcgccctcgctgtcgctgacaggtgggtcccgcttgtcagtcgtcgtcttcctcgggccgaaaccctagtttcgcgccgccgagctgccgtcgccgccgctttccaaatccggccgttcctttccttctccggccgaatcaatagaggggaaatgatctccgggatctcctctaccttttctcctttggaatctttggttaaatcgctttggaaagctttggaatcgagttcgattcggatcggttttccctctctccaagccgaaggtttccttcgccgttgccgtcgccgtgggccttcgccgccgcctccgagcccctttaaaaggacccccggtgtctcctctacccgtcgccaccctcgccttcgcctctcgtcgccggagtagccctagcgccgtgtgccctagctttgccttcgccgccgccgcttcagccgtgcgccgccgtcgttccagccgtcgccgtcgctcgggaagaccgccgtcgtcatcgccaagtcgccgccgtcctcgtccgccccttcgcagccgtcggaacccgccggagcttcgtcgccgtcgacaacccgaaggtagccgccgcttccttctcgtcgccgtcgtcgtccgttccttctccgccgccgttttggtcaccggtgtgttcgccgcgttgtcctctacgtgctggtgccctccgttggtgccgtggtgccgccgttcgccggcgagtgtccgccgcccgagccgtcttcttcgccgagccgccgccgtcgtcggtgatgtcat

SEQ ID NO: 70484 - DNA, 862 bp, Oryza sativa
  Clone ID: PAT_MRT4530_71051C.1
ttaaaaagtctcttttggctttgggccgaaagtcggcccaaaaccgttctctctctcctcggcccagtccggcccagtccgcagccgcccgcgcgagcgcgctgtcgctgacaggtggggcccacccgtcagtcgtcgtctaccttcggccgccgccgcccgaaaccctagtttcgcgccgccgccgtttcccttccaaatcgggccgttcctttccttctccggctgatttgttagaggggaaacaatctccgggatctcctctaccttttctcctttggaatctttggttaaatcgctttggaaagcgtcggagacgagttcgattcggatcggttttccctctctccaagccgaaggtttccttcgccgttgccgtcgccgtgggccttcgccgccgcctccgagcccctttaaaaggacccccggtgtctcctctacccgtcgcccccctcgccttcgcttctcgtcgccggaagagccctagcgccgtgtgccctagcttcgccgtcgccgccgccgcttcagccgtgctccgccgtcgctccagctgtcgccgtcgctcgggaagaccgccgtcatgctcgccaagtcgccgccgtcctcgtccgccccttcgcagccgtcggaacccgccggagctttgtcgccgtcgacaacccgaaggtagccgtcgcttccttctcatcgccgtcgccgtccgttgcttctccgccgtcgttttggtcaccggtgtgttcgccgcgttgtcctctacgtgctggtgccctctgttcgtgccgtagcgccgccgttcgccggtgagtgtccgccgcccgagccgtcttcttcgccgagccgccgccgtcgtcggtgatgtcat

SEQ ID NO: 70485 - DNA, 2866 bp, Oryza sativa
  Clone ID: PAT_MRT4530_71052C.1
atgatcaaggaatatctcacaaaacggaagttcctgttggttcttgataatgcttatttcactgaggaaaatatcttggagcacatgggaattcctcatccccgccagcaaaatattggttcaaaagtaatcgtgaccacaagaactcggaggacagcaggtgctatgtggccacatggcccagatacagtaataatgccacaacctctaacttatgaagagtcatataacctactctgtacaaagattggaaaagatgttggttcttcatacacactagatttaatcaacaattgctatggcatcccactgtcagtcattctattggctggagtattgtgtgatgtaccaagtcaagatacattaaatgagttggtcagaaatgcttgtgtcactctaggatccaaggtatcagtgttccacacaatgcagcgtcttgtgaaattcgcataccatcaacttcctgatgctaatgcaaggcactgcttcttgtactgcttactcttccctgaggatcaaggaattccagtcaatgacttaatccgtttctgggtaatggatggtctaatcacacaatctattgaatttcacgaggctagctgtattggaaaggaaattcttgatgtccttttaaagcgttgtatgctgtatatggatggtaatgatcacgtacgtatgcatgatgtgattagagagactgtatcaggatttggaaaggtaaacggttacagagagcaacatgacttcaagtttggtaatcctgcaagaaaattagagtgtctggccaagttaagcacaagagtttcactaatgagtaccgaaatggaatatcttgatggaagtgtacgatgcttctggcttacatcattatttttaagaggaaaccgccatatgaaatatatatcagaagaactcttttgccatatggaaatgcttgggatactagacctctcatttactggaatcaagatactaccgcgttcaatctcctgtttgactaggctccgaatattgttactcatgggctgtgatcacctggaagaaattcagcacatagcttcattggcacagttagaggtcctggatgcatctagttgtcgttccctgaggagtatagaatctggatcatttggccatatgggaatgcttgggatactagacctctcatttactggaatcaagatactaccgcgttcaatctcctgtttgactaggctccgaatattgttactcatgggctgtgatcacctggaagaaattcagcacatagcttcattggcacagttagaggtcctgaatgcatctagttgtcgttccctgaggagtatagaatctggatcatttgaccatatgatgttgttaaagctccttgatctttccacaacttccatcaaatgcttgccttctcttccagcttccagggagctttgccacttgctgctgcagaattgcccatatgtggggtctgagaacaccatcaaatcagatggcatactctctgatacagaactcatcaggtttccttacggagtgtccaaaactggtgctatccagaatttgcagctaggcagaataggagatttatcggatttgatggctatgctgtggttgccttgcggactgacttttcagctgtgtgatatgttcaacatgggagtactatttagcgataacgaggatagcaaaacatttgtttatgcgagtgacacttatttctttcactccttgaaaaaggactctccattatggttgaatggttttcaaaggtttcagattatcatctctcctctgaaggatgaccaagccttggatactgatgcacaactaatgaaggcagatttcatctttcggagttcctactttaagacaaaacactttacacattccattgatcttgataagtttcttgaaataaacggtacctttgatgttccttccgaaactgagggcattcttggtcatgctgaactggtatcattaaagagattagcgaccaccaggtcttcagacctgaatattactagtatggaagcagttcgagaactttggatagagaattgtagccaactggagagtcttctctcagtagatgaaattgagattttgtctgcatggggcaacttgcacaatctatggatctccaacctagaaaggttgtcatcccttttggaaggggtgaaagatgtggttagtttcagttgtctgaagcacttgctcattgattgttgtccaaatctcaagtggatctttccttcaatggtatgtcttccgaatcttgaaacgatgcatgtaaagttttgtgacattctggagagggtatttgaagatgacagtgtcttgggagatgacgctcttccaaggctgcagtcactggaactgtgggagcttcctgagctatcctgtatctgtggtggaactttgccgtctctgaagaatctcaaggtgagaagctgtgcaaagctgagaaaaatccctgttggcgttgatgaaaacagtccatttgtcacgacgataggagaaacattctggtgggactgtttaatctgggacgacgaaagcattaagcgttggatactgttcagaaagtgggggccaatgctaccatatcttgcaactgaaggatgaagatgcatccgattccgggctgaacatttctgctgattggtggttctcaacacgaggaatatggaagcagcagctccaaggattcgacacaattgagaaaaacaacagtgaacagatatccaaaagcacatgagcttctgtttagcaggcccatatattaagttgtactatatggttttatcaaagaacatcactcttatttggaaaatttatgataaatgtggacggttaattagaagtt

SEQ ID NO: 70486 - DNA, 870 bp, Oryza sativa
  unsure (1)..(870): unsure at all n locations
  Clone ID: PAT_MRT4530_71053C.1
atgacgtcaccgacgacggcggcgactcggcgaagaagacggctcgggcggcggacactcgccggcgaacggcggcaccacggcaccaacggagggcaccagcacgtagaggacaacgcggcgaacacaccggtgaccaaaacggcggcggaaaaggaacggacggcgacggcgacgagaaggaagcggcggctaccttcgggttgacgacggcgacgatgctccggcgggttccgacggctgcgaaggggcggacgaggacggcggcgacttggcgagcacgacgacggtcttcccgagcggcgccgacagctggagcgacggcggagcacggctgaagcggcggcggcgacggcgaagctagggcacacggcgctagagctcttccgacgacgagaggcgaaggcgagggtggcggcggaaagagaagggcatggggatccttttaaaggggctcggaggcgacggcgaaggcccacggcgacggcaacggcgaaggaaactcgcggcttggaaagagggaaaaccgatccgaatcgaactcgattccaacgctttccaaagcgatttagccgaagattccaaaggagaaaaggtagaggagatcccggagatcatttcccctctattgattcggccggagaaggaaagaggcggccggatttggaaggaaacagcggcggcggctcggcggcggcacgctagggtttcggcccgaggaagacgacgggcctgacaggtgggacccacctgtcagcggctgcaagggcgcgcgcgcgcgcggccgncttcggactgggccggctgggccgagaagagagagaaggcggttttgggccgactttcggcccaaagccaaaagaagacttt

SEQ ID NO: 70487 - DNA, 858 bp, Oryza sativa
  Clone ID: PAT_MRT4530_71054C.1
atgacgtcaccgacggcggcggcggctcggcggagcgaacggctcgggcggcgcacgctcaccggcgaacggcggcgctacggcacgaacggaggacaccaacgggtagcggacggcacggcgaactcaccgacgaccaaagcgacggcggacgaccaacggacggcgacggcaacgaggttgaaacggcggcggtcttcggcttgacgacggcgacgatgctccggcggtctccgacggcagcgaaagagcggacgaggacggcgacgacttggcgacgacgacggcggccttcccgagcgacggcgacggctggaacgacggcggcgcacggctggagcggcggcggcgaaggcaaagctagggcacacggcgctagggctactccggcgacgagaggcgaaggcgagggtggcggcgagaagagaagagcacggggatccttttaaaggggctcggaggcgacggcggaggcccacggcgacggcaacggcgaaggaaactcgcggcttggagagaggaaagccgatccgattcgaactcgaatcaaactcattccaaaccgattgagccaaagattccaaaggagaaaaggtagaggagatcccggagattgtttcccctctaacaaatcggccggagaaggaaaggaacggccggatttggaaagcggcggcgacggcagctcggcggcgcgaaactagggtttcggcccgaggaggacgacgactccgacaggcgggacccacctgtcagcgacagcgagggcgcgcgcgcggcggactgggccggcttgggccgaggagagagaagagaggttttgggccgactttcggcccaaagccaaaagagactttt

SEQ ID NO: 70488 - DNA, 1561 bp, Oryza sativa
  Clone ID: PAT_MRT4530_71055C.1
tttttttttttttttttttttttcgtggaagagataagtatctttcatcttcgtattttaatagcatcacagattacagatatccaaaaacctcaatacatccaagagctcaggacaggattaaaatgcagagaatttcagcagattgcaaatatgtaggatctttttaaggttaagtctagagaattgcataagcgaaaaactaagcaatcccaacaagtctaggaagacggtccagggcctagcagcaatggtggatccttcttggcgctctcagactctgaatcttctttgggaggtggccttgatgctgcccaagcgcgaagcggcggctcaaacatgctgccaacgacatccggtggtggctgttgaggtgcatcctctccaggaagcacaacaagacccttctccctgagagacgacggctcgttgtaacactccttccagagggagtccacaagctgtcgctcctcacgatgtgcggagagatcgtcggcatccattgtgctgatgccttcgattcggctcttaaggacatctttcagcttgtcttggtcaggtagcacgtttccagcaccggatgtattgtcccgcgccagctcgagaagaccacctaaggcagcctcccggactccagaatcatcactcgatgccaggtgcatcatcagctttggaagaccaagctctgtagcaacactcctatcagccttgttgtcgtgcagtaggtactgtaggagatggagagctttcctctgaagtctagcatcatcagaaccaagagcgtctctcagtgcagagtagccatttcccaggcggaatgcagcaactcctggctggttatgacgaattagagatgatattgctccaagagcttttgtgcgtgaattcgtgcttgcatcggaactgaagtttgtcaacagtggctccaggccattagattccatgacaagttgctggctcttggggttattttgcacaatcgtgctcacaacctctgcagcctttgctctgatgccagcatgtgaatttttcaagtaaccaagtaggggatctaatccaccaatagagtgcagatcatttgccatgtcaatggattcaacatgctcctgtaactcatccaacatatcttcgatgttctctggagtcacaccttgagactgtagtacatcatctggagttttcatcacttgggtgatctccttcatcctcttaacaacatccattgtattagcttgcattgcctccataaaccatttcttgtcctcctcactgagcgagcgcggcttggcggtgccgtcgccatgggcgaggctccacttgagcaggccgttccagtcgggccctcctccgtccttggccatctcctcctctaccaactccggcgagggttcacggcgagacagttggttcaggcgtcggtgcgcggcggcgggaaaagacgaagcagcacaagcctcctcctcttcctcgccctcgtcctcccccttttatgggagggagaggtctcctcctctcgtcagtcgaggcgtcgtcgagagagacgggggacgcgacggcggag

SEQ ID NO: 70489 - DNA, 858 bp, Oryza sativa
  Clone ID: PAT_MRT4530_71056C.1
atgacgtcaccccggcggcggcggctcagcggctcggacggctcgggcggcgcacgctcaccggcgaacggcggcgcgaggacgcaaacagagagcaccagcacgtagaggacgacacggcgaacacaccggtgaccaaaacggcgacggaagaacagcggacgacgacggcgacgagaaggaaacggcggaaaccttcgggtcgacgacggcgatgctgctccggcgatctccggcgacggcgaaggggcagacgaggacggcgacgcgatggcgaacacgacggcggccttcccgagcgacggcgacggctggagcgacggtggagcacggctggagcggcggcagcgaagacgaagctagggcacacggcgctagagcgattccgacgacgagaggcgaaggcgagggtggcgacgggtagaggagacaccggggaggcttttaaaggggctcggaggcgacggcggaggcccacggcgacggcaacggcgaaggaaacctcggcttggagagaggaaagccgatccgattcgaactcgattccacgaattccaaaacgaattagccgaagattccaacggagaaagggtagaggagatcccggagatcatttcccctctatcaattcggccggagaaggaaaggaacggccggatttggaaaggaaacggcggcggcgcgaaactagggtttcgggcggcggcggccgaaggtagacgacgactgacaggtgggacccacctgtcagcgaccgaacgcgcgcgcgcggcggctgcggactgggccggctgggccgaggagagagagagagcgggttttgggccgactttcggcccaaagccaaaagaggacttt

SEQ ID NO: 70490 - DNA, 858 bp, Oryza sativa
  Clone ID: PAT_MRT4530_71057C.1
atgacgtcaccgacggcggcggcggctcggcgaggcagacggctcgggcggcgcacgctcaccggcgaacggcggcgctacggcacgaacggaggacaccaacgggtagcggacggcacggcgaactcaccgacgaccaaaacgacggcggagaagcaacggacggcgacggcgacgagaaggaagcggcggctaccttcgggttgtcgacggcgacgaagctccggcgggttccgacggctgcgaaggggcggacgaggacggcggcgacttggcgatgacggcggcggtcttcccgagcgacggcgacagctggagcgacggcggagcacggctgaagcggcggcggcgacggcgaagctagggcacacggcgctagagctcttccggcgacgagaggcgaaggcgagagctgcgacgggtagaggagacaccgggggtccttttaaaggggctcggaggcggcggcgaaggcccacggcgacggcaacggcgaaggaaactcgcggcttggagagaggaaagccgatccgattcgaactcgaatccatcgatttccaaaccgatttagccgaagattccaaaggagaaaaggtagaggagatcccggagatcatttcccctctattgattcggccggagaaggaaaggagcggccggattggaaggaaacagcggcggcggctcggcggcggcgcgctagggtttcggcccgaggaagacgacggctccgacaggcgggacccacctgtcagcgacagcgagggcgcgcgcgcgcggctgactgggccggctgggccgaggagagagaagagaggttttgggccgactttcggcccaaagccaaaagaagacttt

SEQ ID NO: 70491 - DNA, 1725 bp, Oryza sativa
  Clone ID: PAT_MRT4530_71058C.1
atgggctgcgtgcacggccgcccctccacctccagccccgccgccgccaacgcctcacgtcgccgcgaccacccgcctccgcctgcggaggcgcagaagcagggggcggatgcttctgcggaggcggatgctgctgcgggcgagaagggcgagcagccggccgtcgccgtcgccgcggcggggccgccggtgaagagggagcggcgctcgcggtcgtcgaggtcggcgcacgcgcacgcgcacgccgaggtgcgcatcggggggagcttcgcgaacaaggcgcgcggcgagcaggtggccgcgggctggcccgcctggctctccgccgtcgccggcgacgccatcgacggctggacccctcgccgcgccgactccttcgagaagatcgacaagatcgggcaaggcacgtacagcaacgtgtacaaggcgcgggactcggtgagcggcaagatcgtggcgctcaagaaggtgcgcttcgacaacctggagcccgagagcgtgcgcttcatggccagggagatcctcatcctccgccgcctcgaccaccccaatgtcatcaagctcgacggcctcgtcacctcccgcatgtcctgcagcctctacctcgtcttcgactacatggtccacgacctcgccggcctcgccgccagccccgagatcaagttcaccctgccccaggtcaagtgctatgtgcaccagctgttgtcgggattggagcactgccacgaccggggggtgctgcaccgcgacatcaaggggtcgaacctgcttttggacaacaatggcgtgctgaagatcggggactttggtctcgcgtcgttcttcgacccgaaccataagcagccgatgacgagtagggtggtgacgctctggtaccggccaccagagttgctgttgggcgcgacggattatggcgtaggcgtggacttgtggagcgcgggatgtatccttgctgaattgctcgcagggaaacctatcatgcctgggcggaccgaggtggaacagctgcataaaatttttaagttgtgtggttcccccacagaagaatattggaaaaaatcgaagttgcctcatgcaactatattcaagccccaacaaccttacaaaaggcgaatagctgatacattcaaagatttcccacaatcagcactgcgacttattgaaacactacttgcaatcgacccagctgatcgtttaacagcgacttctgcgttagaaagtgaattctttaaaacggaaccacatgcatgtgatccatcaagtttaccccaataccccccaagcaaagagatggatgcaaaacgaagagacgaagaagccagacgtttaagagctgctggtggtagagttaatggggaaggagctaggaagacaaggacaagggaaagacctagggctgttccagcaccggaagcaaatgctgagcttcaagcaaatattgataaaagaagactaataacacatgcaaatgcgaagagcaagagtgaaaagttccctccgccacatcaggatggcgcacttggatatcctttgggttgttcaaatcatatggaacctgcatttgagccgccagatccatcttcattcagcactgtgttcccctacgagaaaggctctgtgcctacttggtctggaccattggccgatccttcttcaggcaaccagaagcgaaaacacaagtctggccgctcttcaaaacaaccggctaccgcccgtgctcgatga

SEQ ID NO: 70492 - DNA, 607 bp, Oryza sativa
  Clone ID: PAT_MRT4530_71059C.1
gcacgaggcctcgtgccgaattcggcgcgcggggcacaccactgcatcacccctactctctcctcccaaaaccctaacaatggcttcccgcctcctccacctccgccgcctcctcccctccgcccgcccgtccgccggcggcggcggcggcggcggcggtgcggtcgccgccttctcaaccgtaaccccgaccccgcgcgtctccgcgctcgtagacgagatctgcggcctcaccctcatcgaggcctcctccctcaccgacgccctccgcggccgcctcggcgtcgaccagctccctccgctggccatcctcaccggcggcgcggccccgctcgctggcggcggggcggccaccggggcggccggcgaggaggcgaaggcgaaggaggagaagatggcgttcgacgtgaagctggagggcttcgacgccgccgcgaagctcaagatcatcaaagagctgagggcgttcacgaatctgggcctcaaggaggcgaaggagctcgtggagaaggcgccggccgtgctgaaggcgggagtccccaaggaggaggcggagagcatcgccgagaagatgcgagctattggcgccaagattgttctcgaatga

SEQ ID NO: 70493 - DNA, 735 bp, Oryza sativa
  Clone ID: PAT_MRT4530_7105C.1
atggggcggctgaccttagtggaagttatgcgattcgggcgtgagggcacgttatgtcgtgggcagcagcagcagcagcagcaggaggtggggcagtctgcgacggtcggcggcggcggcttccgcgacggcggcttctgcggcgcggccttcgatggcgcggtctgcggcgttgttggcggcggctcgccggccgttaccgtcctcaatgtgaaggccctcgtgccggtcacccacgatctcgccatcgacaactgttctaggtggcgcagattgtttctcatggtcctcggcaagtatgcacttgccaaccacgtgctcgtcattgctcctcgtctcagatcaagaggcgtgctctgccgttgctgccccgcgggccttccctgcctcggcgacacctctcaccaggccgacggtgggcaggaggtcgctggggtgaggaggtccgacggccggccggggatgcggcggcggcgatgtggtggcggagacacctgggagaaggcagcactggtcggtggcgagcccgacgcccacccaggacgctgcccggcgtcggcgctccaccgcgacggcaaggaactcctcgtcgacggctgcagcttcactagggattgtgcggtggcttcaccttatgcagctcacctggattcttcctccgccggcatccagcttcatcaccttgctgtcgacgttcaaggcaggccatgggacaaggacttgattgctttttag

SEQ ID NO: 70494 - DNA, 177 bp, Oryza sativa
  Clone ID: PAT_MRT4530_71060C.1
atggattccaaggccaacgtgcaaggcatccggccgaccaacccggcctggatctctctatcagccggtcatggcgtcacggcgtcatgccatgccacatgggtccatggttcatcggctctgatccgaggcggcgtcggcgacttctactgcgacaagctcgcatcctcgtactag

SEQ ID NO: 70495 - DNA, 330 bp, Oryza sativa
  Clone ID: PAT_MRT4530_71061C.1
atggagggacctttccacagcaacctcttcggaggtcgaccacaatgccgccgcctccgccacggcgtccaccaaggcccccacgccacaggagcagaggtggagggcaagggacgccaagctgtccgtgctcgcgtcggccacccgccctgtgaccgcccgagccgccgtgttctaggggccgtcggacgtgtcgtcggcggcgggcctgccgccttgaggggcttcatcaacatcctcatcttgccgccgcactcgcggcacccatgcttccccgaccatgatgccaccacctccgccacggcgttcgccgaggcccctgcgccatag

SEQ ID NO: 70496 - DNA, 524 bp, Oryza sativa
  Clone ID: PAT_MRT4530_71062C.1
tttttttttttttttcctcaatcgttccgatcatttctctcattcccttttgtttgtttggtggggccccgggttggttcgtttcctcctcctatctacgcaattctccgtcttcgttcgtgatcatcttaggcgaaaggataggtatcaattttgtggaggggcggctgtgaaagggcgattcccccttttccattgaagtagggaagggggtgattgatcttttttgaatcaggccttactgaccaagtggtggtataagcttcattgcggatgaaaagaagtccttgtgagcggagctacaaaaggaagttcaagctcaagaaatcctctcaatagggattgggcaagcaagctgtttgtttatttgatcttacccggttgtgagacgggacgtgaagtcaaccaagtacatgtgtgttcatagtgtccccggcaaccttcctcctagctgagtatggatgctgaagttagctggagtgccgtggtagatggaactcctatttaccgcatttcttcttgca

SEQ ID NO: 70497 - DNA, 984 bp, Oryza sativa
  Clone ID: PAT_MRT4530_71063C.1
atgacgcgtccgaggactcgccctccgcctctgctcctatggcgcaggggcctcggcgaacgccgtggcggaggtggtggcatcatggtcggggaagcatgggtgccgcgagtgcggcggcaagatgaggatgttgatgaagcccctcaaggcggcaggctgcgctggcgggagagggggaagaggaggcctgcgagccggttgccaccgagtcgcagccgcacgtgggcaagaacacaacgccgcaccccgccgccgacgacacgtccgacggcccctagaacacggcggctcgggcggtcacagggcgggtggccgacgcgagcacggacagcttggcgtcccttgccctccacctctgctcctgtggcgtgggggccttggtggacgccgtggcggaggcggcggcattgtggtcgacctccgaagaggttgctgtggaaaggtccctccatggcggagacacgcggtggtgggaggcgcatcacgcgcggcatagacgggaatggagagggacgtcaccagaagagcaggaggaggagggtcgacaaccccgccggcccttgcgaccgggtgatagacaaattgagggagggagaggtggtggtgtggaggcgaggatggcttgttggaggggagactgtggtggctagagtcgctgaggatttacggatgacgatttctggttcagtcaggcgatcgcaggatgaccttgactcgtcgaagcaaaacttccggatgcagcttcccggaattaagcacacattctattccagggaaatgatccatcagaattcagacgtggtacatgccgttggcgctgctgttcctgcagtacttggctttaagaaacagaaatttatgaaactctgttcaaacttttgtggtagtctcgccgacgcattctctgaactctcatggacagacgggcaaacacttgttcgagatctgcaggaaagaaagggcttggtgttcatcgaatag

SEQ ID NO: 70498 - DNA, 189 bp, Oryza sativa
  Clone ID: PAT_MRT4530_71064C.1
ctcgcggctctacgccggcctcagctacgcctgctacgcgtcatcggccacctccccgtccaccaacggccacgttcgtcttctcccgcgcggcgccgccgccgacgacctgtacgccacgggctgcttcacctactgcgccgagctcacgccgacggcgcgccgtgcaccgggacgggttgttgccag

SEQ ID NO: 70499 - DNA, 378 bp, Oryza sativa
  unsure (1)..(378): unsure at all n locations
  Clone ID: PAT_MRT4530_71065C.1
attttggtanagctaatgttggnctgaaaagaatccaggatancttctaaattaancttttttgtttgagatgatgatcatcattttgtcatagttaatgtcgatggtgatgattttaaaacaggaaaanctaagtattttcgtcgattaattaattcaactagaaaaagaggagatttgaataaacatcaaatctgatgctaggttggcccaaatatcatanccaagcaatctatcgtattggtagagtataaattaagcatgaaatatgnaaatatgtactttgtatttccagcatggtttgcatgcaagatctttttgcagtacattaaataattcaaccaatctacacgatgattaaaaaaaaaaaaaaaaaaa

SEQ ID NO: 70500 - DNA, 2382 bp, Oryza sativa
  Clone ID: PAT_MRT4530_71066C.1
atgaattccctcactggtgagctaccggagactatatcatcatgttccctccttgagattgtcgacctgtttagcaactccattgaaagtgagatccctccaagtattggtcaatgttcatttcttcagcaaattattcttggcaccaacaatattcgtggaaacatccccccagatatcggtttgctttccaacctttctgcactgttcattccacacaatcagctcactggcaccatcccacaacttttagggagtaacaaaccacttatatgggtgaatctccaaaataatagcctaagtggggagataccaccttctttgttcaatagcactaccacgtcttacatagatctgtcatcaaatggtctttctggatccattcctccattctcccaagctctttcgtcactccgataccttagtttaactgaaaacctcctctccggtaaaattcctatcacacttggtaacattccttcactgtctacactgatgctttccggaaacaaattagatgggaccattccaaagagcctaagtaatctttctaagttgcaaatactagatctaagtcataacaacttatcgggcatcgttccaccaggactttacacaatctcgagtcttacctatctaaactttggcgccaatcgtcttgttgggatacttccgacgaacattggctacacccttccaggactcacaagtataatatttgaaggatccttgtctgacttgacttacctagatttaggtggcaataagcttgaggctggagattggtctttcatgtcttcgctgacaaactgcactcaactaacaaatttgtggttggataggaacaagctgcaaggaataataccaagttccatcaccaacctttcagaaggcctaaagattccaactagtcttggtgagtgccttgaattagaatcagtccacttggagggaaatttcctacaagggagcatcccaggatcttttgccaacttaaaagggatcaatgagatggatctttcccgaaacaacttgtctggtgaaatcccagacttttttgagtattttggatctttacacactctcaatctatctttcaataatcttgagggacctgtccctagaggaggcgtgtttgctaattcaagcaatgtgttcgtccaaggaaacaaaaagttgtgtgcaatttctccaatgctacaattaccactttgcaaggaactttcatctaaaaggaacaagacatcctataatcttagtgtaggaattccaatcacttccatcgttatagtcacattggcttgtgttgccatcatccttcagaagaacagaactgggcggaagaaaatcatcatcaatgattcgatcaggcattttaataaactctcatacaacgatttgtacaacgcaacaaatggtttctcttcaaggaatcttgttgtttggtacctagcagtaccagtacctggaggtaccaattgttggactgtaaaaattctcataaaaggtcaattgaagtttggagcttgcaatgttgcaatcaaagtatttagacttgaccaaaatggagcaccgaaaaacttttttgcggaatgtgaggccttgaaaaacattcgccaccggaatcttataagagtgatcaacctatgctcgacatttgatccatcaggaaatgaatacaaagcacttattttggaatataggattaatggaaaccttgaaagctggatccatccaaaagtgctcggtcgaaatcctacaaaacatttgagtttgggtttaagaataagaatcgccgtagacattgccgtggctttagactatcttcacaatcgatgctctcctcctatggttcattgcgatctgaaaccaagcaatgtccttttagatgatgaaatggttgcatgtcttagtgactttggacttacaaagtttcttcataacaacattataagcctaaacaattcatcaagcactgctggactgagaggatcaattggatatattgctccagagtatggcttggggtgcaaggtctcaactgagggtgatgtatacagttatggaattattgttctagagatgatcacaggaaagtgcccaaccgatgagatgtttaaggatggcatgaaccttcgtagcttagtggaatcagcatttccacataagatcaatgatattttagaacctactatcaccgaacatcacgatggcgaagactcaaatcatgttgtgcctgaaattctaacatgtgccatacagctggctaagcttgggttaatgtgcacagagacatcaccaaaagatcgaccgacaattaatgatgtttattatcagatcatttccatcaaagaaaaatatcatgcactgatcaatcactga

SEQ ID NO: 70501 - DNA, 214 bp, Oryza sativa
  Clone ID: PAT_MRT4530_71067C.1
acgcccactgcgtacggaggcgcttgggaagctttaaccgagtattaaacgaaggcttgtagaactactcagcggttatgacgaagaagctgctggagctgtacaccggcttggacgccgcctccaccgtcgcggacgtcggtggcggcatgggcacatctgtgggagcaactatgacctgccacacgtacattcggaggatcaactacgacct

SEQ ID NO: 70502 - DNA, 1533 bp, Oryza sativa
  unsure (1)..(1533): unsure at all n locations
  Clone ID: PAT_MRT4530_71068C.1
atggacgccgccgcgagggaagcgcaggtgcagggcagtctggaatggcgggtgacggtgccggagggctcgtcggtgacggtggagcacgaggccggcgtcgccgagagggcgtgggcgtgggtggtgaggatgctggtcgcggtcagggcggcggtggccggcttcgccaggaaggtgtggaagatcggcgccgacgatccccggagagcggtgcacagcctcaaagtcggcctggctctcaccctcgtctccatcgtctactacaccaggcccgtgtacgacggcgtcggcggcaatgccatgtgggccgtcatgacggttgtcgtggtcttcgagtacaccgtcggtggatgcatgtacaagggattcaacagagccgtcgcgacggcgagcgccgggctgctcgcgctcggcgtgaactgggtggcggacaaatccggcgacaagctcgagccgttcatcctcagcggctccctgtttttactggctgcggcggccaccttctcgcggttcataccaacggtgaaggcgcggttcgactacggcgtgaccatcttcatcctgacgttcagcctcgtcgccgtgtcggggtaccgcgtcgaccagctgctggacctggcgcagcagcggatgtccaccatcggcatcggcatcgtcatctgcctcgccgagctgcacctcctcacggtgcgcaacatggagaagctcgccggcgccgtcgagggctgcgtcgaggactacttcgcggcgaagcccgccgcggccaagtcggaggggtacaagtgcgtgctcaactccaaggcgtcggaggactcgcaggccaacctggcgcggtgggagccgccgcacgggcggttcggcttccgccacccgtacgcgcagtacaccaaggtgggcgccgcgatgcgccactgcgcgtactgcgtcgaggcgctcaacagctgcgtccgcgccgaggtccaggcgcccgagcacgtcaagcggctgctcggcgacgtgtgcacgcggctggcctcgcagtgcgcgcgggttctcagggaggcgtccacctcggtcgccgccatgaccagccccaagacgctggacttcgccgtggcggacatgaacacggccgtgcacgagcttcagggcgacctgcgcgcgctcccgcccgtcctggccttggaaccggcggcggagatgtcgctgatggacgcgatgccgctcttcaccgtggcgtcgctgctgatagagatatcggcgaggatcgagggcgtcgtcgacgccgtcgagacgctggccagcctcgccagcttcaagcaggtggaggatgatgacgacaagaagggacaaaccgagatgaaagtgcacccgctgaacgtgccggatgatcacgacgcgtcgacacatgaaagccagactacaacgaagcaccctgaacaggtctaaactntaaaaacgtccatcaaatcaaaccgcacaaaatcaaccagcgggacgagtcagaccggnaagacacacngatacatgattgaatctaaactggctgag

SEQ ID NO: 70503 - DNA, 388 bp, Oryza sativa
  Clone ID: PAT_MRT4530_71069C.1
tcttttaatatattttttttttttatttgcttgtgttttttttttaatctattttttcttctttaaaaaagtttgtaacctttatttagtactgatttcgaacagaatcaccaccatgtgttatacttgaggggttttatttttttttacgcggatactagttctaaattacattactctgagggctggttttcggactaattcgataatcctgggtagtattgttgttgaaatctaggagggaaggccccgggctcttttcccctgaaggtcttgaggctttgggcttgttcccttgggatgcgatacgcattagcgactacattaactggcaaggcacggaatactgagtttttccctgcaaggtggctgaccaaggcgttagcgt

SEQ ID NO: 70504 - DNA, 564 bp, Oryza sativa
  unsure (1)..(564): unsure at all n locations
  Clone ID: PAT_MRT4530_7106C.1
ttcgcgccctaattgaattgtgattgtgtgggcgccaacaatagtgtgtctgnatggaaatgtatgtgatgtgtgatgtgtgacccaggaattttgaatggcgtgggttgtgtgggtgtggccacgtggtgaaaatgatgaagtgttgacatatgatggtgcccacgtgggtgaaatagaatgnatggtgaaatgtaggggatgtgtccatgtcgcccacccgaccaccanagtgtggtgatgggctctgtccatgtgtgggtgtgtgaccatgtgtgatgtggccaccatgtgatgtgatgtgtgggtgtgcatgtggtgaaatgtgaaaatgatggggctgggcgcgataaatgaaagtgagggaggagacccatgatgaacatgctgtgccctgaccaatgtctgtgctgggtgatgggattnaccatgctgtttgctgtgttgcctgttgctgttttggntgtttttgggtttaaccaagtgtatacttgnacatctacttatacccattaaagaaatcttgggcttgatcgtcccccccaaaaaaaaaaaaaaaaaaaa

SEQ ID NO: 70505 - DNA, 318 bp, Oryza sativa
  Clone ID: PAT_MRT4530_71070C.1
atgaagttaagcatgaaacgacccccgtacaaccgtacttctcgtgtgagtctttccccctcaggagcgccagaactcctctcactgctagaaaccttggacgcctagagtgcatgaggactaaagttcatggagcgggtactgccaaagtgaggttattgaaaggctttgtcgtggcaagtctcattcgttgggacgtaggcttatgtgttgggcaagtcgcggagtatgggtaaagtgtacatccactacagtatgagtgttgaagagaagcccttgtttgtacgcttgcgtacctaacaagatgatcggagtgcg

SEQ ID NO: 70506 - DNA, 447 bp, Oryza sativa
  Clone ID: PAT_MRT4530_71071C.1
gtgttgggtttttttttttttttttttttttttttttttttttttttttttttgggtttttttaaaaataaataaaaaatttctggatgggataaaaacacacacaaaattaaggggcaaaaataaatgcacgggtgaaaatggaaatggaggggcggggggggggtactaaaaagggaaaaaagggacgttggggggaacaatttagatagggggggggggataaattgccggggaaaaaattgggggggtatgccacaactttattgggaacggggatggcaaattggtcaaaaagggtttcaatggggccctttgcgggaaaaaagggctggacaaaaaaacccaaaatggaaaaaatgggggggggggcggtcttgagctctttaaacttgaactcggcaaaggggttaaagtcgtcggagaggccaaacgggttaaaaggcc

SEQ ID NO: 70507 - DNA, 438 bp, Oryza sativa
  Clone ID: PAT_MRT4530_71072C.1
atgaagctaagcatgaaacgacccccgtacaaccgtacttctcgtatgggtcttcccttcccgggagcgccagaactcctctcactgctagaaaccttggacgcctagagtgcatgaggactaaagttcatggagcgggtactgccaaagtgaggttattgaaaggctttgccatgacgcgtctcatgtgttgggatgaggctcatgtgttgggcaagtcgcggagtaagggtaaagtgtacatccactgcagtcagagtgttgaagagaagcccttgttagtacgcttgcgtacctaacaagatgatcggacttctagtgacaaagaacgagtccaatcctcactaaagcctgaagactacagcatcggtctaaatcacttaaagcaataccctgcaaatggaagctgccatctgactacggcaagacggaaggcaa

SEQ ID NO: 70508 - DNA, 1248 bp, Oryza sativa
  Clone ID: PAT_MRT4530_71073C.1
gaactagtggatccccgggctgcaggcgccctctccctctccctctccctctccctcttccgccaagcgccactgcctacgcctacgcctccgccttgccctagcgccgtcttctccacctacactgccgttgcagtcatcgctggcgaccgtaggcatctggatccggcccccatatggtcggggcacgcagatctgacttctcgtgtcccctcctccctctgactgctcgtgtcccctaggggcgtcgtcggtggcggcgctacgaccgagccccacggcgacgcgaagtcccacgccgcggagtgcggttgcggtgcagggtaggggagcagcggcgtcggtgagaggggtgaggtggcaggccgggaggaggaaggggaaggggagattggtcggggtccggtgcgacgccgccgtcaccgagaagcccgccgaggaggaggaggcggccagcgaggagttcgagtaccagactgaggtgcatgatgagtccgcgtctccgcctccccctcgcgccggcgccccctcccccttcttctccctctccttgtggtggcataggggtctgaggatgcttcggggttgaggatgttgctggtgctgtggcgggctggcggccacgtcatctgacaacggcggtaatgtgtgacggctgtgcagcactcatgagttcgcgcgtccgatcggggggtgccagatttgggcaggccgacggcatttcaccacctctgcctactcccatgcgagcaccgtcgctgcatcctccccataagactatacaagctgcaaccatctcctatacaggccatagcatcccttcctcctcataataagcagcatcctcctcactccattcccttcctttggtctctccgccaccgctgacatctcctgttgcaatacctggtgttctagaggatggttgggcgaattcgagggcgaattcgattgaagggggaagaatgtaatgctccgagtttcgaattagtatatttgggggaatattagcacaaacgtgcaaaatttcagtttttaaaccgttgttcgaataggcgatcagaaaccgtggatgcgtagagctcgccgagtagtataaaatagactataagtttttagtaatcggagtccgaacgaagtcccagggtttaaaaacaatgtgggccgttagatcttttcagtctctttatataaccaaccaaaacaaaaacgaaaaaaaaagaaaaaaaacagcaattttgctatata

SEQ ID NO: 70509 - DNA, 423 bp, Oryza sativa
  Clone ID: PAT_MRT4530_71074C.1
atggtgaggcaggtcagtgatttctccatccgcatcaccggtctagccaacaacatccgcgtcttcggtagcaacctccctaaagctgatttgcgatcacgacctaggaaaaatgttcgaggagaacttgtaggggttcttcaccacatcagctttgggggatcgtcgtccaacatgcagatgctatcggcgaggacagttcatgcgtggcacgacccatgggatggcggccagcgcaggactatcctgctagtagttcacctcctcgtcatcgtcaggctcaacggtctgccttggcctgataaggaccgggtattgacgttggcacctgactccttcacgaccacgggaggaaaaaaagctcgggctcgtgagctcagctttggcttggctcgagttttgtttgtttggctcggctcgtaa

SEQ ID NO: 70510 - DNA, 486 bp, Oryza sativa
  Clone ID: PAT_MRT4530_71075C.1
cgcaccttgaatgcgcgcaaaatgtatgccgatagattgaaacgggctctttatacaccataggcaccgggaactaaattcacgggatcatcacggccgaagaacacatcacactgtgtggatggacagagggctaaacaaattgcgagcggcaatgaacacaaaaaggacgtctcttgaagagaaaaaaaaaactgacacggatcgctaaagactactggcctcggtgcgccttaccaaaccataaatacagacatttgcggagatccatgacgcagcccacgccacggttgtgaatgttttcgtctctgtcttgggcaatgtggtggacgaaaacatggaaaacatggtctgagacttaaccgcctaattaatcgacgacgagagatgtttggttgaagccaactaaacgactggtggctacatcgtgaacatagccatcgtactcggcgtattcttttgaacaacggggggactgaggatgat

SEQ ID NO: 70511 - DNA, 467 bp, Oryza sativa
  Clone ID: PAT_MRT4530_71076C.1
cgcacgcgtgggctctgcctctgcagcttcttgctcccgatccaagcctacggggcgggcacgaggaccaccctacgatccctgggccactagcaggtacgattcctacgatgcccccacaaccgcgtaggcgcagcgtcgtcgaatcggagattcggaggaagggattggaactgtgcgctggtgtgacgatttgccgagcacaggatgcagtgctcgatgcagaatatggtgctgctcccgcagatctactaggacgcgagggtgtactgcaacgatgagcatgtgctggtgaccgtgcgaaccaagccatactacacggcgtacgtgtgagtggagaaccactcctactacgtgggatacacgtgggcaatggtcgtcatggacagtcacatcgagaagtctctcaagaagtggagccacatcaaggagtactgacccgaggaccagcggatgtagatgcaccc

SEQ ID NO: 70512 - DNA, 454 bp, Oryza sativa
  Clone ID: PAT_MRT4530_71077C.1
tcttgtacaagcactccatcaaaactaagctagctactacaagtcctagggcttttgctacctatagctagctagcttccggtcagaagaagctaaggagaattagaagctatgtctacctagcttggaggaagaagaagaagaggaggagggattgcggcgcgatcgatcgacacgcgtcgtctaccgataaattcctcgcaaaatcaatcgatatcatatcgatcgagtctagaggtgatgagatcagatgtgaagtacttgaggagctgatttggtgataggatcgatttaattgctagctgaggtgatcatcatcaaggagaagaaagagatagtttatttgctactggggatcagtgtgtttgcatgggggataggccatggcagcagcagctgcagccacatgatcagcaggcggcttcttgctcagtcacggccgggatgatgatgc

SEQ ID NO: 70513 - DNA, 704 bp, Oryza sativa
  Clone ID: PAT_MRT4530_71078C.1
acgctgacgtcagcaacggcggccggctcgggttggagagctcgccggagctagagaggtcggccgcggaaacggagggcatctacgcgtagaggacaacgaggcgaacccattggtactcaccacgacaacaaacggtgcgcgacggcggccggcgacgagaagaagcggcgcggcggctcgggtcgacggcgacggaggggctccggtggtcggcggcgaaagaggaggggcggccgagcttcctctcaccacggcgcacctaacggcggcgacggcaagcggcggcgacgacggagacggcgcggcgacgatgccgaagacggccggcggcggcggcggacttggagcacgtcgcggcggcgctaggaggcacgggagaactcgggagagggggcaaacgaaagaggacgatgaggggacgctttatatggcattggatcgaagagatcgagctccaaacgagaggaatcgatttgggaagaaatcaaactcggttttagggataaaatcaaaacgaactcgattcggatcaaatcctcaacgattctctttgattcttgggggaaaagaaagaggagaacgagaggaacaaaacccctctaacaatcggaagaaaccgggtcggatttgggcggatttggcggcgcaaaacggcgactcagacggcttgcgcggcggcggccggaggtaggggacgaccc

SEQ ID NO: 70514 - DNA, 187 bp, Oryza sativa
  Clone ID: PAT_MRT4530_71079C.1
acgcgcgattctcggacaccacgcaccgatttcggcaccgcgccgggccacgctggcgcgcgggcggagggaggagcgtgtgcatgagggatcgccgcgcggcgcgcgcgggcgcgtagggcagctgtgctggactgccatcagcgcgagagaggaggcgcgcatttctttaatgggtgtttttatt

SEQ ID NO: 70515 - DNA, 6792 bp, Oryza sativa
  Clone ID: PAT_MRT4530_7107C.1
atggcctggctcggtctcccttcctgccgccccacgcccttgccggagccatccctccaccgccgccgaagagaggggcaccaccggggagaaccacgcctcactgacggccagatccgccggtttcgcttcccgctggtcgtcggcaccggatccgcgccgcgacgcctcgccaccggaatccgcggcgcgacaccttgctggcggcgtggagccagggagaagggcggcgacagcactggcgggagcagcagcaacagcagcagcgaggaggatgaacgcgatgtggcggcgcagaggatgagtgacatgaaccacgtctccgatgacccgaagcacgtcggcgtcgggaagccggatgtggacgtgccgaacgacccaatgtcggacaagggggtgacgatctccggcacggtgaagcggcggaaggaggacgtggcacaacgcgtgccgacggtggcggcggcggcggtgccgggcgacatgatggcgaaggtccgggaggcgcccgcagtcgtcaatggcttctccacggcgtccagctcgcaccagaggttggccggcaaggtggccgtcatcaccggcggcgccagcggcatcggcaaggcgacggccacggagttcatcaagaacggcgccaaggtcatcatcgccgacatccaggacgacctcggccactcggtggcggcggagctcggcccggacgccgcgtacacgcgctgcgacgtcgccgacgaggcgcaggtcgccgcggccgtgggcctcgccgtgaagcggcacggccgcctcgacgtgttccacaacaacgccggcatcgccggggcgctgccgcaggacgacatggcggccgtggacctcggcgacttcgaccgggtgatggcggtgaacgcccggtcgacgctcgccgccgtcaagcacgccgcgcgcgccatggcgccgcgatgcagcggctgcgtgctctgcacgtcgagcggcgcgggcgtcatccccgtcccggctgtcccggtgtactccgtgtccaaggccaccgtgatcgccatcgtgcgcgcggcggcggagccgatggcgcgccacggcctgcgtgtgaacgccatctcgccgggcgccacgaggacgccgctgctgctgcggcagatcccgctgctctccgagatgtcccctagcctgagcgacggcctgaagacgacggtggagaaggaggtcggcgagggtggcgccgtcgtgctgctcgcgccggaggacatcgcgagggcggcggtgtacctggcctccgacgaggccaggtacgtgaacgggcacaacctcgtcgtcgacgccggtggactcttcaccactccatcagctcagttcgattcagctctgcatttgctacattctgagcaggatgttcagagcattccaactcctcagacgcaatcgcccacgtggcctggcaccttcggggacgtcgggcccgagggtgagggggctcggcgtgtgttctctgagctctcatactcttccgtgtgcgccaagtttcccttgttcagcctaatggccgagcaagcaaaggcgcacgacttctctccgagtgtgagcggcgacgacggggagccaaacccgcgtcatcgagctcgtactcccccacctcctccgcgccaaagtcctaagcggggggaggcgctcgagagggttgaaaaacccacagcatcaccagtcgcgggtggtgcaggagaacggcgagatggggagcgtcgcctcctcgtctacggcgacggcagcacgccccagggagtgcttcaggctgctggcgcgctcctacgtcacccgcccgtcgtccctgacccggagtctccagcccggcgatggctggacgacgtggccaacttggtcatgacggcacagcagcgcctgggtgctggtggacggtccgccactaccaggacccccggcgccgccaccaccggctctgtgtcatcaaggcggagggcgcggcgagcggcggctgctgcacgccattcggctaccactccctcgtcggcgcctccgactcgggaggatcagcatgaagagccggatgcccgcctcgacatcgagcgccgacgtagtgatcggcgtgctccccgcgcaacggagggtgcctcttcgtccagggtgtcacctcgacatggacgtgaggatcagccctccgtgcccccggttggtggtgttggctgtagagcctttgtggcgagtcttcggaatgtccgttggcccccaaggttccggcccaccatcaccgagaagtatgatgggagcgtcaaccccaccgagtttctccaggtctatacgaccgggatcgaggccgctgggggagacgacagggtcatggcgaatttctttcccatggccctgaagggacaggcgcggggttggctaatgaacctgccacccgcgtcggtccactcctgggaggatctgtgccagcagttcaccatgaactttcaaggcacctatccacgcccagggcggcgtgacaggaggaggaagaaaaggtcggtccattccggcgacgagggtcacgtcctcgccgtcaaaggcgctccgcgggccacccgaaaggggaggcctgcgagcgacaaaaagaaagaggcaggtactcccagcagggagcgcccagccagcaagtggtgctccgtccacaacacctccctccacgatctcgcggactgtcgcgcagtcaaaaacttggctgagcgaacgaggaagtgggaggaggacaggaggcaggaacgccgtgagggcaagtccgcggcaattccctccggtaaacggcgaagtgaggccagacagaaggcccccgccgttgacatcgatgacggtgatgatgacctaggtttccaagaacctggggccaccattgccactgtcgacgggggagcgtgtgctcacgtttctcgccggagtttcaaggccatgaggcgagagcttctcgccgcggcccctactcatgaggcgacgcgtcgggcgcggtggtcggaggtggccctcacctttgaccagaccgaccacccaccgtgtgttgcccggggagggcagattgcgatggtggtttcccccaccatctgcaatgtgaagttggggcgtgtcctcatagatggaggagcggctctcaacatcctttcccccgcggcctttgacgctatcaaggccccggggatgatgctccagccgtctcaaccgatcattggtgtgacgccggggcacacatggccgttaggtcacatcgacctgccggtcacctttggtggatcagccaacttccgcacggagcgggtgaacttcgatgtggcggacctcagtctgccctacaacgcggtcctggggaggcccgcgttggtgaagtttatggcggcggtccactacgcttacctccagatgaagatgccgggccctggtggccccatctctgtccgtggcgaccttaaggtcgcgctcgcttgcatggagaagcgcgcggaccacctcgctgctgcgaccaagcccgagggtggtgacgagaggcttggcacctccgcccccaccgccccgaggcagcggattgccacatgcgacgaggtcccggaagacgcgctcgtctccttcctgcgggcaaacgctgacgtcttcgcatggagaccagcggacatgcccggggtccccagggaggtgattgagcaccgtctcgccgtgcggccgggcgcaaggccggtccggcagaaagtgcggcggcaggctccggaacgtcaagccttcatccgcgaggaggtggcgagacttctggaggccggattcatccgtgaagtcatccatccggagtggctggcgaacccggtggtcgttcccaaggcgaacggcaagcttcggatgtgcatcgactacaccgaccttaacaaggcatgtcctaaggatccttaccccctgcctcgcatagatcagatcgtcgactccactgcggggtgcgaccttttgtgttttctagatgcatactctggttaccatcagattcgcatggctagggaggatgaggagaaaactgcgttcattacccccgtaggaacctattgttatacatcaatgcccttcgggttaaagaatgcaggtcctacttttcaacgtactactcgaatttctttgggtagccaaataggacgtaatgttgaggcgtatgtcgatgacttggttgtaaagacgcgcaaccaagagaccttactctcagatctagcggaaacttttgaaaatctccgctccgcccgcataaaactgaaccccgataagtgcgtgtttggtgtgcctgcgggcaagcttctcgggttcttggtctctgcccgaggcattgaggccaaccccgagaagatacgagctatagagcggatgcgcccccccagcaaacttagggatgtgcagtgcgtcactggttgcatggccgccctaagtcgttttatatcgaggctgggagagaaggcgctacccttatttaagctcctcaagcgctcggggccgtttacttggacggaggaagctgaaaatgccctcgcccagttgaaggcgtatctcagctctcctccggttctagtcgccccggagccaaatgagtccctgctactttacttagcagcgaccccccaagtagttagtgcagcgttggtagtggagcgcgatgaggacaatcctcattctacgcacccccactctgtgccgacttggcccgggagcaggcagggaggagaggcccccgagtcgaacggtggcctaaggcccccgacgaccggagtcggccctctgcccgcttgtcagacggtgctgggtgcccccgaccctcaggaaggccccgaggccactgcgggaaggccgcacctaccaccctttgaccccgaggctaaccctgtgctgattcgacccgggagagagcagggagaagaggcccccgagccgaacggaggcctgaggcccctgacgaccggagctggccctttgcccgcttgtctgacgacgccaggagcccccgacccccaggacggccccgaggccactgtgggaaggccgcacctgtcatcttcggaccccgaggtcatcagtgcaggagacgagtgtgccccgagaggccacttggacgaagagcaccccggggatacggcccctagcgaagaggatcggccccgccgaaaggtgcagcggcctgtttactttgttagtgaggccctccgggacgccaaaacccgataccctcaggcccagaagatgctttacgctattctgatggcctcgaggaaactgcgccattatttccaagcgcatcgggtcactgtggttacgtcctaccccctcggccaaatcttgcataatcgagaaggtaccggacgggtggtaaaatgggcaatcgagctttctgagttcgatctgcactttgaaccacgccacgctatcaagagccaagccctcgccgattttgtggcagagtggaccccggctccggagaccgtctcaatccccgaggccagcgcggacccctcacagctgcctcacgccgcccactgggtgatgcaattcgacggttctctgtctcttcagggcgccgagtacgagggactccttgccggactcagagtagcagctggactggggatccgccgcctcttggtgttaggcgactcccagctggtcgttaaccaggtctgtaaggagtaccggtgctccgacccacagatggacgcctacgaacaaggcgttgagcttcttgttgacatccatgagggcgagtgcggagcccattccgcctcgcgcaccctggttggcaaggcctttcgtcaaggattttattggccgacagctctcaatgatgcagtcgatctggtccggcgatgcagagcgtgtcagttccacgccaagcaaatccatcagccggcccaggccctgcagatcataccactgtcatggccatttgctgtctgggggcttgatatcctgggaccgttcaaacgggccccgggcgggtttgagtatctgtatgttgcgatcgacaagttcactaagtggcccgaggcttatccggttgtcaagatcgataagcactctgctcttaaattcattaagggcatcacggcccgttttggagtacctaaccgtattattacggataatggcacccaattcactagtgaactcttcggcgactactgcgaagacatgggcatcaagctctgcttcgcctcacctgcccaccccagaagcaatggccaagtggagcgcgccaatgcagaaatcctcaaaggccttaaaaccaagaccttcaatattctcaagaagcacggcgattcatggatcgaggagttgccagcggtgctctgggcaaaccgaaccacaccaagccgagcgaccggggaaacgcctttcttcctcgtctacggcgcagaagcggttctcccattcgagctcaccctgaggtctcctcgggccaccatgtactgcgaggctgatcaagatcagcttcgcagagatgacctcgaccacttagaagagcgaaggcggcgcgcggccctccgagccgcgcgctaccagcagagcttgcggcgctaccatcagcgccacgtccgggcccgatcactctgcgtcgacgacctcgtcctacgccgcgtccaaacgcgtgctggattgagcaaactctcaccaatgtgggagggtccgtatcgagtgatcggtgtcccccggccgggctcggtacggctggccacgggcgacggcacggagctgcctaacccatggaacatcgaacaccttcgtcgcttctacccctga

SEQ ID NO: 70516 - DNA, 755 bp, Oryza sativa
  Clone ID: PAT_MRT4530_71080C.1
ctggggttggggttttttttttttttttttttttttttggtttttttttgaccaaatatactttttcccatatatcttatataaataacatatattcaaaaccatgctttgcatatagctccacagcaatattttggagtacacatgtatgccttattttgccactagcccattacaaaaaaataaccacagaaaattaattaatagaaaattaattaatggttcgctcgaacatggagcgatctcttttaagacataattatttagaggttcataattccaatatgacccaacacaagagtatgcatgcctgttacttagagttggatgccactcttatattcagagccggcagtaaagctttcagggatgacatcatcgacgacacggtagccaccgttcttgacaaggaagcgaacggagaaggggcccttgagtggtgcatcacttttgagtgtccaggtgttagagcccgactccttgagccccacccagtccttgccgcctttctccttgacctccacctcagagatggcgacgttggtgacgagctctagactagtggcgctagagccctcagcaaccttgaaggtgagctctgtggcatgtgagccaatgaccaatagtgcagccaccgccacggcaagtcggaaggaggacatggaggccattggctagctagctagttttttggtgtaatgtttcttgtttcttgcttggtagaggcggacgcgtgggtcgacccgggaattccg

SEQ ID NO: 70517 - DNA, 192 bp, Oryza sativa
  Clone ID: PAT_MRT4530_71081C.1
atggagcacccgtcggccgcggctgtcgacgatgacggtgacgaccggcctgcccccatcgccacatcgacgacgtgcggtggactgacgcggtggagcggacacgccgtcgtagccgtcgaggaagacctagctcaacaaggcgtcggagacctcgtcgccgcttctgccagctacttgattccgctctag

SEQ ID NO: 70518 - DNA, 615 bp, Oryza sativa
  Clone ID: PAT_MRT4530_71082C.1
atggagaagaactggagagctcagctagagctggaggaggtggtagtaccagttccctactggtaccagtggtggcttgatcacttcaaattggagggactattgggccaaattcctctactgaatcttgggagagaaactacggattgggtgggtcaccttcttctccttgagcttgttggggccgaagaggttgaggcactgctcggcattggtggaggtgagccagccggagacggcgatcgacagcgacgacggcagtggcaccgcgaggcggaggaggccggcgagagcaggaggtggcaccgcgatgggcaggcggcggcgccgtcggcgtcggcgtcggcgggggtggagaagagtgttcgcctcctccctttctccatgttcacctcgaagcccacgctcggcggaaaggcgtcggagcgaggggaaggcagaggtgaaggcagtcggagactgcgacacgacggcggcgtcggtggaggtggaagcggcggcgcgagggcgaggcagatgtggacgcggtggcgcgaggcgacggcggaagtggcggcgctcgacggcgacggcgacgacggtggcggaggaggggaggcgggcgacagcggctag

SEQ ID NO: 70519 - DNA, 2454 bp, Oryza sativa
  unsure (1)..(2454): unsure at all n locations
  Clone ID: PAT_MRT4530_71083C.1
atgtccatgtccacggccgcgtcgtcgtcggcatcggcggtccggccgccgccgacgtggggggcgccgtcgcagaggcggctggtggagcagcacctggcgtcgctgccgcgcggcctcccgcgggccgcccacgtgcgggagctccacgcgcaggtgctcaagcagggcctccacctcaacccgcgcgccgcggcgaggctggtgtccgcctacgcgctcctccgcctcctcccgtcctcccgccgcgtcttcgacgcgatccgggacccgcacgccgacgccttcctcgccaacaccatgctccgcgcctacgcgctggggggcgcgccgcgcgacgcgctcgccgcgttctccgccatgccgcgcagggacagcttcacctactccttcctcatcaaggcgctctccgccgcgggcgtcgccccggtccgcgcggtgcactcgcacgtcgtcaagctcgggtccgtcgaggacaccttcgtcgggaacgcgcttatcgacgcctactccaagaacggcgggttctcggacgcccggaaggtgttcgacgaaatgccggagcgggatgtcgtgtcctggaacacggctatggcggcgatggtgcgggagggggagctggctggcgtgaggaagttgtttgacgagatgccagagaaggacacggtgagctggaacacgatcctggatggctacacaaaggcaggggaggtggaggcggctttcgagctgtttcagcgcatgccggagaggaatgtcgtgtcgtggtcgacgatggtttctggttactgcaagaagggtgacctggagatggctcgggtgatctttgacaagatgcctagcaagaacttggtgacatggactataatggtctcggcatgtgcacagaaagggcttgttgatgaggcaggtaagttgtttgctcagatgaaggaggcttccgtggaacttgatgttgccgcggttgtgagtatcctggctgcgtgtgcagagtcaggctctctttcacttggaaagaggattcaccgatacgtgcgaaagaggaatctagggagatcaacccatgtgtgcaatgcactgattgacatgttttgcaaatgtgggtgtgtgaaccgagcggattatgtctttgacactgagactgttcagaaggattcggtgtcatggaacagcatcattggaggttttgcaatgcatgggcatggagacaaggcactggagctctttgctcaaatgaagcaacagggatttaaccctgatgctgtgacaatgatcaatgttcttagtgcatgcacacacatggggtttgtggatgagggccgccggcatttctccaacatggagagggattatggcatcatgcctcagatagagcattacggttgtatgatcgaccttcttggccgtggagggctcatcaaggaagctgtcgacctcatcaaaagcatgccttgggagcctaatgaggttatatggggatcccttctcagtgcatgccgactgcataagaatgtggagtatgcagaaatagcagtgaacgagttgagcaagctgcagccgtcgaatgcagggaactatgctgtcctctcgaacatctatgctgaggctgggcagtggagtgacatggcaaaggcaaggatgcagatgaaaggaactgggtcgcagaaaacagcaggatcaagctgggtcgaactcaatgagacgttccatgagttcaccgtgggggatagaaagcaccaagattcagaccagatatctgagatggttgacagattgagctcgcatgttaagcatgttggctgtgttccagcaggccatgagctgcttgtgcagtgagtcgtttattagggcaatgcatgcttataggctattgcaaatttgggaacctctgcctggtcattaaccttgcngatcatgtgatctgaagaaaggaagcaccattccttgtactgcctgcaatcaagaaggtggtaggacatggtacagaagcttctttgattgagtgaacagccttggatgtgttgaaagcttgaggcattcatcagcttctgcgcatctgccatcaggtttgctctgttaatgactgttaccatgacgacagatgatgatgggggtgactgacaaaacactgacaatggtcggatagttcatggttagggccttcacttcatctggttagacaaaaccgaaacaaaggtttatggttagggccttctgaaaaagcagaagacaggaactcaagattcaacagagcagcatttttctctttccactgcaacagtacaatgttagcgcataagaatagtatattttggaggttttacagttcttgacttcatattttacatgtatcatccttttctaaacgaacgtatgaatgaagaagtatatattgttctatcaaatttcaatgcagatatcttcatgcattgagaacaaaaaaaaaaaaaaaaa

SEQ ID NO: 70520 - DNA, 107 bp, Oryza sativa
  unsure (1)..(107): unsure at all n locations
  Clone ID: PAT_MRT4530_71084C.1
cggccgggnatccttctcatctacgtcaaacattacagcgaaggcataacaactagaatcccaccacaatgaagagggattttcttagtttgctctagcttgatatt

SEQ ID NO: 70521 - DNA, 1365 bp, Oryza sativa
  Clone ID: PAT_MRT4530_71085C.1
atggagacgatccctgtcgagctatggcaagaaatcttgctcagggcatcaaccaaagacgtcgcccggtcatgttgcgtctcgacgcagtggcgcgacatcgttagggacccctccttccggaagctccaccatgacaggcacgccacggcgcacgatgtccccgacgctctgctcgtcgccacatacaacatcgactcgcaaagagtcgccagcgtcttcccggtcgaaccggccgccgtctctccgacgtcgtccacgcgcacggccacggcgcccatctgccgggtcaaccacatggaaggctacaggatcgccaacatctgcaacggcttcctctgcttcgcctcccatagcacagccaaggccatcgtacacaaccccgtcaccggcgagaggctggaggtccccagggctcctcgcctccctcccgaccaagacaacgctcgctcgccggtcacgttcgcgttggggttcagcccgaacaactgtgtttacaagctgttccgcttcaccaaccgcacgatggatgtgtacacgctgggccgcggcgccgaatccaccgggtggcgccgacacgcgcttcctctgcacccgcgcaacctggtagaaagcaagccggccgttgtcatcggcggcaagatttgtatggcgaccatcggccctgcgccgtacaggcacccagccgacaatggcacgcccggcccggtgctggtggtcgacgtcgcgcacgaggagccctgcacgtacagcccaccggactacgggctcccgtgggcggacgcggcggtgagcgtcttcgagctgcacgggaggttgtgcctggccatcaggacagagaggatgatccagttttggacaatgccagttgaagaagacgacgacgaccaaccatggcagcttctctacaagttcaaggtcgtggatgatatccgattcaaccaatttcaaaggctagtgcccatgagtgcttggctcgacggccacaccaacacgctttgctaccgagagggcaacaacgtgtaccgtaagtacgtcggcactaccacggcaacagtacgacgtttttcttcgacaaaggtcgttattatgtcgtgggacagcaaaatctgcctcccggtggcttcatcgtcgttgtcgtcgttccagtgggacatctacgcgggctaccgtccgaccctgctatcgcctctcacctttgcatccgggcaacatgaggaagatgataacaagtgtgatctgttcatccgcagcttactacgcacactgcgatcccaaaaatcacagaaatgccgcccgtctccgacgtcagccggttgcaccaatgccaagagaatttgctgcataaatccacgcggattctaa

SEQ ID NO: 70522 - DNA, 3723 bp, Oryza sativa
  unsure (1)..(3723): unsure at all n locations
  Clone ID: PAT_MRT4530_71086C.1
tttgagtctcaccacacagaggataggagaggagagagggaccgtagcaagaggagtattagtagaggagagcagagagccgaggacttggccaggagagagaaggggtagggggagaccgggagagaggttgcagcagaggcagagccaactgcacaaggcaaggggcacgcagccacgcagtgctcctgcttgccctgcccctgcccacccccacctcctcgctgttctactgctgctctactctggctggcaacgcatcgcgtcgcgcgcccaagcaaaggctccatcaaacacacaccaagaaagaagaagaaaaaaaaatcccccgccacgccgggctgctccagatctctcagccgcgcgcgcgattatgtgggattaggtagatgagggcggcgctgttcggtgccgagaggagcggggtagtggaccacggcggcggcgataaggaggagctgttttggccggcggggaagggggggctggtggtggtggagccgaggtcggtgctggactgcacgcgcagcccgagcccgccgtattccacgtcgacgctgtcgtcgtccctgggcggcggctcggcggactcgaccggtgtggcggcggtttcggagagcagcaccgccgccgccggagccaccaaatggggagccccaggcgagcatggtggcggcgggaaggaggagtggggcggcgggtgcgagttgcccccgatacctggagcactggatgtggggctcgtcgggggcgagggctgggacgccacggccacgctcggcaacgcagccgggccggaccagtcgttcttgaactggatcattggggccgccggcgacctggagcagcctggtccgccgcttccagtgctccagcagccgcttattgacaatgcggggttcgggatcccggccgtggacaccatgggcttctctctggatcaccccctcagcggcgtcgcctccgacctctcgtcctccggtgcgcacactgccaccggcggtggcggcaaggcctcattagggttcggtctcttctcgccggaggccacctccctcgagcagccgccgccttcgatgctgtttcacgaaggtatcgacacgaagccccctcttctgggtgcgcagccgcaatttctcctgaaccactaccaaccccagccacccaaccccgccgcagccttgttcatgcctctcccgcccttccccgagcacaatcaccagtcgccgcatctccagccaccgctcaaacgccaccacgccattccagatgacctctacctcgcccgtaaccagcagcagtcatccgcggtggcgccaggtctcgcctattcaccaccgctacatggcccggctccgttccagctccatccttcgccgccaccgattcgcggggcgatgaagtcgacggcggcggaggcggcgcagcagcagctgctggacgagttggcagcggcggcaaaggcaaccgaggctggcaattccgttggcgcgcgagagatattggcgcggctcaatcaacagcttccccaacttgggaagcccttcctccgctccgcctcctacctcaaggaggccctcctcctcgcactcgccgacagccaccatggctcctccggcgtcacctcgccgctcgacgttgccctcaagcttgcagcatacaagtctttctctgacctgtcacctgtgctccagttcactaactttaccgcaacacaggcgcttcttgatgagattggtggcatggcaacttcctgcatccatgtcattgactttgatctcggtgttggtggtcagtgggcttccttcttgcaggagcttgcccaccgccggggagctggaggtatggccttgccgttgttgaagctcacggctttcatgtcgactgcttctcaccatccactggagctgcaccttacccaggataacctctctcagtttgccgcagagctcagaattcctttcgaattcaatgccgtcagtcttgatgcattcaatcctgcggagatagatttcttcctctggtgatgaagttgttgctgttagcctccctgttggcggttgcggtcgtgcaccagcgctcccagcgattcttcggtttgtcaaacagctttgtcctaaggttgtcgggcctattgttcatggaggtgttcgagcggaccttccagtctcgcagcacttccagtattgtttcgagtcttgcgggttcctggctgactcgcttgatgctgctggtattgatgctgattctgcctgcaagatcgagaggttcctaattcaaccaagagttgaggatgcagtgattgggcggcacaaggcgcagaaagctatagcatggaggagcgtttttgcagcaactgggtttaagcccgttcagctcagcaacctcgccgaggcacaggcagactgcctcctgaagcgggtgcaggtccgaggattccatgtggagaaacgcggagctgctcttacgctctactggcagcgtggggagcttgtatccatatcatcttggcggtgctgatcagccataagcttcactccaccaaggttccaccaccgtttgcaagcatcaaccactccagtaatgtccatttattcttgcaattaaatgttgcaaatgaaattgttgtcttgagctgttgaactcttcatattgcttttcgttgcagcttattagctagcctagtggatttagggtaatagttggttgtcagtctctctagctaatgatgttgctttaggttgttgccatagccatgtcaaggaagtagttttttctcatcgagctcgggtttaagcctgttccccccagcaaccattgccgaggcacaggcagactgcctcctgaagcgagtgcaggtccgaggattccatgtggagaagtgcggagctgctctcacgctctactggcagcgtggtgagcttgtctccatatcatcatggcggtgctgatcagccataagcttcaccccaccaatgttccaccagcgcttgcaagcattgtcaactccagtaatgtgcattttgttttgcaattaaatgttgcaacggaaattgttgtctcaagttgttgaacacctcatattgcttttcatcacagcttattagctaggcctagtggatttagcaatatcggtgtcaatctctgtagttaatgatgctgctttaggttcttaccatgctctgctctattagccattatcatcaaattcaagacactgctgatgagtagagaggataatttgacctatcaaatggttctgtggtacagaattgatatttgcttgctgttgctgtgttatcggagactagaacaccgaggagcgcccgcgggccgagccccggctgcccggggcccgggggtgggggggcggggcagggcgggggggaagggggcggcggtgggtgcgtgaagtgagtatggggcgactgggagccgtcggcgtggccgcccgcgcgtcccccggcgttggtgggtggaggcgtgggggtcgtcgatgcggagagggaaggggtgtcggtgattaggagtgggtggagaagagacgggcgcggcgtgggtgagagagcgtatgggcgaggagntggtcgcgaggtgccgcgggggaggccaaccgggcaagggtggcgggcggcgcgaaggctgggggcgcgttgcttcacgaagggacgtgggcaatggagcgctctaggtctgcgcgtgctgatcgagagctggtgtgag

SEQ ID NO: 70523 - DNA, 547 bp, Oryza sativa
  unsure (1)..(547): unsure at all n locations
  Clone ID: PAT_MRT4530_71087C.1
ctcctccaagatttttgttccccagaaaagtttaccagctgaagatgctttgaaggctccacgttancaccaagtgaaccaaccacaataagttgctagtgctccgcgagggaggtcatcctttcacgagttatctcctgggagggttctgcaattgtaaacgccagctgtgcagctcatgttgccctcaggactggcatcttgcgacatgttcaatatgattctgatcagaatcggaggcttaaaagaagattataaggggaaacctgagtaatctacatatgaaagaagcatgatgaaactttttgtcatgagaatcacttgaaatatgcttgcttagagcctcaaatcaggatcacctttttggctgtgtaagctgtgggttgtgtgaggtggatgtagcttaggctaaatgttactgtgtatttttttttagataatacgttactagtagtatacatttgtgagttctgacttgttcatgtactagttcattacatatattttcgcaggtgcatgctttacccattaaaaaaaaaaaaaaaaa

SEQ ID NO: 70524 - DNA, 2148 bp, Oryza sativa
  Clone ID: PAT_MRT4530_71088C.1
atgagggcggcgctgttcggtgccgagaggagcggggtagtggacctcggcggcatcggcggcggtaacagggggctgttttggccggcggggaaggggggcctggtggtggtggagccgaggtcggtgctggactgcacgcgcagcccgagcccgcgcaattccacctcgacgctgtcgtcgtcccagggcggcggcggggcggactcgaccggtgtggcggcggtttcggagagcagcgccgccgccgccgaagccaccaaatggggagcccccggggaacacgggggcggcggtggcggcggtggcggcggtgggaaggaggactggagcagcggctgtgagttgcccccgataccggggaccctggatgtggggctcgtcggaggagagggctgggacaccatgctcggcaacgccgccgccgccgcagccgggcaggatcagtcgttcttgaactggatcattggggccgccggcgacctggagcagcccgggccgccgcttcttgacaatgcgggattcgggatcccggccgtcgacccgctgggcttctctctggaccactccctcagcggcgtcgcctccgacctgtcgtcctccggtgcgcacaccgcaaccggcggcgcgggtggcggcaaggcttccctaggattcggtctcttctcgccggaagccacctctctcgagcagccgccgccgccgatgctgttccacgaaggtatcgacacgaagccccctcttctgggcgcgcagccgccgggcctcctcaaccactatcaccaccagccgccgaatcccgccgcaaccttgttcatgcctcacccatccttccccgaacacaatcaccagtcgccactcctccagccaccgcccaaacgccaccactccatgcctgatgacatctacctcgcccgtaaccagctaccgcctgcggcggcggcggcgcagggtctcccgttttcaccactacatgcctcggttccgttccagctccagccttcgccgccaccgattcgcggggcgatgaagacgacggctgcggaggccgcgcagcagcagttgctggacgaactggcagcggcggcaaaggcaaccgaggctggcaattccgtcggcgcgcgcgagatattggcgcggctcaatcaacagctcccccctcttgggaagcccttcctccgctccgcctcctacctcagggaggccctcctcctcgcactcgctgacagccaccatggcgtctccagcgtcaccacgccgctcgacgttgccctcaagctcgcggcctacaagtcgttctccgacctgtcgcccgtgctgcagtttgcaaacttcacggcaactcaggcacttcttgatgaaattggtggcaccgcaacttcctgcatacatgtcattgacttcgatctcggtgttggcggtcagtgggcttccttcttgcaggagcttgcgcaccgccgtgctgctggaggtgtgaccttgccattgttgaagctaacagctttcgtgtcgactgcttcccaccatccattggagctgcaccttacccaggataacctttctcagtttgccgcagaccttggaattccttttgagttcaatgccgtcagtcttgatgcattcaatcctggggagcttatttcttcaactggtgatgaagttgtggctgttagcctccctgttggttgctccgctcgtgcaccaccgctgccagcaatccttcgtttggtgaagcagcttagtccgaagattgtggtggctattgaccatggagctgatcgtgcagacctttcattctcgcagcacttcctgaattgtttccagtcttgcgtgttcctccttgactcacttgatgctgctggtattgatgctgattctgcctgcaagattgagaggtttctgattcagcctagagttcatgatatggtgcttggacggcacaaggtacacaaagcaatagcatggaggagtgtttttgcagcagctgggtttaagcctgttccacccagcaaccttgccgaggcacaggcagactgcctcctgaagcgagtgcaggtccgaggattccatgtggagaagtgcggagctgctctcacgctctactggcagcgtggtgagcttgtctccatatcatcatggcggtgctga

SEQ ID NO: 70525 - DNA, 760 bp, Oryza sativa
  Clone ID: PAT_MRT4530_71089C.1
atggcagatgatggtttcaaatatcatgaggaatatgttacaaataaacgagggatgaagctctttgcatgccaatggagtcctttagaccatgaaccgaaagctctaatcttcctatgccatggatatgccatggaatgcagcatttcaatgagaggaacaggtgttcggttgccaaaggctggatttacagtgcacggattggactatcagggccatgggaagtccgaaggacttcaaggctatatcaatagttttgatgatgttgttgttgattgctcgaactactttgcaagtgtttgtggttggtgcagctttgttgcctcgtcccattgtgataacaatcctaagcaagcttagcaacgtgatacctacatggaaaattattcctactgaagatgtcattgataaggcaattaaaagcgaggagtggcgtcaagaggtaagaaacaatccatattgctataaaggaaggcctaggttaaagactggttatgaactttttatggcaagcttggatattgaaagcactcttgacaaggttacactaccattcatcattgtccatggtggtgatgatgccgtcacagatccatcagtaagtgaagaactgtatacatcagctcagagcaaggacaaaacactgaaactgtacccagggatgtgtcacgccctgacatctggtgagcccgcaagcaacattgacattgtatttttggacatcattaagtggcttgatgagagggtatcagtttcataa

SEQ ID NO: 70526 - DNA, 3496 bp, Oryza sativa
  Clone ID: PAT_MRT4530_7108C.1
atgagcaagaaggaaaggggcgctttattctacacccacatttgtcctttgactcatgtcccatccggatctcaaatcctgtggttaggcagttcaactgaaggaaacaaagaaaagtgcgagctggtgcgtcccatgcatgctgctgctgcagttctgcctgtgatgggggcctggatatgcaactatcgtggtagttactggtcagcaaaaatatcgacttcggaatcgatgaacaggcttaggctcctactttgtgcacatgatgagcctccaaacctcagctatggagttcatagtttcatgctcaccttgtcatctccagagttccagcatcctttgatggtatcattggtcttagcaatggctggcaagctgatcagctcctccattgttcttgctcttctacctctgttctgtggcatcctgcttgcaccatcatgtgaagcagccacagtagacacaacatctgccactctcctgcaagtgaagtcaggtttcactgaccctaatggcgtcctctccggctggtcgccggaggccgacgtgtgctcatggcacggcgtgacgtgcctgacaggggagggcattgtcaccggcctcaacctgtcggggtacggcctgtccggcacgatatcgccggcgatagccggccttgtatccgtcgagtccattgatctgtcgtcaaattccctcaccggcgcaatcccgccggagctcgggacgatgaagagcctgaagacgctgctgcttcactccaacctcctcaccggcgccatcccaccggagctcggcggcctcaagaacctgaagttactgaggatcggcaacaacccgctgcgcggcgagataccaccggagctcggcgactgctcggagctggagacgatcggcatggcctactgccagctgatcggcgccatcccccaccagattggcaacctgaagcagcttcagcagctggccctggacaacaacaccctcaccggcggcctcccggagcagctcgccggctgtgcaaacctgcgtgtcctctcggtggctgacaacaagctggatggcgtcataccttcctccattggcggcctgagctctctccagtctctgaaccttgcaaacaaccagttctccggcgtgattccgccggagatcggtaacctctccggcttgacatacctgaacttactcggcaaccgcctcaccggcggcatcccggaagaactgaaccggctgagccagctgcaggttgtggatttgtccaagaacaatctgtccggagagatcagtgccatctctgcatcacagctgaagaatctgaagtaccttgtgctgtctgaaaatctcctggagggaaccatccctgaaggcctctgcaatggcgatggcaatggcaatggcaactcgagcttggagaacctgttcctcgccggcaacgacctcggaggcagcattgatgccctgctgagctgcacctcgctgaagtccatcgacgtgtcgaacaacagcctcaccggcgagataccgccggcgatcgaccggctgccgggcctcgtcaaccttgcgctgcacaacaacagctttgccggcgtcctgccgccgcagattgggaacttgagtaacctggaggtgctgtctctgtaccacaatggcctcaccggcggcatcccgccggagatcggccggctgcagaggctgaagctgctgttcctctacgagaacgagatgaccggagccatcccggatgagatgaccaactgctcgagcttggaggaggtcgacttcttcggcaaccacttccatggcccgatcccggcgagcatcggcaacctcaagaacctcgccgtgctccagctccggcagaatgatctgactggcccgattccggcgagcctcggcgaatgcaggagtctgcaggcgctggcgctggcggacaaccggctctccggcgagctgccggagtcgttcggccgcctcgccgagctcagcgtcgtcaccctgtacaacaactcgctggagggcgccttgccggagtcgatgttcgagctcaagaacctgacggtcatcaacttctcccacaaccggttcaccggcgccgtcgtgccgctcctcggctccagctccctcaccgtgctggccctcaccaacaacagcttctccggcgtcatcccggcggcggtcgcgcggtcgacgggcatggtccggctacagctcgccggcaaccgcctcgccggcgcgatcccggccgagctgggtgacctgaccgagctcaagatacttgacctctcgaacaacaacttctccggcgacatcccgccggagctctccaactgctcgcggctcacccatctgaaccttgacgggaacagcctcaccggcgccgtaccgccatggctcggaggcctccggtcgctcggcgagctggacctctcgtcgaacgcgctcaccggcggcattccggtggagctcggcggctgctccggcctgctcaagctgtccctgagcggcaaccgtctctccgggagcattccgccggagatcgggaagctgacatcactcaacgttctgaacctgcagaagaacggcttcaccggcgtcattccgccggagctccggcgatgcaacaagctgtacgagctgcggctgtcggagaactcgctggaggggccgatcccggcggagctcgggcagctgccggagctgcaggtgatactggacctgagccggaacaagctctccggcgagatcccggcgtcgctcggagacctcgtcaagctggagaggctcaacctctcctccaaccagctccatggccagatacctccctcgctgctgcagctcacgagcctccaccttctcaacctgtccgacaacctcctctccggcggcatcccgggcgcgctctccgcgttcccggccgcgtccttcgcgggcaacggcgagctctgcggcgcgccgctgccgtcgtgcggggcgccgcggcggctgccgggggcggaggtgtcggccatcgtggcggccatcgccgtcgtgtcggccgcggtgtgcgtcgcgctgctgtacataatgctcaggatgtggagcaactggagggccgtcgcctccgtgtcgagctccgacggcgaggagacggcgtcctcggtggcggcggcgcacggcaagtggtgcgccggcgacggcaagtactggaaggtcgggtcggtgtcggtggcgtcgtccgccgccgaagagaagtacagctcggcgtcgtcggagacgaccagcgtgctgcacgggaagccggcggaggcggccggtggcggcgccggcgcggtgaagccggcgagcaagtgctgaacacgacgacgacccaccatggatcgcctcaagctcatcttcttcctgttaattgttgtttctttaccttgcctttgttattgtcatgtgttgttgatcagcgaagcaaaattagccgggaagaacagctttggttttgtatgaaaaaaaaaaaaaaaaaaaa

SEQ ID NO: 70527 - DNA, 666 bp, Oryza sativa
  Clone ID: PAT_MRT4530_71090C.1
atggcgcgcctgagcgctgctcgagctttgcctgcgccgcggcggcgctcaagaggaacaagtccggggaaggcggatattcgccggcgccggggatcggtgatgctgcgcgtgcaccgcgctgatctgggtgtgctgcggcggcgcaaccccgttctgggttgcatcctcgtcggcggcggagggcggcggatcttgcgtcttcgtgcctactcgtcggcgtcggcgaggatctggaggaagccggaggaggggtggatgaagctcaacttcgacgggtcgtcgaagcactcgaccgggatcgcgagcatcggcggcgtgtaccgcgaccacgacggcgcgttcctgctcggctacgcggagcggatcggcacggcgacgagctccgtcgcggagctcgccgcgctccggcgagggctcgagctggcggtgcggaacgggtggcggcgcgtctgggcggagggcgactccaaggcggtggtcgacgtggtgtgcgaccgcgccgacgtgcagtcggaggaggacctgaggctgtgcagggagatcgccgcgctgctcccgcagctcgacgacatggctgtgtcccacgtgcgccgcggcgggaacaaggtggcgcacggcttcgccgagctcggccacagggcggagatcccaaatattgattaa

SEQ ID NO: 70528 - DNA, 214 bp, Oryza sativa
  Clone ID: PAT_MRT4530_71091C.1
aacacgcgtaccacaactcgtgcagctcagcaacatgctacaactccctcttcaaccacaaatgctaggagtgacgcatgtactgcgctatgctggtgactggctacacaacctcaagggatgagagtggaaagctgggatactttcggtgggcatcacgtgtgggcaaaagatcgacaaccgaagcgagacagacggcaagagacatgaacat

SEQ ID NO: 70529 - DNA, 449 bp, Oryza sativa
  unsure (1)..(449): unsure at all n locations
  Clone ID: PAT_MRT4530_71092C.1
ttttttttttttttgggtttttttttttttttttttgggnaaaaacaaaacaaggcggccattaaataatcccgccacatgctttttaagggtttacatctggggtaatcgtagggtttcacaaacaggcctgatcctccatggactagtttttttatgaacaactttttgccttttaaagagggaaaacaggcggttggttgcccaagaccagccttttttagattttgaacagtggcaggttccgaagtttttttcccttattccgagggcaacttcaacagggccgggttgtttgttttacatgccgggggtggccactttgggtgcaaacacaactgggggggaagcctttgggccctccgttaattttttgaatgcatttccataggggccatggttttaataactgtaaacaaaagggccgccaaatgtttgaagagatctcg

SEQ ID NO: 70530 - DNA, 751 bp, Oryza sativa
  Clone ID: PAT_MRT4530_71093C.1
tttagttcaatgtaaacgacgctggggtaaataatctacaagtcatataaggattaagagtgcatgttttcgtccaaaatgcatgcctcagatggtttgtttccacatgatcatagcggtagcaggtatagatagcaaggaagtccgagcccccaggtctgacaaacgactaacaccagacatacattatcaagtgcgctacatctgcacagcagaagatccacagtcttatcctatgttagttaagttctgggacacacttttgcttcagggggagcacgcacgatagtatagtttggtaagagaacagcttcatctactctgttcgtcaccatcatgatgctgtttgcatcttgcagttagcacttaccagttggagacaccaacagccttggacccaggatcttcatggttgcgattgcttggaggactcctacttctatcacgaaagccagcattgtttgttctgctctgatcgctgcctcgagaagagctatagaacctggcatgaaagctgagaccatcaccaggttgatcgttgttgctgctggcatgaaagcttggattgtcactggtttgattgttgctgctgctgttatgaaagctggtttggaagccagaagtatcgccaaactgattgccactgttgctgttatggaagctactatgaaagctagaaccattcccagactgactggccataaccactgttatagttgtcagtcgaccttgaagtatagcctgaatcata

SEQ ID NO: 70531 - DNA, 267 bp, Oryza sativa
  Clone ID: PAT_MRT4530_71094C.1
gcacgaggtgaggatataacctcatatcattttgttttgatcagaacatatccagtgtagcattgatggcatagtccactatttgtggcattgtaacttcatataaattgttaactgcattgtgacatcacaactatgatgcaatattgattaccaccatttctcagtatccagaacaataaagctgtgattatcaaatagttactcaatactcaggaataatttgaaaaaaaaaacataaagctgtaatcatccatataatccttg

SEQ ID NO: 70532 - DNA, 436 bp, Oryza sativa
  Clone ID: PAT_MRT4530_71095C.1
atgtggtcaggactcaacaatgacaacgaatccctgcgactctacaccttgtgtcgcaatggaaacccaacagttcaaacaaaaaaattccaaagcttgaatgcaacccgctcgaatctttccaagcatggcgatctatcgatctatctgcgcatgcactacgggtcgtccacggtacaaatattatctgctaatgccggcgccggccgtgccgggatcgatatgcaccgaggctgccctaccaaaaacgagaatccggccatcttcgtcgtcatcggcgccggcggcggcggcggcggcggcgcggcgccccgaggggggaacatcaggtcgtcggcttcctgcagctaagaagaatcctaggcaacactggcgtgcccagcttggcaggtggcagatcagtcaggcagcgagctgagagcccactgattcagcg

SEQ ID NO: 70533 - DNA, 341 bp, Oryza sativa
  unsure (1)..(341): unsure at all n locations
  Clone ID: PAT_MRT4530_71096C.1
gtcgggggctatcatataataatgtgcaaggtaatgcctaagcataaaaacaacgtagatgctcaatattccaagagttttcaacgactgaaccatcttcacacttgagttgattagaacctggccgagtaacttcaaagatgataaatgctccttcccataatggagataactgggggggggggggcgtagtttgaatccttatggttccgcantttcaaagaggagcgctacgaagatgatcgagtagatgtcctcatccgactagaagaagcccgtgatgcagcattgtttctgtcggcttgtttttttcccggattgtgtcgttttctctctcgctg

SEQ ID NO: 70534 - DNA, 895 bp, Oryza sativa
  Clone ID: PAT_MRT4530_71097C.1
tttttttttttttttttttagagcaaacttcatctttattgaatgaaaataaacaaagttgggatacatttttgaaaattcatcggtgcatataactcgtaaagcaaacaagtatatttcccgatggaaataaatcacgcatcacaccgtgtatagcagtattatatgttaattaccatctatcagaattcagagcaacgtaatcagacgacgtagcattcgtagagcttgatgtccatctgcagccggaagtaggtgaagccctcgaaggcgtcggtgcggagggtggcgacgccgcgggacatgaagaagtcgccggtgccgcccacgacggagatgtccctcgtcttctcggcgatgatgtcggcgcccatgaggttgagcgtgccgcggcgccccgtggagttgaacacgatggagaaggcgaaccacgcgttgaacgcctccttgctgttgtagaggtagaccccctgcgcgcgcaccgccgtctcctccagcgacggcggcagcgccctcccctccgtcatcgggtcgttgaacaccaccacctgcccgaagaaggtgccgccggtcgacggcacggcggtggccagcgccgtcggcttggtggccgccgccgacgtggagttggaggtgctgttgctgtagtcgtagaggatgtcgtggaggtagagcctcatctccttgcacggcttgtcgtagctactactcctgacgaatctccttccatgggcgacgctcgcagagcagctgaggaagatgcaggccgcggcgacgatcacagacgccatggaccatgtcaccatccggccttgcattgttaattatttgcttattatgaacaatcaggagaagctatatagctacgtacttagctaagtgcctgtcaatgctg

SEQ ID NO: 70535 - DNA, 177 bp, Oryza sativa
  Clone ID: PAT_MRT4530_71098C.1
gcgagttgaagacacaggcctatgacttggctggtcaattcaacagcttggctgaacaatgtagacccatcacgtaatgtgacccagcatgcacctgacccccgaccgtaaaatacaggtagaagacataccaacagcgacaggatacaagcgaacaactcataacacagttatacc

SEQ ID NO: 70536 - DNA, 611 bp, Oryza sativa
  Clone ID: PAT_MRT4530_71099C.1
gcacgaggctctgtggtagtctaaaatactcctttctagactggtcttcttaccgcgtgcgtcagtcttttagtattttcctgtcacattaggccgagaagtatttgctgtgagtaaaagcctctttggtaagtgaatgagagtatttcggttgaataggagaatgttgtatgcctcctgctacaacactcgaccaatatgaaacagtacaacacttgtacttgacgtcgtagagagaatccctggagcatctacttggtgaaggcaaaatcgattttttaccagaagaatcgaaccatgctgctgttacaaaatttagtcgttatagcggaacaatgactaaccttctaaattgcttcagccattgaccacccaagacacgtcagatgaagacacagtaacacacgatatttgttaacgaagttcatccgaagcctatatctccggggctctgattatgggcgttcctccccaaccaatatatctctaagccgctacgagtccatggtctcgccgctatcatctccctgcgtgtctatgctatattgtagtcgctatggttacattgtgttgcccccctctctattaaagagagttatcggattacagag

SEQ ID NO: 70537 - DNA, 6093 bp, Oryza sativa
  Clone ID: PAT_MRT4530_7109C.1
atggccgagcaagcaaaggcgcacgacctctctccgagtgtgagcggcgacgacggggagccaaacccgcgccatcgagctcgtactcccccacctcctccgcgccaaagtcccaagcggggggaggcgctcgagagagtcgaaaaatccgcagcatcgccagtcgcgggtggtgcaggagaacggcgagatggggagcgtcgcctcctcgtctacggcgacggcagcacgccccagggcgcgcttcaggctgctggcgcgctcctacgtcacccgcccgtcgtccctgacccggagtctccagcccagcgatggctggacgacgtggccaacttggtcatgacggcacagcagcgcctgggtgctggtggacggtccgccaccaccaggacctccggcgccgccaccaccggctctgtgtcatcaaggcggagggcgcggcgagcggcggctgctgcacgccattcggctaccactccctcgtcggcgcctccgactcgggaggatcagcatgaagagccggatgcccgcctcgacatcgagcgccgacgtagtgatcggcgtgctccccgcgcaacggagggtgcctcttcgtccagggtgtcacctcgacatggacgtgaggaccagccctccgtgcccccggttggtggtgttggctgtagagcctttgtggcgagtcttcggaatgtccgttggcccccaaggttccggcccaccatcaccgagaagtatgatgggagcgtcaaccccaccgagtttctccaggtctatacgaccgggatcgaggccgctgggggagacgacagggtcatggcgaatttctttcccatggccctgaagggacaggcgcggggttggctaatgaacctgccacccgcgtcggtccactcctgggaggatctgtgccagcagttcaccatgaactttcaaggcacctatccacgcccaggtgaagaagcggacttgcacgcagtacagcgaggggatgatgaatcccttcgctcgtacattcagcgtttctgccaagtccgcaatactataccttgcatccctgcacacgcggtgatctacgcgttcagggggggtgtgcggcacaaccgcatgctcgaaaagattgcctccaaagagccccagactaccgcagagctttttcagctcgcggaccgagtggctcgtaaggaggaggcctggacctggaacccctccggttccggtgtggcagcttcggccgcccccggatccgccgctcagacagggcggcgtgacaggaggaggaagaaaaggtcggtccattccggcgacgagggtcacgtcctcgccgtcgagggcgctccgcgggccacccgaaaggggaggcctgcgagcgacaaaaagaaagaggctggtactcccagcagggagcgcccagccagcaagtggtgctccgtccacaacacctccctccacgatctcgcggactgtcgcgcagtcaaaaacttggctgagcgaacgaggaagtgggaggaggacaggaggcaggaacgccgtgagggcaagtccgcggcagttccctccggtaaacggcgaagtgaggccagacagaaggcccccgccgttgacatcgatgacggtgatgatgacctaggtttccaagaacctggggccaccattgccactgtcgacgggggagcgtgtgctcacgtttctcgccggagtttcaaggccatgaggcgagagcttctcgccgcggcccctactcatgaggcgacgcgtcgggcgcggtggtcggaggtggccctcacctttgaccagaccgaccacccaccgtgcgttgcccggggagggcagattgcgatggtggtttcccccaccatctgcaatgtgaagttggggcgtgtcctcatagatggaggagcggctctcaacatcctttcccccgcggcctttgatgctatcaaggccccggggatggtgctccagccgtctcaaccgatcatcggtgtgacgccggggcacacatggccgttaggtcacatcgacctaccggtcacctttggtggatcagccaacttccgcacggagcgggtgaacttcgatgtggcggacctcagtctgccctacaacgcggtcctggggaggcccgcgttggtgaagtttatggcggcggtccactacgcctacctccagatgaagatgccgggccccggtggccccatctctgtccgtggcgaccttaaagtcgcgctcgcttgcatggagcagcgcgcggaccacctcgctgctgcgaccaagcccgagggtggtgacgagaggcttggcacctccgcccccaccgccccgaggcagcggattgccacatgcgacgaggtctcggtcaaggaggaagacgcgctcgtctccttcctgcgggcaaacgctgacgtcttcgcatggagaccagcggacatgcccggggtccccagggaggtgattgagcaccgtctcgccgtgcggccgggcgcaaggccggtccggcagaaagtgcggcggcaggccccggaacgtcaagccttcatccgcgaggaggtggcgagacttctggaggccggattcatccgtgaagtcatccatccggagtggctggcgaacccggtggtcgttcccaaggcgaacggcaagcttcggatgtgcatcgactacaccgaccttaacaaggcatgtcctaaggatccttaccccctgcctcgcatagatcagatcgtcgactccactgcggggtgcgaccttttgtgttttctagatgcatactctggttaccatcagattcgcatggctagggaggatgaggagaaaactgcgttcattacccccgtaggaacctattgttatacatcaatgcccttcgggttaaagaatgcaggtcctacttttcaacgtactactcgaatttctttgggtagccaaataggacgtaatgttgaggcttatgtcgatgacttggttgtaaaaacgcgcaaccaagaaactttactttcagatctagcggaaacttttgagaacctccgctccgcccgcataaagctgaaccccgataagtgtgtgtttggtgtacctgcgggcaagcttctcgggttcttggtctctgcccgaggcattgaggccaaccccgagaagattcgagctatcgagcggatgcgcccccccagcaaacttagggatgtgcaatgcgtcaccggttgcatggccgccctaagtcgtttcatatcaaggctgggagagaaggcgctacccttgtttaagctcctcaagcgctcggggccgtttacttggacggaggaagctgaacatgccctcactcagttaaaggcatatctcagctctcccccggttctagtcgccccggagccaaatgagcccctgctactttacttagcggcgaccccccaagtagttagtgcagcgttggttgtggagcgcgatgaagacaatcctcatttcgtgcacccccattctgtgctaacttggcccgggagcgagcggggaggagaggcccccgagtcggacggtggcctacggcccctgacgaccggagccggccctctgcccgcttgtcagacggtgctaggtgcccccgaccctcaggagggccccaaggccactgcgggaaggccgcacttaacgccctctgaccccgaggctaaccctgtgctgactcgacccgggaaagagcagggagaagaggcccccgagccgaacggaggccagaggcccctgacgaccggagttggccctttgcccgcttgtccgacgatgccaggagcccccgacccccaggacggccccgaggccactgagggaaggccgcccctttcatcctccgaccccgaggtcatcggcacagaagacaagtgcgccccgaaaggccacttgaacgaagaacgccccggggatacggcccctagcagagaggatcggccccaccgaagggtgcagcggcctgtctactttgttagtgaggccctccgggacgctaagacccgataccctcaggcccagaagatgctttacgctattctgatggcctcgaggaaactgcgccattattttcaggcacatagggtcactgtggttacgtcttaccccctcggtcaaatcttgcataatcgagagggtacaggacgggtggtaaaatgggcaatcgagctttctgaattcgatctgcactttgaaccacgccacgctatcaagagccaggccctcgccgattttgtggcagagtggaccccggctccagagaccgtctcaatccccgaggccagcacgaacccctcgcagctgcctcacaccacccactgggtgatgcagttcgatggttctctgtccctccagggtgccggtgcgggggtcacgttgacctccccgaccggagacgtccttagatatctggtccgcctcgactttcgagcgaccaataatatggcagagtacgagggactccttgccggactcagggtggcagccggactggggatccgccgtctcctggtgttaggcgattcccagctggtcgttaaccaggtctgtaaggagtaccggtgctctgacccgcaaatggacgcctatgtacgccaagtgcggcgtatggagcgccattttgacgggatagagcttcggcatgtgcccagacgggataacatgatagccgacgaactctcacggctcgcgtcctcgcgagcccagaccccaccgggcgcctttgaagaaaggcttacccagccgtcggcgcgacccgaccccttaggggagacggatgcgcctgaccggcccccgaggcccgtcggagtccaggcctcgggacccgaagggagcgctccaagctcccttagattgattgcttggatctctgagatccaaacatacctcacagataagactctacctgaggaccgcgaagggagtgaacgcgtacaacgcatttccaaacgctatgtgctggtagaagggaccctctatcggcgcgcggctaacggaatcctcctgaagtgcattcctcaggaacaaggcgttgagcttcttgctgacatccatgagggcgagtgcggagcccattccgcctcgcgcaccctggttggcaaggcctttcgtcaaggattttattggccgacagctctcaatgatgcagtcgatctggtccggcgatgcagagcgtgtcagttccacgccaagcaaatccatcagccggcccaggccctgcagatcataccactgtcatggccatttgctgtctgggggcttgatatcctgggaccgttcaaacgggccccgggcgggtttgagtatctgtatgttgcgatcgacaagttcactaagtggcccgaggcttatccggttgtcaagatcgataagcactctgctcttaaattcattaagggcatcacggcccgttttggagtgcctaaccgtattattacggataatggcacccaattcactagtgaactcttcggcgactactgcgaagacatgggcatcaagctctgcttcgcctcacctgcccaccccagaagcaatggccaagtggagcgcgccaatgcagaaatcctcaaaggccttaaaaccaagaccttcaatattctcaagaagcacggcgattcatggatcgaggagttgccagcggtgctctgggcaaaccgaaccacaccaagccgagcgaccggggaaacgcctttcttcctcgtctacggcgcagaagcggttctcccatccgagctcaccctgaggtctcctcgggccaccatgtactgcgaggctgatcaagatcagcttcgtagagatgacctcgactacttggaagagcgaaggcggcgcgcggccctccgagccgcgcgctaccagcagagcctgcggcgctaccatcagcgccacgtccgggcccgatcactctgcgtcgacgacctcgtcctacgccgcgtccaaacgcgtgctggactgagcaagctctcaccaatgtgggagggtccgtatcgagtgatcggcgtcccccggccgggctccgtacggctggccacgggcgacggcactgagctgccaaacccgtggaacatcgaacaccttcgtcgcttctacccctga

SEQ ID NO: 70538 - DNA, 891 bp, Oryza sativa
  Clone ID: PAT_MRT4530_710C.1
atggccgacgaaggcgagcctgtccagcctccgcggccggaagacgcggggctcgaggactgcttcctcccaccggagtccatcactgatgctgtctcgtcccacctcacccatttctccttcttcgatgacaacgacgacgatgacgaggaggatggcgaaaacctcctcccattgagcagcgtcgacgaggtcgtggtggtcggcggtggagtaggtgagggcggagatgagacgcccctagaccagcgacgcgctgcaaaaccctccaaccaccagcgccattgcacgcctcctccgctctcttaccgccgccttcggtacccgcaccctcccctcgccgactgccccaccctccagcctcgccaggaaaagaaaaagagtgagaggagtggtgtgcttggggaggagtgggggtcgagggacggggaggtggcggtgattattgacaataagaaggtggtggaggcacgacgagccaaagcagattttcacgtgcggaccgaagacccgtctgcacctaaagggaaagagggcgcggctccggcggcctggcgctcccgacagcggtggctaggggtggcgcaggaaatggaacggcggctggcgttggctgtggattggtccgggaatggtagcctcgccggcctttataggcaatggaggcggtggagggaagcaagtcgaagacggaacgacgggacgtcggatagggatgtgaagaggcagcgccggatgtcctcgccggattggccggcgatggcggttcgaagggcggctgcgacgcgtggcttaggaggtagcacggcgtcgtgtggcgaaaagctgcggacggcggcggcagcagcgggaatggcgatggcggcgtcggccacgggggcttcgtcgtga

SEQ ID NO: 70539 - DNA, 1088 bp, Oryza sativa
  Clone ID: PAT_MRT4530_71100C.1
gggcagatctgcggcgaggaggatggtgaaggtgaactgggagctgcagggatgctgcgaccgcgaccagaagatcttcatagccgccgtcggcgtctccaccgtcgtcatcctcctcctgtggaggacgttcctgctcacgcccttcaagctcatcaccgtcttcctccacgagaccagccacgccctcgcctgcaagctcacctgcggagatgttgagggcatgcaggtccatcctaatgagggcggtgttactcaaactcggggcggcatatattggataatcttgcctgctggatatctgggttcatcattttggggaatggtttttatactggcttccacaaatctcctcactactagaattgcagcgggttgcttcattcttgcattaatcgttgttctttttgttgctaaaaattggtttcttcgctggctctgcattggtttcatcgtattccttgctctcgtgggggtcattcaagaattcacaaaattccatagtctcaagtatgtaattttattcataggtgtgatgaatagctggttttcagtctacgatatctatgatgacttgatatcacgaagagttcattcaagtgatgctgagacaatttgctgaaatctgcccatgtccttgcaatggttgtgcatggggtgtcatatggggcttcatctcgtttatctttctttgcgcatcaatataccttggactggttatattgtcttgaggattccaatcttccatataccattttgatatgagaaccaagtcaagctgtgctctcctgtatttgcattgctctggatgttggctccggcttgtattgatctcatgtgtcatgagttgtagaaagttcatacaaacggcaatcgatttatgccaattggagttgatgggatagggattagtcattcgattcttccatttagtgcttctgtagatagcattctgcttatagttcatcttcatagctgattagctgtcattttagtactatctcatctcttgaattgttactatttatcaacatatagaaatttactcgacagtacaattccttttgaaaaaaaccaaaaaaaaaaaa

SEQ ID NO: 70540 - DNA, 4370 bp, Oryza sativa
  Clone ID: PAT_MRT4530_71101C.1
ggttagagaatgtttggttattgcataaatgaataacctggttccaagcaactggtgttgataaacccagaacaagttgccatattcttgaacaaagcaagcaggctgcagagttagttcacagagaaattttgaagcagccaagcaactcaccattctacccaactatcttaagatgctcgaggaagcatagctaataggtagtgtaaacataaatgcctactgtgaatttggtaggtaacttaacacactactatctcctctttcaaatgcttgtcatttcaaggaacaagaaagaaagtcacttaagaacttgagtcagtaggaatcaaaagacttattgcaagcactgaattttatcttccctccgacataatagtcatagatgatgcaccagacacggtgccaatgcttgtcgccgaccgggggccgcccgacatgatgaatgaatcgaacccttcgttttgcattatcgccatcatgctatagctcacgtagctcggcgataggtcaggagccgacttaccgccacgctccaggtattgcatgacattccgcatgctgggcctcgcaccgggtagcgggtgcgaacacaacaaacccagcttcagaacgagggccacctcctccacatcgaacttccccgtgagccgtggatccgccgcaccaacgatcgagccattgcggtggtgctcaagcaccaagtcgactagcaccacccgtttgttgtgctcgtcggtctcgatcggcctccgcccgcatgtcacctccaataagaacaccccgaatgcgaacacgtcggttaagggtgacgccttccctgtacggacgagctctggtgctaggtagcccatggtgccaaccacatgtgttgttttggggtcggtgccatggtcgtacagccttgccaggccaaaatcacctagccgcccgttcattgcactgtctaagagcacgttgctcgcttttatgtctcgatggatgactacttgctcccaatcctcgtgtaggtacaacaaacctgatgcgacgcctttgatgatccagagccgctcgggccaaaatagagttgtaacatttctctcatgcaagtacttgtcaagactaccattcgccatgtaatcgtacaccaacaggagttcattcttgcggcggcaatagcctagtaactgcacgagattccgatgtcgaagtcggccaatgctcaccacttccgcgacgaactcccttataccttgccttgaatcatgtgaaaccctcttcaccgcaatctccaaattggactccggtagcacccctctgtaaactctcccaaaccctccaacacccagcaaatttctatccttgaacccatccgtcgcgcggaacaaatccttgtatgcgaaccggtgcggaccaaactcatcctcccaatcttcccgcacctcggcgaagcggcgccgccgccgcacgacgaagaagacggcagctagcaccgcagcgacgagaaatgcggtggccagcggaagcacaatgtccaggaccttggaccgaggcttcggaccgaagcgtggcagccggggaagcttggagagatcgaggggaggagctggcccgtcgaagccgaagctccagccgagcacgtagtggtgggtgttcacgacgcccgtcgccgacgagaagccgacgtacatctcctcggccatgaccgtggagaggtcgatggcctgggagagcagaggcttcttgggcttaggcacttgcacgggagacagcgtcacgttgagctgcttggcctggccgtcgtagtccacccacacctgcatcggctggcggctgttcagcctgagctcacggaaggcgccgtcgccgtcgccgtagtagccggccggccgtgcctgcgtcgacatgaggctgttggcgtcgatgccgacgtggttgctgctgatgtcgtggaactcggggttcatgatggtgtccagctcgacggccaggatttggccgctcgccgtgccgttcgtcgcgttgaggaagcccaggtactgcccggcgttcgccgccgagaggttcgccgtcggcgcgaccacgaacgcgagcccgtggtcgctcaggccgtcgtacccggacacgatggcgaacacgaaagccgtggagaaggaccgcgccacgtcggctccggcgccaccgctggcgttcgcccccgccgccgccgtggaggactcgccgaggaagcggagaggcgccgggtgaaacgcgtgcgctttcgcctggtacgtgaagttggtgagcacgaggagcccgctcgccgtgacggtggcgaggccgtccacggtaaggttcgccgccgcgaacccctggtacgtgaactggccatcgccgccggcggccgaggccaccaccacgtcgttgctcaagcttcctcccgggagaagaacgaagtgtgcagaacttgctgatgagatgtatgaaatggaattgcggttgaactccttgtacatccgctctagtgaagtgaagcttaggtacgtcggtgacaaatccggtagggccatatcaccgtcgaggtactgagcgacctgccgcattgttggcctagcattgggcaatggatgcgagcagagcagcccaagttttagaaccagagaaacctcgtcaggatcaaaacagctcggaatcctcgcgtccaccacgttaacaagtgcacccttgctccactgctcagtcacccagtccacaagcacggcacggttgccgtgctcatcctgcacgattggccttcttccgcaggtgacctcgaggaggaatgcgccgaacgcgaacacgtcggttgatggggttgccttgccggtgtgccccaactcaggggctaggtaccccatagtgccgaccacatgtgttgtctgtgcaacagctccgtgatcatacaaccttgcgaggccaaagtcgcctagtcgaccgttcatctcatcgtcgaggagcacgttgcttgccttgacgtctcggtggatgacaacgtgttcccaatcctcgtgaaggtacagtagcccagacgccactcctctgatgatgtggaatctctgaggccaacttagtgggtgcttgcttccatcgtaaaggtatttgtcgaggctaccttttggcatgtaatcgtacaccaagagaagttcacctttacgacggcaatagccgagtagttgcacgaggttgcggtgtcgcaagcgaccgatgctcgcgacctctgcgacgaactccttcatcccttgtcttgattcgtgtgacaccctcttcactgcgacctccatgtcgggcttgcggagcacgcctcggtacacgctcccgaaccctcccgtgccaaggaggttcttgtcgctgaatcccttggtcgcatggaacaagtccttgtaggagaatcggtgcggcccaaacgcggtctcccactcctcccgcagctcggcgtacctgagccgccgcctcgccatggcgtacaccgccatggccacggcggcgaccagcgccgtcgacgctatgggcagcacgatctccagcaccttcgaccgcggcttgggccaagcccgcggcaacggcggtagcgacgagatgttcagcggcggggctggcccgtccaccgcgaagctccagcctagcacgaagtggcgcgagaagaggatgcccgtcgccgacgcgaacccgacgtgcgccgcgcccgtcgcgacgtcggagaggtcgacgttggtccgcagcagcggcttcttgggcctggccgtgcccaggggagccatggccacggtgacctccgtgtttttttttttttttgaatttttagccccctaaacggtgtattataactcagaaaataaactagaagtaataaactggagaaacccgatttttcatatgtcgaactccacggcgaagacgccggcggcgctccggttgccggtggtggcgccggtgccgttgaagaggcccaggaactggccaggcagcgcggcggcgaacgcgtccgcggacgcggagacgaagaaggccaggccgtggctgctgaagtcggcgtactgcccgaagatggcgaacacgaacgtcgtcgagaaggacctcgccgcgcggagcgggatcggcgacgggtggaacgcgtggcctttcatctggatggacccgttggtcagcatgaggaggccgctcgccgtgaccgtggccgcgccgtcgagggtgaggttggcgcccgagaagccatcgtacgcgaactgcaggccgccgctgccgccggtggccgcggcgcagcggtcggcagccgcgaggaggagcaggagcagagtgaaacagtggaaaggctcacgaagcatggtgtttgcatcacttcgccgtggcgcagctagcttgtttgcttgtcg

SEQ ID NO: 70541 - DNA, 270 bp, Oryza sativa
  Clone ID: PAT_MRT4530_71102C.1
gcctttttgacatctacaacgagtacacgagcccgacggctggcatactgtgcaccgacgcgttccagtccatgtacacacagatgctgagcggactcgtggagcgcgcgtaggtactacgcatatacatcgaatcgatcaacggaggacacatcgagataaaggtaatagggagaccatgtagggagataacagaggacatgaagaccggaacgatgtacgtcaaagcaagtggatcatccataagaagcggctggagggattgaagag

SEQ ID NO: 70542 - DNA, 324 bp, Oryza sativa
  Clone ID: PAT_MRT4530_71103C.1
gttgcggtaacagaaaattaacttcaataaaccatcttacagaaattgaaacacataacacaacatatacaaggtaatcctcgcgccaacatataagataacgcatgtcaggcaaaatggctacaacagtcccaactgtagcattcttttttacagcgataacagatactgtaacaaacccactgtgtagagcaaagactacacagtgaacatacccacccgccaccagtgcttattgcattacccactcttatgtcaaagacaaagatatgtcgatacaacatcttgtaaaatagctcctctttgtcacaaaaatcaaaaatc

SEQ ID NO: 70543 - DNA, 3609 bp, Oryza sativa
  Clone ID: PAT_MRT4530_71104C.1
atggcgcaggatagcagcaagctggatctgctgctgaaaatggtggaggagaacgagaagaagcgcgtggtggcggatgagcgcactagggcggagtatctggagctcaagaagatggtggaatctagaattccagccgtggagaggaaggtcgaggatatcggagaagctttccaggcgatgaataccaaagtggatctgatcgagagcactcttcagcggcaaatcaagactgagaagacatcgggtggcaatgggaagattgggaccgcttcggggccatcatctccaaagttctccggtacgcccgattccaatctctttccccatgcccactattcccttgatcttggccataagcaattggatgttgatcttggagctgtggggttcagtggtgctgtgccgccaatgttgtgccctcaatttagtggtgatagtcctcaaatgtggcgagctaactgtgagcaatactttgatctgtatgggattttgcctgccaattgggtaaaaattgctactctcaattttgtgggcaacgctgctttttggttacaatctgtcagaacacaacttgggggaatttcctggccggacctatgtgagatagtgtgtaatcgctttgctagagacagaaaaagagaactgatcaggcagtggattcatttgaatcaaactgggactgttagtgaatatgtggaaaaatttgataatcttatgcaccagctgatggcctatggcaactctgacataccagactattttgtgaccaaatttattgaagggttaagagatgatatcagaactgtagtgatggtacagaaaccccctgatttagatgcagcctgttctgtggccttacttctggaggaggcattagagggttgtaagtctctgtcatacaagaaatctgacctaattgtgggaaccagaccccaacgaccaatctcttcttctaacaatagaacactcagtatcaccaattctgaagataggagaggaactgatgcagctagggcaagagatgacaagttggcagctcttaaagcatataggagatctaaggggttgtgttttacttgtggtgaaagatggggaaaagaacataaatgtgccaccaccattcagttgcatgtagtagaagaacttctggaagctgtgtcagtagaagctgtgtttgaaactgatgatgaaaatgacaccaaggagacacttatggctatatctcagcaagctatgtgggggatagaatccagtaaatcaatcaaattaagggggtggattcagggttttgaattattgatgttaattgattctggcagcactcattcctttgtggatgctagcataggacagaagttatctgggctcaagcaacttgataatcctgttgctgttaagattgctgatggagggactatgcaatgtacacaggaaattcctaactgtaactggtggatgcaaggatacaatttcagcagtaatttcagattgctgtatttggggggttatgatattattctgggaatggactggctagaatcatacagtcccatgcacattgattgggtacacaaatggttggagtttccctatcagggtacaactgtcaggttgcaagtaagaaagaaggatggaacctggagaatggttattgattataggcagttgaatgacatcattgccaaaactaattacccagtaccagttattgaggagcttctagatgaattgactggtgccaagtggttcagtaaacttgatctcagggcaggatatcaccaaatcagaatgtatagggttatgtcatttggtctcacaagagcaccagccaccttcctgaaagctatgaatgataccctcaagacagttatcaggaaatgtgctcttgtattctttgatgatattctcatttacagccctgatttcaactctcatctggaacatttaagacaagttttacagcttttacatgaccatcaatggaaagtcaagttgagcaagtgctcttttgcacagaaacagctctcctatctgggccacataattggagaaacaagagtctctacagatccctctaaaattcaggatatactagactgggcagttcctacaactcctaagaaattgagaggttttcttggactcactggatattaccgcaaatttgtgaagaattttggtttaatttctaaaccccttactcagctactcaggaagcatgtttcttttaagtggacatctgagacagaacaagcttttcaagacctcaagaaggcactctcctctgcacctgttttagccctaccaaattttcaattacccttcactgtggagactgacgccagtgattctggtattggtgcagtgctgactcaaaatgggcatcccatagcttatctaagcaaggcattaggtccaagaactagagggctatcgacttatgagaaggagtgcatggctatactcttagcagtagatcactggagatcctatttgcagcatggggagtttgtcattctcattgatcatcatagcctgatgcatttatcagatcaaagactgcacaccccatggcaacacagggcattgaccaaattgcttggcctcagttacaagatttgctacagaaagggtagttccaacaatgcagctaatgccctgtccaggaagtttcaggacactgaagaagaaattaatgctgtatcaacttgtgtacccagttggcagcaagaggtagaacaagggtatactcaagacagttttacttctcagttgattgctgctctaactcttaaccctgcagccaaacaacactattctctgcagaatggactcctgaaatacaagaacagaatttggattggttctaactatcccttgcagcttaaaattatatctgaattgcactccagcccagtgggaggccactctggtttcccagttacttacaggaggattaagcagctgtttgcttggcaaggcatgaagaaaatgattaaacaagaattgcagaagtgtcaaatctgcttgcaagaaaaaccggacagggccaagtatcctggcttgttgcaaccacttcctacaccttttgagatcctctatggttaccccccaagccattttaacattgggttcagagattgtgccattcctgatttggttgtttggctcaaagacagagccacaatacaacaactggcccagcaacatctcaatagagcacaacaacaaatgaaatactttgctgacaaaaagagaagtttcagggagtttgcagtgggtgactgggtttacctcaagctacagccttatgtgcaaagctcagtagcccctcgttctaatcacaaactagctttcaagtactatggaccatatcagatcatctcaaaaattggcacagttgcttacaagcttcttctccctgttggaagcagtgttcacccagtttttcatgtctcattgctaaagccagccaagggatttgacaagccagtgcaaactcacttatcttatgtctcctctactcctcaatatcctttacatgtcctggatcacaggttgaccaggaagaataattcaaccattatgcaagtgctaattcaatga

SEQ ID NO: 70544 - DNA, 409 bp, Oryza sativa
  Clone ID: PAT_MRT4530_71105C.1
aattcggcacgagcggacgccatcaagccgtccgatccgagtgatccgatggctctcgctctctccacmtctgctgctgctgccgctgccgccgcggcgcggcgctcgcrgcgaggggtgacgacgacgaggggttacgccgcgtcgggstcggtcggcgatgaggcgcgcrgcggcggcggtggaagrgaagcgckctgcggggatcacgcavgcgaaggcacgkstcgtcgtcgtcggcggcgagggaggtgtcgtgggtscccsaccccgtgacgggccactaccggccctacaacttcggcggcgggccgacgcscatcyctgcgsrgasssccacctcgccmacagctacgcccgcgcgtgatgcgcgaccctcgmcgtcgyccsaccgacgacgagcgacatt

SEQ ID NO: 70545 - DNA, 2442 bp, Oryza sativa
  Clone ID: PAT_MRT4530_71106C.1
atggggagctgcggcgcgggagcggcggacagcgagtggcccgacggcgtgacggggcgggacgcggaggtcggggcgctcgtgtgggtgcgccgccgcaacggatcctggtggcccggccagatcctcagcgccgacgagctcccggagaactgcgtcgtcccgccgcgctcctccggcacgcccatcaagctcctcggccgccccgacggcagcattgactggtataatcttgagaagtctaagcgtgtgaagccatttcgatgtggagagtatgaggaatgtatagaaaaagcaaaggctcaagctcgccagcataagagggcctacaatgaaggaaagtatgtccgcagggaagatgctatcatgcatgctcttgaacttgaaagggctcgctttccaaatgaagatgatactgatgaacatgatactagtggcctattatttgaatcccaaaacagctattgtgcaaagtccaaaaacataaatgagctcaataaaaaatcgtctcgcactgcaagggatctgtatgatattgaagaggagtcagctaaaggtttgtctcaggccttaacattatataaacagccacagaatgtgtcctcttcaagcactaggtatgcttcatcatcaaggaagaaacataaggcatcaaatgattttgaggatgacacagttcaaggatcccaacgtatgagagaccttacggagattggatcaaagaaacacagttcatacgtcctaaatgggcaccgggatctaccacttcttgagagtgcaagctttggttatagcttgtctggtaccaatgggataaaaggtgatccgcagtctcattcggcaacaaaaaggaagcgttcaatattggccaagcttatgaaaattcaaggaagaaagacagacgtcgccctttatcgaagttatgtaaagattcagctgtggcagttccagcatatagccactgggatccttcagggcattcttctgcccagtactcaggaggcaaaatgtccaatgcatttgaaccaagtaattccagtaaaggaagcggaggtctcatgcatgcctgggtttctcaataatgactgctctgatggcgatgaatattttgataccccccttgttatggaggaagatgccctcgaagaagatcatctgcataaatatgaatcatgtgcatcagtcaagggccagatctcaaaacccaggaagcaaactgctgaatatactgaactggtcataccttcacctcatggtcacagaagttctaagaagaaaagcatgagctttgttagtcaaagaacacaagaaaaccacaaggataggactttgttggcacaacatggaagaacagtaaaagggcaagcattagacactgatgctgttgaggtggatgccagggtgagcagtgctttctgtaagccccctgcacttaagaacaatatgcaacttgcaatagttcctgctgatggttgtgccagtactttggagcaacagtattatggaagtggacctgagcatgatgaatcatctgaaactataagcaaccgctcacaatcagaaaagggcgcaccatcttccccgtattatgagccacttcaagtgataccacctgaacagaaatctggtctagaaccttccagtccccatgtggtaaagccaatcaagaatgcacggacagactataaggtatatgatgtagaattggctgctcaaggaagctacaagggccatcgtgtgcctcttgtttctctcatgagtaaatggaatggtaagcccattgtcggttaccctataactgtggaggttttaaaagatagtagttctgcggcgagccgaaatgatctgcgcccagcaactagcagtcttaacaacttgctaaagaggagcgaacctgcggaaccaaggcaagcaagatcgtcacattcatcgagacctgcatcaagaccaaagcccagcggtaagaaaaagatctcagagcatgatacggacaagtcacggcggccacacacaaagaaatcagcaacttcaccgaggaaaatgcgtaggctctcatctttcgccagcagtcgtagagatggtgcaagcaggaagcccgtagttggcaagattagtgggcctacaatcgcgtgcatcccgctccgacttgttttcagtaggatcaacgaagctttaagttttccagtgagatcagagaaccctacatgaggtgtgggctgccaagcctgcgcttggagatagcctgtgaacagagagacatattgctagttttgcatgtacattagcagccttataatttttataaaaaaaaatattaatgcctgccatgttcatatcagctatgtgcttgtaaccgtgtaattgcgattatccgccttggtttcagttgaagcatcccacagtgggaggaaaataagcaccttgaataaaaaaaaaaaaaaa

SEQ ID NO: 70546 - DNA, 435 bp, Oryza sativa
  unsure (1)..(435): unsure at all n locations
  Clone ID: PAT_MRT4530_71107C.1
atgaggagatggagggggtggagaggccatcgccgccgctctcgtggtccgcctccatcgcgcacctcgcgctctcgcctccgcccgtgcctagcaaccacgcgtccctggtggtgcgcacggcggtcgcggaaggaggcggaggagaggcccaaccgcaagtcatgtaagcagtgcatggacatgtacatgcggccgtttctgctcaacgtcttcttctccaagcgattcgtccacgccaaggttgtgcacaggggcaccagcgaatgcatcattgagacaggggcgtggcagagagacgggcagcggctagaggcgtcggcggagggcggcgacgcggtgacggtgggcagaggncgncagcgcgctggggagcggcggcagtcgccatccatgccggagggtaattcgtactttttcccatattatttgtaa

SEQ ID NO: 70547 - DNA, 356 bp, Oryza sativa
  Clone ID: PAT_MRT4530_71108C.1
ggccccccaggtttatcatttttccctgcggtcatttttttttgtttaggtttgggtggtagcattctttccccggtccgaaatttttggcttgattttcgcgtcggacgcgtggggacggccagaccatcgtcttcgccggcgtcgtgccgccgtcgtggaggttcggccagacgttcgcgagcacccagcagttcatgtagctagtctcactctcgctcgggttccctttggttggcacttggcagtggcgttgtttgctatactttgctctcttctgttggtgtttaattagcagcccgccaacgatttgtgctatgtaatcgtgttaatttgacagtttttgtggtgtattg

SEQ ID NO: 70548 - DNA, 407 bp, Oryza sativa
  unsure (1)..(407): unsure at all n locations
  Clone ID: PAT_MRT4530_71109C.1
gtcgccttcctcctcctcctctgccccccctcttcgtcttcctgtcgaaatcccaatccttccaactccgcacctttgcctgcctcctccgatcccttcctccgccgccgctgctgtacggggcgtcgtcacttctttttatttaattcaaaggtactgtattttttgtttcttggcgcattcctttccctggagacgggggttttgttgcttcttgatgcgaaatttcaggtttttgatatggggggtaatgctgtatcagttcagaggcatggtaattttgcgtcagtaggaatactcactgtatgtatgtattatgccaatttccagtttctttgatcccgggatcctgcangccgtcttntggagaaggaaggacccaggtttgaatttnaaatccctgtggg

SEQ ID NO: 70549 - DNA, 605 bp, Oryza sativa
  unsure (1)..(605): unsure at all n locations
  Clone ID: PAT_MRT4530_7110C.1
atccattaccctgagtgatatgcacagagcaggtagtgtttgacaactttgtttctgctttttgcagcttaggctcctactttgtgcacatgatgagcctccaaacctcagctatggagttcatagtttcatgctcaccttgtcatctccagagttccagcatcctgtaagttccaattcatatgcatcttagaacactgcttcagttgctcagttgatggtatcattggtcttagcaatggctggcaagctgatcagctcctccattgttcttgctcttctacctctgttctgtggcatcctgcttgcaccatcatgtgaagcagccacagtagacacaacatctgccactctcctgcaagtgaagtcaggtttcactgaccctaatggcgtcctctccggctggtcgccggaggccgacgtgtgctcgtggcacggcgtgacgtgcctgacaggggagggcattgtcaccggcctcaacctgtcggggtacggcctgtccggcacgatatcgccggcgatagccggccttgtatncgtcgagaccattgatctggcgtcggcttccctcaccggcgcaatccccgccggagctcgggaccatg

SEQ ID NO: 70550 - DNA, 634 bp, Oryza sativa
  Clone ID: PAT_MRT4530_71110C.1
gccagcacagcactttaagtaggaaatttgaccaaacttttgaaccactcttgttttaccacaacgaatgcaatttgatcaagacaatcaaattacgcacaactcccccaaatttccgggatatactgtttacatttggtgatgaaccagcacttttctcctacacacattgcacaattcttaaacccttatggttgcaaaagaagaaaaatcaagcataggaaaaagaactcttcttagtttggcaagaggaagattgaccggttaataagatggttttgatcgcattaatccgcgactgtccatgtcatgtcaccctcgaagatccagtgacaaacctcaacctcaccgggttttccaccaagcgcgatgaacgctccatgggttgggctccaatcagaagtatcgaggtgacaaattgccaccccatgattgatcttctgatcggagtcggcagccatgatatcggcctcatacacccgcaccttcggcaccgagtggcaagtagtacaccagatacgggaacaagcttttggtgacacgatacggaaccgggtcacccttgccaccatcaacaaccggtaacattgcccagacctgatttgcccgccacttccagccgtggaggccgtgc

SEQ ID NO: 70551 - DNA, 551 bp, Oryza sativa
  Clone ID: PAT_MRT4530_71111C.1
aaaaaaaaactttttttttaaccaagggtaaccttttaaaaaccaaggggtttgggtgaaacagggaatagccccccccaacaaaactggttaaatttaaataaatttttttaccctatataaccgcttttgataaaaaaaaaataaatcccagtccaaattaaaacccccggcaaaaaaagctaatgcatgactttgatcccaaactggttttttgcaaacaatttgacaggggggaggacgggttaattaaacccccaggggggatcatattcatcacttttttgccggaggggtcgggttgtaatactccgggccagggtgggggttgggctcagggttgggctcaaggtttgggtttgggttaggggggactggctttttggggaagggggcaaaaaaaggcttctcctttttggggatgggggcaaggaaggggggcccccgctcaagcttcggcttggggggctccggcttcggctccgggttggggggcccccgctttttggggaaaggggctataaacttttttttgaggggaccccaaaacc

SEQ ID NO: 70552 - DNA, 231 bp, Oryza sativa
  Clone ID: PAT_MRT4530_71112C.1
ctcctatagggcgattgggtcaatatagggcggccgggatagaattttcccagcccctcctaggataccacatacttctatcattgaacttttctcattgccggaattttagtgccaggacaatcggaagaatgatggtgatcgcaatctactcggctgtcccctcaggggcatcggcaagccttacaacctcgtataggaaggtctccattacacctaaagcaatgtctt

SEQ ID NO: 70553 - DNA, 756 bp, Oryza sativa
  Clone ID: PAT_MRT4530_71113C.1
atgggagtgacctgtgtggcagacaagagatgcaaggagaagtgggagaacatcaacaagtacttcaagaaggtgaaggagagcaacaagaagcgccccgaggactccaagacatgcccctactaccaccagctcgacgcgctctaccgcaccaaggcggccaacgccgccgccgccgcctcagcctcgccggctccggcgaccaccaccgtgcttgccccggtgccgctctcccagacgccgccgcacgtcgaccacggcggcagcaacggcaatgggaatgggtgggcgagtgccaacaacggcggcggcggcagcagctccgggggcatgcaaacgaaggctagcaacaatggcacggcgacggccggcgggctgcccgccgtttcgggatcgaagcaggtgcccgtcgcgaaggagacggcggggcagaggcagccacagccgttggccatgaaccacaactacggcaacgacagaatggccgacgacatggacagcgacagcatggacgacgacgacgacgacgacgaatttgacgacgacgaaaacgacgacgacatcggcggtggcaagatgcaggtgcagtacgagacgtcgtcccatttccaacggccgcagctgcagaaccagaacgtcgtcgtcggccggccaaacgcgagcggcggcggcggcggtggcgctccgacgacaccggcgggccctccgccgcctgcggcaacaagtgggacgtcattcttggcctgcgtccagtga

SEQ ID NO: 70554 - DNA, 1708 bp, Oryza sativa
  Clone ID: PAT_MRT4530_71114C.1
atcgccgccgtgccaccgccgccgctgcagcccacgccggtggcttccgctgcaccaccaccaccgattcaggttcagccgcaccacataatgccgatgacgccgcagccccagctgcaaccaccgcagccgcagagcaaggaggccaacaccgtcgtccgggcggcgccgccgccgcaagagcagcacgacacggcggcgtccggcggcggcggcggcgcgtcgtcgtcgaggtggccgaaggcggaggtgcacgcgctgatccagctgcgcacagagctggagacgaggtaccaggactcggggcccaaggggcctctctgggaggacatctcggcggggatgcggcggctggggtacagccggagctccaagagatgcaaggagaagtgggagaacatcaacaagtacttcaagaaggtgaaggagagcaacaagaagcgccccgaggactccaagacatgcccctactaccaccagctcgacgcgctctaccgcaccaaggcggccaacgccgccgccgccgcctcagcctcgccggctccggcgaccaccaccgtgcttgccccggtgccgctctcccagacgccgccgcacgtcgaccacggcggcagcaacggcaatgggaatgggtgggcgagtgccaacaacggcggcggcggcagcagctccgggggcatgcaaacgaaggctagcaacaatggcacggcgacggccggcgggctgcccgtcgtttcggtcgccggcggcaacggcaacggcaacggcgtggcggcgacgacggataacaagggatcgaagcaggtgcccgtcgcgaaggagacggcggggcagaggcagccacagccgttggccatgaaccacaactacggcaacgacagaatggccgacgacatggacagcgacagcatggacgacgacgacgacgacgacgaatttgacgacgacgaaaacgacgacgacatcggcggtggcaagatgcaggtgcagtacgagacgtcgtcccatttccaacggccgcagctgcagaaccagaacgtcgtcgtcggccggccaaacgcgagcggcggcggcggcggtggcgctccgacgacaccggcgggccctccgccgcctgcggcaacaagtgggacgtcattcttggcctgcgtccagtgacgacgacgacgacgacacgacgacatatatacaccaagagaaatatgctcaggtggtggcgatctcgatctcgatctactatctcctgtaccatatggacctagctagctagccatccacttgcattctttaactcctacaactacactatatcgatccctagttagcataagctcgttaaaacctgaaggccaaaatttactgttccttgcctagattccaagttccaacaacctgatcttttccgtatatttcttctcctttcctgcacataacattatttatcgtcgtatacaccttgtacatgtcacacactcaccatgtccatacaaacataaatggtattgggggacctcctggagggagagatctagctagagagaagataaaaaggaggtgagatatctttgtacatgtgaagggttttgcgtacgtaggtacatgtctgtttttctctttagtgctgtattaacagtccagtgctcaagtactacaagctacggcaaccgagagaaaggcatgcatgatcatgcttcttttttttgggtat

SEQ ID NO: 70555 - DNA, 669 bp, Oryza sativa
  Clone ID: PAT_MRT4530_71115C.1
atggcgccggggccggagaagaagaaatcatggatgccggcgggcttgggaggcagcggcaagcttggcgccaccattgacatccccctagaggatccgaggaagaaggagaaagaactcttggcatgggaggaggatttgaggcgaagggagctggatatcaaacagagggagaatgcaatggacagggctggggtcactgtcgaagtgaaaaattggccgcctttctaccctatcatccatcatgatatagccagtgaaataccaatccatgctcagaagttgcaatacatggcatttggtagttggctagatgttgtgctttttctcttcgcaattatctacgcaatatttggatgtcctctttcatacatactgtggtacaggcctctgtacagcgcaatgagaactgatagcatggttacctttgtccagtttttcgtcttctactcgatacatgtcggattttgtgtcattgctgcagttactcctccaataatatttaagggaaaaactcttacgggaatcctggttgcaatcgaagttttaactggagatatgttcgttggagtgctttatttaattggatttacatttttcaccttggaatctattataagcatctgggtgcttgagagagtctacatgcatttcagagggcacaggtga

SEQ ID NO: 70556 - DNA, 225 bp, Oryza sativa
  Clone ID: PAT_MRT4530_71116C.1
aatgtaaatgtgtttgccgggcgcaacagtagccccacccgtggtgatgcaccgcccgaggcttcgacagcaggtaggatcccaatgtgttaccgcacgacaacggcgagtggacggcgcgcgcgcggcctcgcgttccagccggcggccgtccgcgtcaagggttttaactgcctcgacggtgacccaggcgccgccggccatggcattaccgccatggcctaa

SEQ ID NO: 70557 - DNA, 520 bp, Oryza sativa
  Clone ID: PAT_MRT4530_71117C.1
aaggaaaaaaaggggctttatcatcattaggcgaaaaacgggcccggccaaaacaccaaaacaatggcttgcaaataatttatttaattattctttacccccaaccccccccaaaaggaatccgccccaaaaaaaacccctggggaccccttggattggatgggggggaaggcccccaacccaccccccctattaagccgggccccctgaccccctttttttgaaaagccaaatgcctttgctaaaacaacatttgggaaaaccccgaaaaaggaaccctttcccgcaagggggcttacccaaaaggtaggaagggccttgaaagccaaggaaccccccccttttttttgggccctttttaccaccgcaaaggggggggggaaaaaaaacaactgtccccgggaaaacccccccttaaacaccgtctttccattgggggggacaacttgaacccgggcccggccttgaataaaaaacacaaccctgggggcggtgatgttccaaaagggggaaagggggg

SEQ ID NO: 70558 - DNA, 188 bp, Oryza sativa
  unsure (1)..(188): unsure at all n locations
  Clone ID: PAT_MRT4530_71118C.1
cccacgcgtccgtttcctgggtggatggaggataaaaaanctccatatataaaatggggggacctagtggaacttttaagaaacacatcggagtttttggaccgacatggcttcctaaggttggttctatagaattaagagcatttaaggcactaatttaagtttactccaaacatatgtgcaacttt

SEQ ID NO: 70559 - DNA, 331 bp, Oryza sativa
  unsure (1)..(331): unsure at all n locations
  Clone ID: PAT_MRT4530_71119C.1
aagaaaccctctatttgaagctatttgttcatcatgaacacacgagggggtgccctcgtccagcaaatgtngaatggaacgatttggctctgacccgattgattaatgcggggggtaaaagatgagccgatttagctctggtaaagttttgcaaattgcggaccccccttggaaatcgtgttcaggaagccccggggcttgtcctcggccactgttgccggccgtccaccggctgtgagtcgtcggaggctagccccgtctgtttgcccttgccttgcccgggcccctgccaaatcttgggccccgagaagctgatcaccttgctgccggc

SEQ ID NO: 70560 - DNA, 6111 bp, Oryza sativa
  Clone ID: PAT_MRT4530_7111C.1
atggccgagcaagcaaaggtgcacgacctctctccgagtgtgagcggcgacgacggggagccaaacccacgccgtcgagctcgtactcccccacctcctccacaccaaaatcctaagcagggggaggcactcgagagagtcgaaaaatccgcagcatcgccagtcgcgggtggtgcaggagaacggcgagatggggagcgtcgcctcctcgtctacggtgacggcagcacgcctcagggcgcgcttcaggctgttggcgcgctcctacgtcacccgcctgtcgtccctgacccggagtctccagcccagcgatggctggacgacgtggccaacttggtcatgacggcacagcagcgcctgggtgctggtggacggtccgccaccaccaagacctccggcgccgccactaccggttccgcgtcgtcaagacggagggcgcggcgagcggcggctgttgcacgccattcggctgccactccctcgtcggcacctccgactcgggaggatcagcatggagagctggatgcccgcctcgacatcgagcgtcggcgtaatagccggcgtactccccgcgcaacggagggcgcctcttcgtccagagtgtcacctcgacagggacgtgaggaccagccctccatgcccccggctggtggtgtcggctgtagagcctttgtggcgagtcttcggaatgtccgttggcccccaaggttccggcccaccatcaccgagaagtatgacgggagtgtcaaccccaccgagtttctccaggtctatacgaccgggattgaggccgctgggggtgacgacagagtcatggcgaatttctttcccatggccctgaagggacaggcacggggttggctaatgaacctgccacccgcgtcggtccactcctgggaggatctgtgccagcagttcaccatgaactttcaaggcacttatccacgcccaggtgaagaagcggacttgcacgcagtacagcgaggggatgatgaatcccttcgctcgtacattcagcgtttctgccaagtccgcaatactataccttgcatccctgcacacgcggtgatctacgcgttcagggggggtgtgcggcacaaccgcatgctcgaaaagattgcctccaaagagccccagactaccgcagagctttttcagctcgcggaccgagtggctcgtaaggaggaggcctggacctggaacccctccggttccggtgtggcagcttcggccgcccccggatccgccgctcagacagggcggcgtgacaggaggaggaagaaaaggtcggtccattccggcgacgagggtcacgtcctcgccgtcgagggcgttccgcgggccacccgaaaggggaggcctgcgagcgacaaaaagaaagaggctggtgctcccagcaaggagcgcccagccagcaagtggtgctccgtccacaacacctccctccacgatctcgcggattgtcgcgcagtcaaaaacttggctgagcgaacgaggaagtgggaggaggacaggaggcaggaacgccgtgagggcaagtccgcggcagttccctccggtaaacggcgaagtgaggccaaacagaaggcccccgccgttgacatcgatgacggtgatgatgacctaggtttccaagaacctggggccaccattgccactgtcgacgggggagcgtgtgctcacgtttctcgccggagtttcaaggccatgaggcgagagcttctcgctgcggcccctactcatgaggcgacacgtcgggcgcggtggtcggaggtggccctcacctttgaccagaccgaccacccaccgtgcgttgcccggggagggcagattgcgatggtggtttcccccaccatctgcaatgtgaagttggggcgtgtcctcatagatggaggagcggctctcaacatcctttcccccgcggcctttgatgctatcaaggccccggggatggtgctccagccgtctcaaccgatcatcggtgtgacgccggggcacacatggccgttaggtcacatcgacctaccggtcacctttggtggatcagccaacttccgcacggagcgggtgaacttcgatgtggcggacctcagtctgccctacaacgcggtcctggggaggcccgcgttggtgaagtttatggcggcggtccactacgcctacctccagatgaagatgccgggccccggtggccccatctctgtccgtggcgaccttaaagtcgcgctcgcttgcatggagcagcgcgcggaccacctcgctgctgcgaccaagcccgagggtggtgacgagaggcttggcacctccgcccccacctgccccaaggcagcggattgccacatgcgacgaggtcccggtcaaggaggttgccttggtgctgacgaagacgcgctcgtctccttcctgcgggcaaacgctgacgtcttcgcatggagaccagcggacatgcccggggtccccagggaggtgattgagcaccgtctcgccgtgcggccgggcgcaaggccggtccggcagaaagtgcggcggcaggccccggaacgtcaagccttcatccgcgaggaggtggcgagacttctggaggccggattcatccgtgaagtcatccatccggagtggctggcgaacccggtggtcgttcccaaggcgaacggcaagcttcggatgtgcatcgactacaccgaccttaacaaggcatgtcctaaggatccttaccccctgcctcgtatagatcagatcgtcgactccactgcggggtgcgaccttttgtgttttctagatgcatactctggttaccatcagattcgcatggctagggaggatgaggaaaaaactgcgttcattacccccgtaggaacctattgttatacatcaatgcccttcgggttaaagaatgcaggtcctacttttcaacgtactactcgaatttccttgggtagccaaataggacataatgttgaggcttatgtcgatgacttggttgtaaaaacgcgcaaccaagaaactttactttcagatctagcggaaactttcgagaacctccgctccgcccgcataaagctgaaccccgataagtgtgtgtttggtgtacctgcgggcaagcttctcgggttcttggtctctgcccgaggcattgaggccaaccccgagaagattcgagctatcgagcggatgcgcccccccagcaaacttagggatgtgcaatgcgtcaccggttgcatggccgccctaagtcgtttcatatcaaggctgggagagaaggcgctacccttgtttaagctcctcaagcgctcggggccgtttacttggacggaggaagctgaacatgccctcactcagttaaaggcatatctcagctctcccccggttctagtcgccccggagccaaatgtgcccctgctactttacttagcggcgaccccccaagtagttagtgcagcgttggttgtggagcgcgatgaaaacaatcctcatttcgtgcacccccattctgtgctaacttggcccgggagcgagcggggaggagaggcccccgagtcggacggtggcctacggcccctgacgaccggagtcggccctctgcccgcttgtcagacggtgctaggtgcccccaaccctcaggagggccccaaggccactgcgggaaggccgcacttaacgccctttgaccccgaggctaaccctgtgctgactcgacccgggaaagagcagggagaagaggcccccgagccgaatggaggccagaggcccctgacgaccggagttggccctttgcctgcttgtccgacgatgccaggagcccccgacccccaggacggccccgaggccactgagggaaggccgcccctttcatcctccgaccccgaggtcatcggcacagaagacaagtgcgccccgaaaggccacttgaatgaagaacgccccggggatacggcccctagcaaagaggatcggccccaccgaagggtgcagcggcctgtctactttgttagtgaggccctccgggacgctaagacccgataccctcaggcccagaagatgctttacgctattctgatggcctcgaggaaactgcgccattattttcaggcacatagggtcactgtggttacgtcttatcccctcggacaaatcttgcataatcgagagggtacaggacgggtggtaaaatgggcaatcgagctttctgagttcgatctgcactttgaaccacgccacgctatcaagagccagaccctcgccgattttgtggcagagtggaccccggctccagagaccgtctcaatccccgaggccagcacgaacccctcgcagctgcctcacaccacccactgggtgatgcagttcgatggttctctgtccctccagggtgccggtgcgggggtcactttgacctccccgaccggagacgtccttagatatctggtccgcctcgactttcgagcgaccaataatatggcagagtacgagggactccttgccggactcagggtggcagccggactggggatccgccgtctcctggtgttaggcgattcccagctggtcgttaaccaggtctgtaaggagtaccggtgctctgacccgcaaatggacgcctatgtacgccaagtgcggcgtatggagcgccattttgacgggatagagcttcggcatgtgcccagacgggataacatgatagccgacgaactctcacggctcgcgtcctcgcgagcccagaccccaccgggcgcctttgaagaaaggcttacccagccgtcggcgcgacccgaccccttaggggagacggatgcgcctgaccggcccccgaggcccgtcggagtccaggcctcgggacccgaagggagcgctccaagctcccttagattgattgcttggatctctgagatccaaacatacctcacagataagactctacctgaggaccgcgaagggagtgaacgcgtacaacgcatttccaaacgctacgtgctggtagaagggaccctctatcggcgcgcggctaacggaatcctcctgaagtgcattcctcaggaacaaggcgttgagcttcttgctgacatccatgagggcgagtgcggagcccattccgcctcgcgcaccctggttggcaaggcctttcgtcaaggattttattggccgacagctctcaatgatgcagtcgatctggtccggcgatgcagagcgtgtcagttccacgccaagcaaatccatcagccggcccaggccctgcagatcataccactgtcatggccatttgctgtctgggggcttgatatcctgggaccgttcaaacgggccccgggcgggtttgagtatctgtatgttgcgatcgacaagttcactaagtggcccgaggcttatccggttgtcaagatcgataagcactctgcccttaaattcattaagggcatcacggcccgttttggagtgcctaaccgtattattacggataatggcacccaattcactagtgaactcttcggcgactactgcgaagacatgggcatcaagctctgcttcgcctcacctgcccaccccagaagcaatggccaagtggagcgcgccaatgcagaaatcctcaaaggccttaaaaccaagaccttcaatattctcaagaagcacggcgattcatggatcgaggagttaccagcggtgctctgggcaaaccgaaccacaccaagccgagcgaccggggaaacgcctttcttcctcgtctacggcgcagaagcggttctcccatccgagctcaccctgaggtctcctcgggccaccatgtactgcgaggctgatcaagatcagcttcgtagagatgacctcgactacttggaagagcgaaggcggcgcgcggccctccgagccgcgcgctaccagcagagcctgcggcgctaccatcagcgccacgtccgggcccgatcactctgcgtcgacgacctcgtcctacgccgcgtccaaacgcgtgctggactgagcaagctctcaccaatgtgggagggtccgtatcgagtgatcggtgtcccccggccgggctccgtacggctggccacgggcgacggcactgagctgccaaacccgtggaacatcgaacaccttcgtcgcttctacccctga

SEQ ID NO: 70561 - DNA, 568 bp, Oryza sativa
  Clone ID: PAT_MRT4530_71120C.1
aaatgtcaacactatgctttattaattgataaaaaaaacaaacaagccacatatgcctgcagtactatacatatatacacacataaagcacaaagaaaaatcaatacaggctagtaggccggtcatactgacccatttcagatttgtagaagtaggacgaaatgagtatatgaagcaccactgatcgatacactctcgggcacacacttagaaaacacacttaattacctacttctcacaacacacgtacacaaattaagctgcgatcacatcacatggcgacgtacgcacgtataataaacataattcatactatacgtacagcgctggaagagttcacagatacctgcaggcatatatgtacggatcagtagtatattgtttaattacgttacgatcttatagggaggcatatgtgagtctccacgcgggcccatatggccgccgccgccaccgtggccgtggtggtggccgccgccggggcaacagccggacgacgtgtcgtcgttggtggatgccaacaacgcgcggcgcccgccgtggccggcggcatggtgaccgcggccgc

SEQ ID NO: 70562 - DNA, 1132 bp, Oryza sativa
  Clone ID: PAT_MRT4530_71121C.1
gttttagtactaccacactcctactgcacctagcctgacaatgaaaggttgcaaagaaagttttgagtttttagccgttgcgcagcaaatttgcaatcaagaagaagagagggagcgaatagcgatggagcagagcgccgggcagaggagctccgtcgccaccaatgccaccgtcgatctggaggtactcgactgcaccgtctgctgtcatcccctcaagcctccagtcttgcagtgtggagttgggcatgtcatttgttcgtcctgccatggcaagctcccggacaagaacaggtgccacgtctgcgccatggacaccgcgtacaaccgctgcttcgccgtggagcaaatcctgaggtccatcctggtgccttgccgcaacgccggctacgggtgcgacgccaagacggcctaccacgacagcgacagccacgaggacgggtgcccgcacgcgccgtgcttctgcccggagcccgggtgcggcttcgccggcgcgacctcgtcgctgcccgcgcacttcaccggcggccacggctggccgcccgccaccgagttcaggcgcgccagggcgttcgacctgcaggtccaggagggcaagcgggtcctccgcgacgtggacggcggccacctgttcctggtcgacgtcgcgccggccggacccgccggcctcgccggcgccgtgctcctcctggatccccatgccggcgcgaaggcgaagcccaagttcgagtgccacgtcgcgttccactgccgcgccacggggtggcggtcgtcgtcggagttcccggtgaggagcacggccctcgacggtgggtcgttgccggccgactgctacgcgttcgtcgtgcccagggttgctcatccgcccgccaccgccagcatcatcgtgtccgtctacgacgtctccaagaaacgaccacgcaacggtgacattcggcaacacctgaagtcccgggtcaactaattagtttttgtatctctaaacctagtactcctactccctctagtacaatgtaccaactaatcatcaccctgatgatgcttaatcttccacaattgtacgaactgatcatcaccctagtgataaggtgagcgagtactgcgcagaagtggaatttgttttgcttttgtc

SEQ ID NO: 70563 - DNA, 2832 bp, Oryza sativa
  Clone ID: PAT_MRT4530_71122C.1
tttttttttttttttgaacaaatgaaaattcagatgggagcatatttctgagaatactgcacacatgcaaaattgcaaatggcatatttctaattgacatttagagcatgatgtctataagcaccataattttcgtaacgtttcagagcttttgacacaactgtaagtatcaaattgtccagccgatcaaactaaccaaaatatgaaaagggctgcaacagtgcaaatcgagagaacatgacactcagggctctgaatataatttctctgaacgaaaattctcggtccatcttttattccgctgaggacgcagaaatcaagtgggtgcgtacctctcgtcaccgtcaggtattgtagatcgtatctgtcccgcaccttgtgctcaagtgtatccgcttccttgctgcgaccatgtcggcgagaaggtgctacagttcagttcatgcatttcaggccagattaaggacggcgaacaagacagcattcctgtggcgccatcaccactggcatccattaggacctcgatcacttaactgtatgcaatatatcctcctgttccttttcccagcttcctgatcatgcaaccatggttttgatcactgcgaaaaccatgggcgtgaaagaagtgtagaaaagaaagaagaacaggagaaagggagcagaacatatcgaagctggaggtgatgctgggcgaatggaatcgctcatggtgttgtttgtctagaacctgcacacaagcaacaacacagcaccaacaagcgttatcaaaatgaggaaaaagggtttgagcaaggtgaccttgtcctcggtgaacatggaacggggaaggagtatcttgaaggattcggcatccaccaagaaccgacatggcgctgcatcaataaaacgagaacctcccaggcggccattagttcagatgtgaggaaggaaggaggtgcaagctgaccacatgattaagatctagtccaccaccatcgataccaagaacgcctcgctgcctcgaccatgccggcggcgacgcctggatccggcggcgggggatcacaggcacgcgatgaggtggtcgcccccctgccgcgccgccgccttagctgccgcctcctgttcgacgaagctgatgccgaaggtggacggccgggcggacgatggagaggcctcctgatccagttgttgccgctatcgcttagagaggagctgcattgatgtgcgctcgatccgccgccgaggatgtagcccaatccacgttgccgtcgaggtcgatgccgccgctcgatctgttgaggcagacctccgcgtcggcactgccgaggtcctcgtcacatccggcgacgaggagcggaggatgatgcaacaggaagggggcaagggtggcgcctgatggttggatggcgtccaccgtcctgttgccaactcacaactggacgacgcgccgccacacctccaacgccgacaaccagcccggatctcgcccgccattcgccgatcctaaaaaaaaggggtggacagcgacgggagtagggggcgatggtgtcggcgctgcgtggacgggggaggtggcggcacaagggggacgccgatgtggacggggagggtcatctcggcggcgtcgaagccagctctacctcaaacccccgccgctggatccaggcggaggacgaccgccgtcgccggatcgggcgagggacagccccgccgagcccgtcgcccgccgttggcgcaggccatcgtcgtcgctcgctgctggcgcaggccgtcgccgtcgcccgtcgttggaggaagctggagggaccccgccgcctgccgcccggcacaccgaggaggcccaagccggcgaccgcccgccgcacccgcaggccgtaatcgtcgctgccgtatccataaaaagtggagatggaggcctcgtgccgaattcggcacgaggcctcgtgccgaattcggcacgagggcagctgaccctcactccctcctctctcctctcctgccccccacggcggcggcgggatggcggattcgacggcgaggacggtgaaggacgtgaaccctcatgagttcgtcaaggcctactccgcccacctcaagcgctccggcaagttgtttgtagccagccaggagctcctgttgttaggcaaccttcgaatatctttttaccagatggagctccctgagtgggttgacatcgtgaagactgcgaggttcaaggagctccctccttatgatccggactggtactacacgagggctgcctcgattgcaaggaagatctacctgaggcagggtattggtgtaggtggcttccagaagatctatggtggccgccagaggaatggctcacgtcccccgcacttctgcaagagcagcggcgctatctcacgcaacatccttcagcagctgcagaagatgggcatcatcgatgtcgaccccaagggcggaagactcatcacctcccagggaaggcgtgatctggaccaagtggccggaagagttgatgttaccatcgcctgaacagatccatggatcttcaacccttactgcctctcatatgtttggtggttgagtcggctacagtttgtttgcagttttgaattagaacatgccctatctttggttgagtcggctacagtttgtttgcagttttgaattagaacatgccctatctttgctggctcagagaattggaagttggatgcatctaggtgtgatactgcagtatgtgttttgtcttttcctgaatgaactcctaatgcactgtcactagttccggacaaaagaaaattaaattaagccccctggaatgtctttgctgatgccagtattaaaaaacccacgcgtccg

SEQ ID NO: 70564 - DNA, 204 bp, Oryza sativa
  Clone ID: PAT_MRT4530_71123C.1
gctgagctgaaggagctcctttatggaatccttgatcttgatcctagtactaggattggtttttctgaggttgctccttcttttctcttcgttgagttgaagaagaccaatggtgacacattggagtatcaaaggcaggtgaaagaggacattaggccatcactcaaggatattatttggtcattgcaaggtgatcaacagtag

SEQ ID NO: 70565 - DNA, 178 bp, Oryza sativa
  Clone ID: PAT_MRT4530_71124C.1
tttatctccctcggggggccccatgtcctgcgcccgaggaggccctttaagaacctgagtaacacacaagttttggcagcgggtgacgatcggcattactgtgtactcgaaagcggggaatgcgatacccccagggattcacagagagagagagagctagagagcctcgaaccccctg

SEQ ID NO: 70566 - DNA, 512 bp, Oryza sativa
  Clone ID: PAT_MRT4530_71125C.1
gcacgaggcctctccctctctcggcgccgagcacgagtgggcggcgtgcgcgtgccggcggctggcggccgccgcgtcgtccccgtcgctcgggctgccccctccgcggcggcgccgaccccgacgatgagtgggcggcgacgacaacgagtgggcgacgacgacgacgacgacgcgggtggtggcggcggcgccgaccccgacgacgacgacgagtgggcggcgatgcgggcctcgtccctcccggatccggcggcgggagcgggggcggccggcggcggaagcggggaatccggcggcggcgcggcgaatccagctcaggcgcggcgacgacaacggcggcgggcgtgcgaccatcatcactgtcgacatgcccttgtctggcgcatggctgaggccatctgcatatgctccatgaactcaagctctgtctgtctctggtacgggatggatgttgctggtcaaggtagggctgatggtaagggaggttggagccagctgaggtaagtgcc

SEQ ID NO: 70567 - DNA, 455 bp, Oryza sativa
  Clone ID: PAT_MRT4530_71126C.1
acaacggtggggagctcaagctcgacaacgaggacctctacaagctcattgttgcctgttacctcagcttcattctaaatatcaatgtccggagtaaggaaaaactacctccttccttcttcttgtcctccatgaaaccattgatgccatccttttccctagatctaactgaccagagttggggacgactgccactaccccgcttttacttcttcatggggattgccgatgcagttgcactactttgccctccagctctgctccatgaggagagggagatcaacggcatcgacaagacccaaaacttgatattcacttgcaacaccagaaacttgagcatcatcaagaccatgagctcgatctctatcatcgcctatgctctcatggctcccaagcttgacctcctcctcctccaatttcacttgatccagtggcgtttgtggtcgaggtgctaa

SEQ ID NO: 70568 - DNA, 621 bp, Oryza sativa
  Clone ID: PAT_MRT4530_71127C.1
atgagtgggcggcgacgacaacgagtgggcgacgacgacgacgacgacgcgggtggtggcggcggcgccgaccccgacgacgacgacgagtgggcggcgatgcgggcctcgtccctcccggatccggcggcgggagcgggggcggccggcggcggaagcggggaatccggcggcggcgcggcgaatccagctcaggcgcggcgacgacgacccggcgacgacaacggcggcgggcgcagtagctttgctcaagaaaatgtttgccttttactgaaagtttttttgtcctcgcagtgcgaccatcatcactgtcaacatgcccttgtcgggtgcatggctgaggccatctgcatatgctccatgaactcaagctctgtctgtctctggtacgggatggatgttgctggtcaaggtagggctgatggtaagggaggttggagccagctgaggaaaggtcttcctgtggacctaactgaaggaatcctgaaagctatctgcatgcaagctcagggtcaaatatggaagatcaatttctcaaatagcttggttttgctacacaaatttttgttgcttgctgtggaactattgtttgattctggaagcagagatgaattcttttga

SEQ ID NO: 70569 - DNA, 399 bp, Oryza sativa
  Clone ID: PAT_MRT4530_71128C.1
aggaaaatctcatgcaattatatgctcgaattgaaacatatcattatttctttgctttgcttcaagatcacatggagtcatggaccagagatcaaatcgaacaaaaaaaagaaaaaaaaatgggggtgaagagaaacagagtggttacccccagggcatgtcgagttgtcgactaatcttggtgccaccgccgggtggagatctcgctgctccggcggatcccgaaggcggggagcgcgtagagccacgccacggaggcgcacagcgccacggccgccgcgatctcggccggcgacggccgctccgcgaggccggccccaccggcgcgccaccgccggaagaggatgtagagggaggcgagccggacgcgtgggcggacgcgtgggcggacgcgtgggg

SEQ ID NO: 70570 - DNA, 221 bp, Oryza sativa
  Clone ID: PAT_MRT4530_71129C.1
gcatcctaaacgaggaagttactccagatccgccaggccatgtacaaaccagcaatgcctaatgctggtcgctgcatggacacttactcctggtcccagatgctggaccgacaagctcagccggctaatggcgacacagaactgatggagactgttcacttgatcgcgggatttcaccatgaccaaccaaatctgatagcttcctagcgacttgacagatt

SEQ ID NO: 70571 - DNA, 1670 bp, Oryza sativa
  Clone ID: PAT_MRT4530_7112C.1
ttcccgggtcgacccacgcgtccgcaactgttctcctgcacattttgtcttgctctcaaaacattgccacagaatattgttcattcttgacacgtagaagagccatgaggccatcactcttgcagtatctgaagctgctcctgttacttgcccttggtggtgtcaccaccatgcatgtgcctaaacaagatgtgccatcatccctggaggaactcacccttgatggccatttcagcttccacgatgtgtctgctgctgcacaggactttggcaacctgtccagcttcccgccggttgcggtgcttcatcctggctcagtggctgacattgccacaaccatcaggcatgtgttcttgatgggtgagcactccacgctcacagtggcagcccgtggacatgggcactcgctgtatgggcagtcccaggctgctgagggaatcatcatcagtatggaatccctccagagtaacacaatgagggtgaaccctggcgtatcaccctatgtcgatgcttcaggaggagaactctggataaatgttttgcatgagactctgaagtatggtttagcaccaaagtcgtggacggactatctccatctcacggttggaggcacactgtcgaatgcaggagtcagtgggcagaccttccggcatggcccacagatcagcaatgtcaacgagctggaaattgtgactggaagaggtgatgttatcacatgctcacctgaacaaaactctgatctcttccatgctgcccttggtggcctaggtcagtttggcgtcatcacaagagccaggattcctcttgaacctgctccaaaaatggtaaggtggctacgagttctctacttggatttcacaagcttcaccgaagaccaggaaatgctcatttcagcagagaagacatttgactacatcgagggctttgtcatcataaataggacaggcatcctgaacaactggaggtcgtccttcaatccgcaggacccagtgcgttctagccagtttgaatcagatggaaaagtgctcttctgccttgagatgacaaagaacttcaaccctgacgaggctgatgtcatggaacaggaggtcaacacactgctgtctcaacttagatatatgccttcctccttattccacacggatgtaacatacatagagttcttggatagggtacactcttctgagatgaagttgagagctaagggcatgtgggaagtcccacacccatggcttaatatcatcattccaagaagcatgatccataaatttgcgaaggaggtctttgggaaaatcctgaaagacagtaacaatggtcccatattactctatccagtgaacaaatccagatgggacaacagaacatcagtagtcataccagatgaggaagttttctacctggtggcattcctatcctcagcacttggcccccataacatcaaacatacattggacctgaactacaggataatagagttctctgacaaggcaggtattggagtgaagcagtatctcccaaactataccacagaacaggagtggcagtcccattttggtgcaaggtgggacacatttcaacagaggaaaaaagcctatgaccccttggccatcttagctccaggacaaagaatatttcaaaaggcatcagcgtcactacccttgccctcatga

SEQ ID NO: 70572 - DNA, 123 bp, Oryza sativa
  Clone ID: PAT_MRT4530_71130C.1
atgcagtcgaacaacttggcggcgctgaggttgaggcaggatggagcattccacatgatgctcattgcattggctgtggccggcaaagtcagcaagatcaaactgatcagcccggaaggctga

SEQ ID NO: 70573 - DNA, 204 bp, Oryza sativa
  unsure (1)..(204): unsure at all n locations
  Clone ID: PAT_MRT4530_71131C.1
gccatttccacacacgtagggtagtacgtggtataaagaagtcgtgtcgtgtggtcgtacgtcgtgtcgtgtcgtgngtaggtgcccgcgggtcagtatgcccaagccagctccgtggtgtgntgtgttgttgtgtagcccaaccgtgtgtgtccccacagtccgtgtgagccgccgtcgtgtcacgtgtgttgccggtggtgt

SEQ ID NO: 70574 - DNA, 144 bp, Oryza sativa
  Clone ID: PAT_MRT4530_71132C.1
cggcagtgggtagaagctcaacggtggtggctggcgacgggcggggtggacaagcgtggcacaatgacagatgtcaggcgactgtgctatgtcatcggcaggattgttggcaagcgtggccttcccgcgacagaccgggcatga

SEQ ID NO: 70575 - DNA, 388 bp, Oryza sativa
  unsure (1)..(388): unsure at all n locations
  Clone ID: PAT_MRT4530_71133C.1
ccccttggttgccgttcnacccccggaaccggcggcgcaccaaggtccgcntgccggacgaggtcgacgcgncatgggacggcgcggagcacctgcgcacatcaacaccctnccctgancgcgcaccccctcttccggccgaaccgacgctcgcgaaacgccggctganccatgaagtggcaatggcatcgtcatcttancgaatcttactgcaatgcatggcgatcaatnactcgatctaagagtaantttgtggatgtgaagttccattttgagaaatttnactcgcaanctncaataaattgtgtatattaatcatcagatgagctttttccccagttcaatatatgtttttcaaataaaaaaaaaaaaaaaaaaaaaaaaaaaa

SEQ ID NO: 70576 - DNA, 150 bp, Oryza sativa
  Clone ID: PAT_MRT4530_71134C.1
ctactttcctccaagtgaagcatctgcaacagctataacaccaatttgatggattattgtcactgacatcatcaccagcatgtgtacttcatcggccatcttcaccgtcggctggctttcgtcaccaccgaccggtatcctcgccttcat

SEQ ID NO: 70577 - DNA, 765 bp, Oryza sativa
  Clone ID: PAT_MRT4530_71135C.1
atggaggcggcggtgcccagccgtgtggcgctctccgcgagccggctctccaaccaccaccaccacgcggtgggaggagaaagatatgcgatttacaggggaaggtgcccgaatcctgccattcctatggctctggcagcagcagctgcaccagggaaaggtggtggcgtgcttgatcggccaatagagaaagttactcctggtcgccagtctgaattcgatgttagaaaatcccgcaaaatgacgcctccgtatcgagtcctcctccacaacgacaactacaacaggcgtgagtacgtcgtccaagtcctgatgaaagttatccccgggatgaccgtcgacaatgccgtcaacatcatgcaggaggctcatgtaaacgggctgtcagtggtgatcatctgctctcagtcggaggcagaggagcactgcacgtcgctcaggggcaatggcctccggagctcgattgaacctgcgagtggtggctgctgaagaagaggctctgctgtttcgatgcttatagcttgtagatagcccccatcaaatctagattaaccgcaacgaattaattacagtaaaaaaaaattgctgtcatgcatcaggatgaacacggtataccgcttttgaagatgtaaatcatgttagtcacgtagactaaacgtagcatttttcagtatgaaacattggtcacatacttgttcatttggagctgtttcacagcccgcatcttgcaattgtttgaaggtagtaaactgctacttctagctt

SEQ ID NO: 70578 - DNA, 387 bp, Oryza sativa
  Clone ID: PAT_MRT4530_71136C.1
acgcgtacgcgcggacctagacgcaaagacgcacggcactgacaccatagacgggcggctggttgggctcctcgactagatgagacgagcctatgtcctacatatgcccgtcctctattgaacatatggggctgacagggtgacaacactacttagggataaattcttcttgtaaagtcgtttggctactggtaatcaagttaggaaccatgcatggtgttattaagttgggctctactcggctagcgccctagatgacttgcaagatttctaactggagcgccagtgtccaactcattgagtagggaacactcctacataatttgagtgcgctgggtattctgtgaggtgcatatagctacatgaatggattatttgcatgatctc

SEQ ID NO: 70579 - DNA, 1217 bp, Oryza sativa
  Clone ID: PAT_MRT4530_71137C.1
aaaccctccgccgccgccgccgccggccgcggcttgtcgccgccatgcgccgcttcgtcggggccctccgcccgctccgcaccctaaccctcagccccatcccgacggcgctccgcgtcctctccaccgcctcggcctcctcttcctccgcctccgccgccgcctcctcatcggactccgactccgccgccgccccggacgccgacttcgacagctcggagttcgcgctgccgccctcggggccgacgccgccgccgccgccgcagcaggcgcgcaacccggtctccgcgctccggaagctccggttcgacccctccctccgcgcgcgcgccgacgaggcgctgttcgggaaggagaggggtggggtggacgatgcggtggaggaggagcggtcgcgggaggttgcgctggccctgctcgaggccgcgctcgagccgcccgacgacgacttgggccctggcgaggtcagggaggaggaccagatgtcgctgtccgtcggcatcgtcggcgcccccaacgccggcaagtcctcgctcacaaacaccatggttggaacaaaagtggctgcagtgtcccgcaagacaaatactacaactcatgaaattttgggcgtgctgacaaaagggataactcaaatatgcttttttgacaccccagggctcatgttaggccaccatggattacctcatagggatgtcactgttcgtgtagagagtgcctggagctcaattaacctttatgatttattaatagtcttgtttgatgtcaacaggcatcttaaaacccctgacacgcgagttgtcaagttaatcaaacggttgggtgctgaggtaaacccaaatcagaagcgtatattatgcatgaataaggtcgaccttgtggaagacaaaaaagacttgcttaaagttgcaaaggaatttgaagatcttcctgcatatgaaaggttccccttagtctgcaggtacttcatggtatctggactaaaaggcaaaggggtcaaagaccttgtacagttcttgatggaacaggcagtgagaagaccttgggatgaggaaccaactacaatgactgaagaggtcatgaaaaccatctcattggaggttgtgcgggagaagatgctggatcacatccaccaagtaaggcttcgtttgtttcatgcccagggaaaaatatttccagtgcacgcaaaacgagaaaactcattagcacatgattaa

SEQ ID NO: 70580 - DNA, 918 bp, Oryza sativa
  Clone ID: PAT_MRT4530_71138C.1
gtcgaccttgtggaagacaaaaaagacttgcttaaagttgcaaaggaatttgaagatcttcctgcatatgaaaggtacttcatggtatctggactaaaaggcaaaggggtcaaagaccttgtacagttcttgatggaacaggcagtgagaagaccttgggatgaggaaccaactacaatgactgaagaggtcatgaaaaccatctcattggaggttgtgcgggagaagatgctggatcacatccaccaagaaattccttatgtaattgaccatcgtctgatggactggaaggagctaaaagatggttctcttagggtggaacaacacttcattgcaccaaagcaaagccaacgacagattcttgttgggaaaaatggctccaaaatcgggagaattggtattgaagccaatgaagaattgaggtccatattcaagcgagatgtccatctgatcctccaagttagagttgctaaaaagaggagtgcatgaacagattttaaagctcttgtatagacaaccttttcccaatttgggaactcaactgcaagcattcagcgcatgcagcatgctccaacagcgtgtctggatacagcgtgtttgatgactattttgaattgacagcgcctttgccgaatcaagaacatatgcccaagcattcgaaggatgcgtagtaaaatttttccaatgttgcagttgtaaggatttccttctcagatgctgtgggctgcacagcccgagtatgtgtatgttgtgtgcgtgatatagatatatttgtactaggctactgaggccattcgatttttttggttcaaataagttttcccttagcctgtatcctgaaaggtggtttatgccctattgtaatttgacagcaacgtacttacaaagaaatgggtttataaggattgtcttttcccc

SEQ ID NO: 70581 - DNA, 623 bp, Oryza sativa
  Clone ID: PAT_MRT4530_71139C.1
ttcctaccgaggtccttaggacctccaccccggtggcggccgctctagaactagtggatcccccgggctgcaggaattcggcacgagtgtcatcgtaccttacctacttagaatgctattgtgacagttcttttgtcacacgtgttcaaggagatgggttaataatatcaacaacatctggaagcacagcttattcattggcagctgggggatcgatggttcatccacaggtcccagggatccttttcacgccaatctgtccccattcattatcattcaggcctttgatactacctgaatatgtgacattgcgtgtgcaagtgccaatcaatagcagagggcaggcatgggcatccttcgacggcaagggcaggaagcagctagggccaggtgatgcactcatctgcagcatttctccatggcctgtgcccactgcctgcctggtggactcaacaactgacttcctgcgaagcatccatgagggcctccactggaacctgaggaagagccagtcgtttgatggccctgttgcatgatcaatgaacttctggtctggaaaattcgatgcgtctgttgaattggtagatgtggtatttcaaagcatctcctcaacagtccaagag

SEQ ID NO: 70582 - DNA, 438 bp, Oryza sativa
  Clone ID: PAT_MRT4530_7113C.1
atggcaaaggggcggctgcagcgcatgcacccacctatggtcctgatgcggcgaggtcggggacagcggcggaggtgtggcggcgcagcgacaagcagaagcgtgagcaaacgtggcgaaggcggtggcaacgacagggagcaaccgaaaaactactccacggccttccgttgcgacgggacaaagcacgtcccacatcacctccactacaccgcgtccccgagcaccaccatcctgtttccgtggaagttccacttcacccgccgcgcctccaccaccttctccccgtcgatactcaccaccacctccctcaccaccacctccctgtccctcgaakcgcactcgtccccgcggsacaccaccgccacctcgtgcgttgcccctcctcccggaatttgcacctcgtgctgtgagctggcaggccgatgccagcgctag

SEQ ID NO: 70583 - DNA, 439 bp, Oryza sativa
  Clone ID: PAT_MRT4530_71140C.1
tcgtaatctagacaccacgtctaaactactaggtactactctaatatcatcgtcatgacatagatttttttttgcttgtggttttcttgaccggtgcagcagtccgttggaggcagaactccttgcctatagggaaggtattaacttggttcttcagtggacactccttccaattatagtggagactgattgtttggtggagaagaacctcatctaatctgcgatgaaagggcgctctgaacttgcattcattgtcagggacatagaagaactgttatcaggaaacatggaagtgatcatcgcgaagattcagcaaaatcagaataatgttagccatactctagctaacagagcccggtgtgaatctcttactgagttttgaccggatgataaatgtaatttcatctcacattttgtttgtgaggactctttagttgag

SEQ ID NO: 70584 - DNA, 147 bp, Oryza sativa
  Clone ID: PAT_MRT4530_71141C.1
caaaacattacattattcattattcgggcgggatcactatctcattccatgcaacacatcaacgctgtgatcctactagctatgaggcaagccaactaaaccttttactggccggcggagaaaatgcttcactgctggagctcaacc

SEQ ID NO: 70585 - DNA, 288 bp, Oryza sativa
  Clone ID: PAT_MRT4530_71142C.1
atggcgatgatgatggagatcaccggcctcctcctcctcaaccggcgtgcgtcgtcgagcctctcttgctgtcgcgccctccttgcagcaccaaacaggagcattaggacggcctccacagcgtcgtcggacgagggaggagatggcggcgggggagaggctggaggggagcatcccaagagtgccatgcaactccctccgctcctcgccatgactttcgggatgatcaacctcctctccaaggtcacgacccggccaagtcccaagtccacccgagatcagaactag

SEQ ID NO: 70586 - DNA, 292 bp, Oryza sativa
  Clone ID: PAT_MRT4530_71143C.1
gcagggccatctccaccggattaactttttaaaattaaaaagccttaccacaggatttggccttataacaagggaacttcaaaccaaaacgggcggtttattaaagggacattttctaccatgggcaggagaaacatcgggggtcgtggcctaccccagaacgggaaactgaataagttctgggcgtggtacagggggcagagaacataaactcgtgctccaagccaagatgaaaaaacaatatatttgctttatggcccaaaatttaaacattaaaattttccggacccgg

SEQ ID NO: 70587 - DNA, 2015 bp, Oryza sativa
  Clone ID: PAT_MRT4530_71144C.1
ggagagaactagtctcgagtttttttttttttttttttttttcagacgcgaaaaacacattccatttacatagatatatatatcagtagaggtctaagatcacgacgttcatccagcaaaaaccagctttcgactttgcccatatcaccggtacttcctgaatttctatttatctgtttcaggcagtacaaattcgacgacggcaaaataacttaacgagcagtaaatctaatcatgtagctgcaaaaaaggacatctggccatctaccagttgttgctgtaaccggtgtagctgctgcggtgccgcaacccatcttggtcatactgcggatcgccatggttcatgggtttgatctccacagcgcggcgcttgctgtctacctcctgcacggctccaaagacaatctcgtttgttgcctcacagcttggctcatagaaagtttgcggtcctgatgaatactgcctatgatgctgtaagtactgctggtgatgtatttgctgctgctgctgctgttgctgctgctgctgaggtgcgtctccgttccaaccattgaactgagaccgaccatgccggatgtggtggatcttttcgggctcctttgacatgaaagcatagttcttgcgtggggttggagttcttgtatccagtggtggaggcgtctcatcccgcgggatggcgtagctttcttgaaccggccaagagcgtactctagcctgctgctgatgaatgtttaaacgcttctttctagaaaaggctgcaccaactatctctgcaacagacgatttggctcccacgatgagtttaccgattgaggtaaagaacccctcttcaacctcttgtttctcagattcatcctcatttgggattaacggtggacggacagattgttttagcggcttctggtatggagggatgcttgcaatgctagcttttagtggagtctgagtctcaggttcatcttctgttgacaccatccctaataccctgcgttggagcaacgcgagcatgtagccaaagaacgcagcagcaagaagcaccgcaactcctagaggaaaaccagcttcatactgatatacacagtcatcgaagttgagttgaatctcccgaatcgcttggtttcctctgtcaatcaccaaaagggagcagctactgccaatatagcggacttcaaaatcagtagaaaattttgcatcatcacttggtccatcaacatgccctcctctgcttgatttccccccagcaatagttgtaacccctgtgtcactgatctttctaatagccatgttcatagcatcagccacataaatgttacccctgccgtccaccgtaaatccctttggatggttcatcctggcctctcgaggccttccatcaacatgaccaggaaatccttccggagaaccagctacaagctttggtctgctatatcgagacagcggcagggcgatcctgtagatgttgctgttcatggagtccatgacgagcagctcgccgccctgggtgacctccaccgcgtagggctcgatccccagcttgctcccgtcgaagaccgtctccacggtgtacccgccctcgtacttcaccatcgacttccctccgcttcctgtcttcgtggtggatttgagcgaccacagccgcttcatcaccgacgacgccgcgttggagaggaacccactcaccacctttgcggggtacgacgacgcggaggccggagcgacggcggcgaggaggagcgcggccagcagcagcgccgccaccacggggccgccgcctctccccccaccctccatcctcccgcagcacagcaaagcgcagcacgcaggcacgctcggtgggaatgcgaggcgcacgcttgcggggaggaggcccagatcgaggagggggaaatggtgggggaaaccgccaagaatccgagcttttcttgagcagaggaggagggggagagagagggggagatcaaaaggggaggaggcgcggagaaagagacaagcgcggtgcctcgtgccgaattcct

SEQ ID NO: 70588 - DNA, 355 bp, Oryza sativa
  Clone ID: PAT_MRT4530_71145C.1
cctaaacatacgtggagaagatcgataagagaagcgggctacactggtggagaaagagactttactcccggttcgtaacctcccaaaaaaaacataggctgtcggccgctgccgcaccggccgccggcgcgccgcccgccgcgaggcccctcgatccgccgtcgcgccgcagcgccgccctctggcgggaggccgcgggcggggcctccgcccctccgtgccgccgcgaggccgccggccgcccgatgggatgatggggagggaaggagaggagttagaggagaagttagagaggtggaagaggaagggatgatgggggagggaaggagaggaggaggaagaggaagagatggga

SEQ ID NO: 70589 - DNA, 231 bp, Oryza sativa
  Clone ID: PAT_MRT4530_71146C.1
atggatgaagctgcacttgaactagctggatggagcagtacaggtttggtaggaaaagagatgatgattaaggaactagtaattaataagttcctggatcaattagtggtgttaattctgggaattatcagcatacgagatgtcgggggaggatattgtggtcatttcactgatgaggaatcgaatcagctgacaaggagagaacaatttggatgcagtttaaacatatga

SEQ ID NO: 70590 - DNA, 1716 bp, Oryza sativa
  Clone ID: PAT_MRT4530_71147C.1
ggcgagggatgtccctgtcccactgcacggcatgccccttacttgctcgataaaagttgcgcaagcaaagttgttcgaggcacgctcctgttgatttctctcaagagctcgagtcttgcatttgtgtcggttgaccacagcttggctgagaggtattgccgcgtggctccgccgtggagcccgcagcctcctatgccttccgctcgggagttggcggctacgttttgccacagcagccgtgcgcggggcgaggatccccattttttttaggcgccggtccctccgtcggagcggcttaatcttcgagatgtgatttgctggagtcacgctcctgttgatttgtctctagaggccatgtcttggaggggttacagctggaaagaaacagcagggaagactcagcgttttcttgttgcgtaggcgcttgagtctccgcttcttcttgttgtttatcttctcatgcgctctgctcccctcgatcaacctgcgttagtctaggtggtttaattggcgagcgtggaccaaaagcaacagagcaggctgaaagagggtgcacggctgcctttgcctagagaggcttcctattcctcctcccctcctagtgtgatagttagagaagccaagccgaggcgttcgccttcggttccttctctagaagaggatgactcaccagtgcaatgcagagttacctccttggagaacatgtcgccagagtcggagcctcaaagaactctcttgtcaagggctggttccgcgagtcctgcagaattcagagtttacaagcccactggctgtgtggatgctgcaactcaaactgatgacctcggcagaaggtcagtccggaaagtgcccgagatgcataagaagagtttgagcactgatcatgactccgtagtccgggaaattactgagtaccggcaaagccaaccacgccggtcagcagagctccaagggatcgccagggaggccatgtcccagtgtcatactccactgagcataccttcatcccgtggcaagtcggagagtttagagtccttgatacgagcagataacaatgcattgaatagttttcggattcttgaagaggatgatatcattatgccaacctgccccaagctgaggccagcgaatgtactaatgcaacttatcacctgtggttcgctttcggtgaaagatcatgagaatatcagacttgttgaaggatacaagccaaggttcccaaacatgaagttcccgtcaccgttaatttctcgtaccatgatgatgggtgagcttgattacctgtcagagaatcccagattgatgggtatgcgtctggaagacaaggaatactttagtgggagccttatcgaaactaagatgcaaagagatgtacccgctgacagatattcagcgcttaaacgttcttcttcctacaatgcggaaaggagcaacgagacgctagattgcgcgagacctgacgaagacaccgtcaacacatctcgcgcaaggtgcctccctcggacgccgatactgtcatccttcctgcaccccaagagcgaggcaatgaagtcaccgatctccgactgccggaggagctcgtcggccggaccagactgcagccttgcttcatcaggagacggcagcaagaggttcattgacgccacaggagcaccgggcagcaggatagactctttcaggaaggaggagaagctcgtcaagatcgaagaaagttaa

SEQ ID NO: 70591 - DNA, 162 bp, Oryza sativa
  Clone ID: PAT_MRT4530_71148C.1
cgaggccccgccgggcctcaaggccggcgaccgcccgcgccgtctgcgtcggcggctgcgagcgcgtcgtcgtctccgtgtccatcgaggactccgacagcgggtccggccgccacgccctctgggtgttcgacgtatagaccatgaactggaccgtggtcc

SEQ ID NO: 70592 - DNA, 687 bp, Oryza sativa
  Clone ID: PAT_MRT4530_71149C.1
atggagggtcgtcgctttgacgtcattaatctaatgatgcaagacattgccatttcaaaggggacatttggacaaggcatctactatgctctctatatcatgcgcttgattcaaagaaagttggggcatgctggagataatttgaaagaacacaaggaggataagcctcgccgccaactttccattcctagagctccccaagtgcaccaacctatctttgatcaaggcgcaagcacaagtgcggcacctcctcctcatggatatgatcccaataccttcttccatcctcaatatgcatattttaggatacaaccaaatgaatatttcaacccggtgcttagggccatcaataccctaagtgaaaacatccaaaggctcaccaccggacatgaagccatgtacgaggattctcctagacggcttgtgaaggagttgccctgtgacctctccgagaagattgtggagaaggcccgacgccggttgggtgggatggggcggcacggggaggatattccccccagatgccggatggggggatccggccgattcggccggatgcagccgcccgagcgctcgggcgagcagggacgagcgacatgtgggtcgcgtcacccctctcaccacgaggcgagctcggcaaccaggcaaggcgacgaccgtggaggcgagctcggcagcggcggctag

SEQ ID NO: 70593 - DNA, 492 bp, Oryza sativa
  Clone ID: PAT_MRT4530_7114C.1
atgccttcctccttattccacacggatgtaacatacatagagttcttggatagggtacactcttctgagatgaagttgagagctaagggcatgtgggaagtcccacacccatggcttaatatcatcattccaagaagcatgatccataaatttgcgaaggaggtctttgggaaaatcctgaaagacagtaacaatggtcccatattactctatccagtgaacaaatccaggtaacaagctttgtctctgaatcacagataccatggagatgcatcattaagtgaataaccattcttgttaatcatttcatgcagatgggacaacagaacatcagtagtcataccagatgaggaagttttctacctggtggcattcctatcctcagcacttggcccccataacatcaaacatacattggacctgaactacaggataatagagttctctgacaaggcaggtattggagtgaagcagtatctcccaaactatacc

SEQ ID NO: 70594 - DNA, 479 bp, Oryza sativa
  Clone ID: PAT_MRT4530_71150C.1
acgtgaaatcagaccttcgttatttttggcacaatcagcatgacatacgtcggccagataatagcggcccctctcatgtttaattacaatgcaccttatctctctgacgccgatgatttcgggtcttaattaaccaccttatttctgaccaacttacaatctgatgatatcccgtcaggaaaaaaaaaacttacaatctgaacaatctgatatacactagtacaaagtaacgaactcgatcgatccacacgatgcaacgaaacacgccgccgcgcgctgctcaactagctagtactcgtcggggcctccgccgaggaatccggtcatgtggagcacggcgttgcggacggcgcggaggtcccggcccttgagcgtgcgcccgtgccccacgcacaccgacgaggcaaccgtcctcccctcggagccccgcctcgccgccgcgacgtaaacgtgagggggcacaatcctcgacgacgcgc

SEQ ID NO: 70595 - DNA, 111 bp, Oryza sativa
  Clone ID: PAT_MRT4530_71151C.1
gatcgtgatttaagatgctatttaaagatccaggatggcatccctgttccggtggtcactcacgggaacagcagccttgctgatctctcttgctgcagtcgtattcattga

SEQ ID NO: 70596 - DNA, 211 bp, Oryza sativa
  Clone ID: PAT_MRT4530_71152C.1
ttatgtggtggttttttatgcttggatgctgtttgtatgggtgcttaaccttgcaccacgacggcggcggcaagaggaagaaaggcggcggcggcgggaagaaggcgaagaagaaggtggcggcggcggtgagccataagcagcggaagctgtagagccggctgtcgttctacgacctgtctagcggagggatggtgtcgccggaggacct

SEQ ID NO: 70597 - DNA, 2090 bp, Oryza sativa
  Clone ID: PAT_MRT4530_71153C.1
gttttttgtttcttgtggagcgggggacggaccaccagcctccaggttagtatttttttttttttttttagaagcatatgagaccagacttgtagctctcataacaggttgtaaaatgtaactagtaaagatcttttctgcaccacgacatacaatgtaaaatgtattccagatatgttaaaggcatataacagatgagccttgtgcccacagtttaaaacacgctactctgaatgatcggtcaaaaagacccactgaacgggtacatctggggtgagagtcgcaacgagaagaatgaagtgtatagcattgcgtccttacacgagtaagacagcattgatacagccatcattctctgggttgtttgtaacttgtgcatatttaccccaaacaacttttccagcaggggttaccagaccaagttcactaacgttcacctcaatgatagttccccttgtcaaaacaccaagagtagagtacatttgaccatttgggtttttcttcacagaaattatgtcaaggttgaaagtacatttcagctcagggtgagtaacatgggcctttgtgaaacgaaggccagttggcctaataaaccgttcatactttggtggtttccttgtaaacccaggtccaacaaaggtggccttagtgaccattctcttccactgtttggtttttctcttgccagttcgtaaaactttgaacatttcttcttcagccacaggtctgacctttggcaaaggaacctcccatttgccagccttttccatcctcttttgcttaattgtgttgctgagaaccttggcacgttgtgtctgatcacggtccagcagatatggaggaagagcaccctcttgaacatcatcaaccttctgccgagaagttgactcgtcgtgcattttcagggtcttcttcatctgtgccttctcggcataccgcttcttggcgaacctcttacccttagcaccaagcaactgccgggcatccctggatcgcttgtgcacctcgcgcgccgcccgcttgcgcttgcgctcctcgtagtccaggcgccggccatggcgcttctggtgaagctctatgtgatctccctgcggcatggcggcggcgaaaccctagcgggagctcgagctttgggtgggggaggaggaaagcccggccggctttggtccagtttctaagaatatgcccaagaatgccctgcactgtgactcccagtgttccttagccagacgaacacgttcaacccgctccatctgtattctcttctcccagtactctggacaactatagcttagtagcatgttcagctcatccaagtgtacagcattaggaaagactcctgcctgtcggcacagtgggcactttgatttgcgctcggcagacttcagcccatcaacgatcgtaacggatgcagcagaacagctgcacaagtagcaatatatgtgaccacaggaaagagcaactggatcaaacacggtatccaagcaaatcgaacatgtcaagctaatgtcgacacgcatagagtcaaagaggttgcatgaaattgttggtttgtcatcatcgaatacgagagaacaatccccaaagagctccatagcaccgttgttcttcttgcttcttctcaagttcatgtagaaagccatcagctcacagagccatggggattgaagtatttcaatatgcagactctgggcttgagctttgaattcctgcccttgcttcgagtaatgtatataattattaatataaccattgaggaccgtcttaaatccaaagacaagaacaatgatagatacgttaattctaacaaaaatagtcactgatgccaggtgcaactcgagaagcttcttggccttttcattgaagcagccaataacggctgacatctcattgagaagagatgggaaaaaactcccatcacatacagagcaatggccggggcagcggccggcggaggagccgtcgttctcgtgggattggaggtcagagcggcatttcttgagcaatttcttgagccgcttcagccccacgcccgggagctcctcatccatccccttcatgtacttctcgtacttcttggcaaacttcat

SEQ ID NO: 70598 - DNA, 371 bp, Oryza sativa
  unsure (1)..(371): unsure at all n locations
  Clone ID: PAT_MRT4530_71154C.1
gcacgagggccaaaaaaaacgtaaaatctctttgaaaagcagaaatacgttaacactttaactatttatttaatcaaaaaaaaaccaaacgataacaaacttatttatatattttcaaaaaacaccaacaacaaacgtttctaacaatggcagcaacgaatgtttcatcagccgctccaagttatcctatggcttcgttaattatgttggtgatnncttcatcccgatgtaactgaagcaatgttattcgataaattcgcaagtgctggtccagtcttatcgattcgtgtttgtcgagatatgattacacgtcgatcacttggttatgcctatgttaactttcaacaaccagccgatgctgaacgtgctct

SEQ ID NO: 70599 - DNA, 816 bp, Oryza sativa
  Clone ID: PAT_MRT4530_71155C.1
atggatgcgctccgggaggcagaggccaagctgaccgtgtacgtgcacccctccaacgccgccgacgtccgccgcgccgtcgcccgccagctgagctcgctcctcttctcaagaaaggaaggtgaaatgggagtcatagggactgcgatttctcatggcatgatggttcttgatgcttccaagcttccacgagattcgctttttccccgcggggtgattgattttcatatatgcaggtatgaagatcgcttcgatggcgtactattggctcatgaagcaactgtagagagtgaacaaggcaaaatcctgaatggtttggtaccatactttggcgtgcccgtgcacgcaaatctgctgctttactctccgaaaccagacatgatgctggaagggaaggttgaaatgcttggaaaggaatcaatacatgccattgtattaggggtattttcagccgccatcatgttggatgatattcatgagaagttcaagttcaaaagaaaaaagtatggaggaaaatttgtaagccggtcggacaaacagcacgtgattaaaaagggaagcatgatacgattttctgtgaaaagggtggatgcagaaatgaattgtcacgtaactggttctttaatcccacctcacactggatccatgctttggttgtcagtacacgatgatgaatatgcattggaaatcaacagcgggaaaaggtcaagggataacaaaattaaaactgagcagcacgaacaagatcacagtgtgaagagttctggaagaaaacacaagtccaagtcccgaaagaggagttttgaggaaagatga

SEQ ID NO: 70600 - DNA, 693 bp, Oryza sativa
  Clone ID: PAT_MRT4530_71156C.1
agtgaccatctcttccactgcttgtttttctcttgccagttcgtaaaactttgaacatttcttcttcagccacaggtctgacctttggcaaaggaacctcccattttgccagccttttccatcctcttttgcttaattgtgttgctgagaaccttggcacgttgtgtctgatcacggtccagcagatatggaggaagagcaccctcttgaacatcatcaaccttctgccgagaagttgactcgtcgtgcattttcagggtcttcttcatctgtgccttctcggcataccgcttcttggcgaacctcttacccttagcaccaagcaactgccgggcatccctggatcgcttgtgcacctcgcgcgccgcccgcttgcgcttgcgctcctcgtagtccaggcgccggccatggcgcttctggtgaagctctatgtgatctccctgcggctgcagccaactcgtccaggagaaaactcaaaaaaaataaaaaaaaaaaaaaagcgagaacgacgaggaaacggaaagactcgcgggtgctgagatgatcagcggtgaatcccgggaggaactgggcacgcagtgaggtcaggttggaggcggcggcggggagaaggagagggggacttaccatggcggcggcgaaaccctagcgggagctcgagctttgggtgggggaggaaaaaagcccggccgg

SEQ ID NO: 70601 - DNA, 586 bp, Oryza sativa
  unsure (1)..(586): unsure at all n locations
  Clone ID: PAT_MRT4530_71157C.1
ctctatttgtcacagcagaatgtaccgatttacattgtaatatttcacaccgatgtaaagtctatgaatgaataacattgtgtgtggctcttttataagttatctatgatatcatatttcttatcttgtgctgactgccgtgttctagaatagtgtggactatacactgttcttttcatcttatatgacacggcttctatttgctatcagcacttttgggttgcaatttctatggtgtttcttatagctgctacaaccttcacacttttgaagctgtctggtaaagtttcctggatctcctttttgttttttgaccttcattatggcatgtcctatttgttatgtgttttcaagcactgtagactgtagagttaaaaagtttgcttccttgcacatgactaatattgtttggtttgtctgctaagcctctatagttggtaggatatggctttctcaaaagtcgcttcattggttactagagtggnntgtcacaatgacattcttctaagagtgattangtagttgcaaatgagacaatagttactaaaacaagattagattggtcattaacccataaatctggaaa

SEQ ID NO: 70602 - DNA, 405 bp, Oryza sativa
  Clone ID: PAT_MRT4530_71158C.1
tgcgtgctcgtgggcggtcgcgggggcttggtgaaaagaaaacacgacgaacaccctaaaacaaggacgtagtgaagagggagacccgaaccggaacaatgtgtggaggggccatccttgactagctcattccggtgccgtcgtgcgccgcgagagcgaccaagcgggtgaccgacagccacctgtggccggccggttccaagaacgccgtccgcagcaagagcaagagcaagatgcagtatcaagagctttgccaacataactagcttgaggccggcttgcagcagttcgaggatgactccaactgcaacgacccggaggaagaagacgaaggacacttgcggtttggggtcaaatctcgtgtctgaggcgggcgcgcccacgccgaggcatcacgagagccac

SEQ ID NO: 70603 - DNA, 312 bp, Oryza sativa
  Clone ID: PAT_MRT4530_71159C.1
gagggtagtccttaaagatcagaaccgattccttagagaaacctttacggtacttaacagccccgcaattgcttgcaattaccttccttacttgctcagttgttctttgggcggagtgccaacttaaaatgattccgcccccttctaaacggtttggtagcttttgtattgggggggagcgaatgcaccgaccttatttcctttgttctgcttgagcctctgagcctcttatcttgagaggcgatatgcttttgctagaaccccttttgggagagcacgctagatggaactctttcctgccatgtggcttac

SEQ ID NO: 70604 - DNA, 1121 bp, Oryza sativa
  Clone ID: PAT_MRT4530_7115C.1
tcccgtgacgcgcctcgccgccggccgccgcgcagcgccgccgcctcccctgcagtcactctgccccgcgctgtctccccgctgctccagcctctaagcgggaggaggcaggcgccggccaccccggtccggcggtttcccccgtcgctgtcgatccggcgatcctccatccttccatccttgccaacttccgagggctagagtcacattatggcttcagaggaactgagaacaagcttttcagatttagtggtgggttcttcatctcggacagacagccaagttgaatcttcaggtgatccatcatctgagggaggtgtgcaggttacttgcttcactgaggacctgcatgatgttatcctccattttcagataataaggttctctaagcagatctatgcttgggttggatgcaacacagcaaagtttggccatctatacgctgctgcaagtactcgtccgggtaatggagtgagtgtcacctctgtactaggaggaacatctgataacactggttcaggcatggcccgtcgcttagtgctgaagacaggtttgaacatagttctagcatgcaacattccaaaagacagtcccatgctcgaggctgctgcagagaggaagctgatagagaagttgagaggtttaggttatgtcagacccagagcaggagaggctaacacttccacggcacaataatgagtaacttgtgagctctcggttggtcaagaacagaaaccttgtgaacccgccctaaatctttgcaggtgatcgttggcaatcgcgacttgttcatggattgatcagacatcatctatatgcagatcattcttcagtacctaaaaactcattgaatcctacattaaggcatttgctccaagacttctcttctgatcttatctcttgagaggttgttagaggttgtctgggatgtgattcacacgtacttgtactgtggattgtcaggtacaagttggaccaaactgaagctccaaagatttatgttagtgtaagtaccattcagcgagtacatgcatgtaacaggaatacaaagtcatcgatacaatccatttgcaagctcttcaattctgggcaaaacgggtggaacttccacctactttgct

SEQ ID NO: 70605 - DNA, 3379 bp, Oryza sativa
  Clone ID: PAT_MRT4530_71160C.1
ttaccagcggctgcggtatggtaggaagatggtgacgacgacagcgcggctcccggcggcggcacggagcaacggcggcggcggctgctcacggtggagatggcggcggctttgaaaaaggggggaaaaggggcggtggccgacggtatttatagaggaaggagtaactagggttagggcgcacggcgcaagctttggaaaggcggcagctccgaatttggcggcgcggcttgcgggatttggtggcgcggccggcgcgggctcggtcggcggcggcttgggccggcgacacagagaggaggagaaggccgggccggggcggcacgtgggcttggggcttggcttccccaggccacggcggagaaataatgatgaagagaggcttggtaagctgaaattcaccattccaaagtttgatggtggatctgatctagaggcttatcttatgtgggagttgaaggttgataaaatatttcacatccataattattccgaagagaagaaattggcaatggcttcacttgagtttgaggattatgctctaatttggagtcgagatatccaatgcttcaagtgtggaggccgtgggcatgttgttagagaatgtccaaacaatcgtgccattattgtgattgaacatggagagtttgattcagctagtgaggatgctgaaaatggacaaagaaacaatctttttcagacccgagctaaagtgggaggaaaggtgtgcaaggtcatcgttgatggaggtagctgccataatcttgcaagtaaggatatgtgtgacaagcttggtctgaagttgttgcgacacccacatccatatcatgtccaatggctaaatgatagtggagatatcaagattgggcatcgggtgaaagtttcttttaagattggtgaatatgaagatgaggttttgtgtgatgttgtgcctatgacagtgtgtcacttgctgctgggaaggccatggcaatttgatcgatcatcacggcattgtggtcgaacaaatcaattctctatcaagtggaaaggaaggaattttgtgcttaagcccatgacacctcaacaaatcatggctgagcatatgcaaaagagttctgaagttaggatagaaagtgagaaagaaagagagcaaaataaatttagtgacatccacaaatcggtgagcaagagccacaagccaaatatgagtgataaaaagaaaagagagggtgagaactttgtgatgttagccaccaaatcagaaatgagagatgagtatgaagatgtttttccaatggaaacacctgctggacttcctccattgcgtggcatagaacatcaaattgatctcattcctggggctgcactacccaaccgagcaccataccgcaccaacccacaagaaacaaacgaaatacaaaggcaagtacaagagcttttagataaaggttatgtgcgtgaaagtttaagtccttgtgttgtccctgtgattttggtgcccaagaaagatggatcttggaggatgtgtgttgattgtagagccctcaataatatcactgttcgatatcgccatcccattccaaggatagatgatatgcttgatgagttgagtggttctatgatattttctaaaattgatttgagaagtgggtatcatcaaataagaatgaaaattggagatgaatggaaagctgtttttaaaacaaaattcggtttatatgaatggttagttatgccttttggtttgactagtgaaccaagtactttcatgagattgatgaaccatgttttgagaacattcattggaaaatttgttgtggtttactttgatgatattctgatttactccaagtctttgagtgaacatgctagtcacataaaacaagttttggatgtgctaagaaaggagaaattatttgctaacattgagaagtgcacattttgtacagagaaggttgtctttcttggttttgtcatttcaggacagggagttgaagttgatgaatcgaaagtggaggcaatcaaggattggccaacccctgtgaatgtaagtcaggtgagaacttttcatggtcttgctggtttttatagaagatttgtgaaagatttcagcaccatagctgcacccttgaacgagttgacaaaaaaaggtattgagtttcattggggtgaatcacaaaaggatgctttccaaaaattaaaaagatgtttgactgaagctcctttgttggtttggcctgatttcactaaaacttttgaaattgaatgtgatgctaatggaattggtataggagctgttttaatgcaagataaaaagcatgttgcttactttagtgagaaattgggaggagctcaattgaattattctgtttctgacaaagaattatatgttttggtgagagttcttgaaacttggcaacattatttatggccaaaagaatttgtcattcactctgatcatgaagctttgaagtacttgaaaggacaagccaagctgaaccgtcgccaagccaaatgggtagaatttattgaaacatttccctatgttgttaagtataagaaagatggtcaaactgaagttgtgaaccgtacactatcaacgttgctgcgtatgatgatcaagaaaaatttaaaagagtgggaggattgcttgccacttgtggagtttgcatacaacagggcagaaagaactaacatggatgcttcgaagcgtgctgcatatgtgaagaagattcatgaaaagaccaaggaagaaattgaaaagaaggcgcgcagtaatactgcaaaggtgaacaagcatagaaagaaagtggtctacgaaacaggagatcttgtttgggttcatctacagttcaggacgactccttttcaagagggggaggatgatgtgccccaacccctgtcacatgatgatgagcacatcccagctacacctgacgtaaacaagggtgatgtaaacaatggtgatggttcacatcataagtcacatgaggaaaatgaagatgacgtaaatcatgttgatggattatgtctcaacaagaacgatcaagcatatcatggtccaattacgcgcagccgtgctaggaaaatacaacaagaggtgaactcgctctttgctcaacttaatccaaatttttgtgagaattttatactacctaaatgctctacatttttattgctcaggtttacacccgaggagatcatcactacaccaagaaggatgggttacattgaggatgataagggttacgttgaggacgataaaggttacgacgaggaagaaccagcccatcccaaaccagtagctgtctacgccaacaagaagatggtttactctgcaaaagactcaacttccaaggcttgtgtgacccaaccagtcaactttctccatgcttaa

SEQ ID NO: 70606 - DNA, 750 bp, Oryza sativa
  Clone ID: PAT_MRT4530_71161C.1
atgcccagtgctctgtcgtcgctcaagtttgtgaacgagcgcaattgggaaagaggagccaaagaaagggacttgggggaggcggaagtggcagcatcagatggaggggaccgtgggcgaaggccaaggatgctccttgatgagcatatcccagctacacttgacgtaaacaagggtgatggtttacgtcatacatcacatgaagaaaatgaagatgacgtaaatcaagttgatggattacatttcaccaagaacgatcaagcatatcatggtccaattatgcgcagccatgctaggaaaatacaacaagaggtgaactcgctctttgctcaacttaacccaaattttagtgagaattttatactacctaaatgctctacctttgtattgctaaggtttacgcccgaggatatcatcactacgccaagaaggataggttatgttgaggacgacaagggttacgtcgaggaggaatcagttcatgcccaaccagtagctgtctacgccaacaagaagatggtttacgctgcaaaggctcaacttccaaggcttgtgcgacccagccagtcaaaagacgggttgcatgcatacatggttggaaagagggacaaatctaatttccaatgcatcaaaccccacctcaatatcattttccaagaaaaagttatggcatttttactgaagcctgtgcaggagctaaagggatgtgcgcgaacccgagaaaacgctttgcattctcatttatgttag

SEQ ID NO: 70607 - DNA, 510 bp, Oryza sativa
  Clone ID: PAT_MRT4530_71162C.1
ttataggcacttactctgcttctaagcatcagacatacttcgttgtgatcaagcaagtgtgcaagaggtgaactatctcatgcgctaatcttctagcctgttgtgctctctaatcgtctctctaaccttgtgcactgtacagcaccttacagtaagcaaataaccctacataaccataaccatgggcaccatggatcttggtcatgagtacaccagggaaacccctctcacgggtagcaggaaagcacaatctcattcctgaggcaacgttgcaccatggaccacgtatgttgcatgcgtactacaaagaagtgctacgctcagggtacactgtggcagcagtacgcagaggagctatacaattcaacactgtatatcttctacactctggcgaaaaccaactatgagccagtggagaccataaacatatatgtctgacatggccagggcgactacataactctctacctgggctacgcgccgagcagacgcaggctacatgaactctac

SEQ ID NO: 70608 - DNA, 645 bp, Oryza sativa
  Clone ID: PAT_MRT4530_71163C.1
ttgtaatattctcactctgaagtttttgtatggttgacagaatagtgaaatttgcttgttgagttagctatttcaaatctggtaagcatgctattagtaaagtgaaagctagcggtgcaaagaaaattcagaatgcacctgcacattcttatgccgagtcattcaagcagttgctcataatacacagaaaatgaagttattatgtatgctgcattggcaggggagcgagtgattgtggtctcccatggagcgagcatcgaggaactctgcagacacgccgatccaaccagctcagttcgcaggagaatcccaaacacttcgatctgcgtcttcaacatttctggctccaccggccattggattctcgagaggtttggagatgtcgcccatctcaacgaagacgacttcccgtagaatgcatttggtggcgatgaggcctctacgtagtgcctccaaccaaccaaccaaccggcttcttgggccatttcatgaatccgggcatgaactgttatctgtttgtctctcttttctctcaatttgacaattgtagaactttcgtgctaactgagtcacatcgcataactcacgaattcacaaattgtaattgcttgattgaaactagctactggacttttcatatttagt

SEQ ID NO: 70609 - DNA, 1491 bp, Oryza sativa
  Clone ID: PAT_MRT4530_71164C.1
atgtatctgtatttgcaaaagcgattgaacttaaaaaccaattcaaacacgaatgacgtaccaaacggaaagcggaagccaagacttggaccaatcatcacaagcgtgacttgggaactaggccgaaaccctaaaactcatcgtaaccgacttgctcctggaagaactcctcgtcagcgggatccacatcatcttcttcagcgactggggggggattatttatatagagcaaggctagttattcagccaggggtgtcccattccacccatgtggtcacacttgtcttatgttcggatgaaattccaaggaaacggtccttaagtgcaagagcgggaaaccgtactcccgcctcaccgcccaccgtggaccacgcgcacggggagggtggaacggagggagcggctgaccgggtcagccgactcggttgtgccgaggtggcaccgacgtggcgtctacgtggctgccacgcgggccggctggaggaagacgaaggcgccggccgcgaatggacggcgggcggtggcggtttctccgggacgccgtgcgacgacgaggggcgacggggtgtacaccggaatgacaagggggaacgagagggagtgagccaatggcttggattcaccggaggatgctcgacggtggcgatttgcggcggcggccaccggcggcaggaaaagagggaaacggcgacgagacgactagggttcaattcctccggactagagcatctacgcgacctcgggattgcattcctagcaccggattgggcggagctacgccaagagaagctggcgacgagcggcggtttgcggcggcgagcggcaacggcggcgaggccgcgccaggcggaagaggagggggagggcgcgtctgaagtccccttccgcgtcctcgctcgtgccggctcctccgacacgcacgacgatgaacggcgacgacagaacaggggcgacagtggcgtggcggcgagagacgaaaacgagggagattggaggagggaggagcttgggtttataagggcgacaatgtcggtttgggataggggaaccgacattggacggtcaagccggcgagctggtgcccggctagcggccaaaacgacgacaggaggtgacgccggcgatgggaggaaaaagaagaaaggaagagggaaagggggcttgcctccttgcttctttgggaaacgaaagagggagagagggcgacgcggcagaaggaggaggagctctgcctccgtcccttggaagctagcgcgcggagagcgagggagagagggagagagagagggagagagagagaaggagaaagagaaagatgagccgagagggaatcggcccaccgaacctaagggaggcaaaatagacttttgtggaggaattgaattgggaaggaaaattgagattagggatttgaattcgacgatggatcggggattcgagatccggaatggcacggagactgactgcaagcgaagaaacaattttcgcaat

SEQ ID NO: 70610 - DNA, 184 bp, Oryza sativa
  Clone ID: PAT_MRT4530_71165C.1
gggtcaatactttaatccaatttcaggcaagagcaagaaagctttttaaaaacacaaagcagtttcaacacttttaacaaagatcaaaaggacaggtaagggttttttaaattttataaattttcataaagggaattttggtcatcacattacataatactccagtttaggaacataaccagag

SEQ ID NO: 70611 - DNA, 1351 bp, Oryza sativa
  Clone ID: PAT_MRT4530_71166C.1
acgcgggtgcggcgggcccacgcgcagcctcacggctcacggtggaccgcgcgcacggggagggtggaacggagggagcggctgaccgggtcagccgactcggttgtgccgaggtggcactgacgtggcgcctacgtggctgcctcgcgggtcggctggaggaagacgaagacgccggccgcgaatggacggcgggcggcggcggcgagcggcggagcgaatcacggcgatacaggcgaaagcgagcacaccgggtggttgcacgagacgaggggagacgagccaacggctcggattcgctggagggagctcgacggcggcggattgcggcggcggccaccggtggagagaaagggggagaacggcgacgaggtcatgaggggccgattcccggcggcgagagcatctaagcggctacgggaatccgtcccttgcgccggattaggaggaaacgcatcgagggaggccggcgacgagaggcgtttccgagctcgggcggcgacagcggcgagcacacggcgagcgacggcaaaggtcggggcggcgccagctagctacggggaggctactctgacgagagccgacggcgcgaaacgtgatcgtttcggcctcgggccgaggaagaggagggggagggcgcgcccggagtccccttccgcgtcctcgctcgtgccggctcccccgacacgcgcaacgacgatcggcgacggcgaacaggggcgacagaggcgtggcggcgagagacaaaaacgagggagattggaggagggaggagcttgggtttataggggcgacaatgtcggtttgggagaggggaaccgacattggacggtcaagccggcgagctggcgcccggctagcggccaaaacgacgacaggaggaggagggagagaaggcgatgaggaggagccctgcctcctttccttggaagcacgcgcggggagaggcggggccgagttgatgacgacggcgatgacggcgggtcgggcagcggggccgggcggcgcagacggcgcaggcgcggcacgggcggcgaccacgcgggcgcgcgtgcgcgaacaacggtgcgcgggggccgattccgcgggcggggagctcgccagggatagaggcggggagagagagagcgagggaggggggacgctcggcgcggctcacgcgcacgcgcgcgcggcgcgcgggcagagcggagagagagagagagagagagaaagagagagagggagggagggagatgggccgagagggattcggcccatcgaacccgggggaggtgaaatagacttttgcggagggattgatttggaaggatttggattcgggattgaattcgacgatagatcggggatt

SEQ ID NO: 70612 - DNA, 244 bp, Oryza sativa
  Clone ID: PAT_MRT4530_71167C.1
ggcgggccaggacctctcaaaataggaacttaaaaatagtacactgtttccccgtatgttacatatgataaactcttccattacgaaatagagagactaagcaaaaccacggcagtatcatatcactggcacagcaatctaactatgtaaacaaactgggaacacacgaaacaaggtgggagacatcatctaatcagagatgaacaattaaacaaggctatatatgacgatgacggcttatttg

SEQ ID NO: 70613 - DNA, 465 bp, Oryza sativa
  Clone ID: PAT_MRT4530_71168C.1
atggtgccccgagaggaggcaaccagtttgaaggtggcggacaaagacatcctgggggggggggggagggggtgcaacctcaggcacgtgctccaggagagaggggttggcacccacaatggaaagaatgcccttgtttttacgcctcggaggaggagaagcggagggcacaaggtctctttccgggaccaaggccagcggagccccttccccgaccagaccctgagaggcggtcagagaggcaggcacgacaggcaaatcccccagctgggaagagccagtggggagatcggccgtcaaaccatcagccgacgcgctagggctttagcagtagaaggcgcggggatggggacagccgaggataacggaagcagcgatccagcatgggcttggggcgagtggttttggttttcgagggttgagggcgaggaggaaaaagactgggagttgggtgggcaagaagag

SEQ ID NO: 70614 - DNA, 1141 bp, Oryza sativa
  unsure (1)..(1141): unsure at all n locations
  Clone ID: PAT_MRT4530_71169C.1
cggacggcntnggcatctttgctcttccaggtttcagcatccaaggagcagcagcttgcttgctcttcccaaaaggaggaagagtcgaagagtgcgagaggcccgagcgcaagctgaagcctcaaaggcaaatcctcccccacagactaccacaagctgaagctcgagcgagctttctaatgtctggatatgggtatggggacattcacaactgatgaaagcgacaaacatgaagagagctacctgtcgttgggtttgacagtatcacagtcaaagaaaaacaacactgaataccccaaggttctgttgcttctggcggcttatcttgatagatcagttcagaagaatgaagacttactagattccaataagataaaggattcaagcaccatctttcatggtcacagggctccagatcttagtataaagctttatgcagagcgcatcttcaagtactcagagtgcagcccatcttgctttgtgttggccctcatctacatggagagatatctacagcagccacatgtgtacatgacgtcccttagcgttcatcgcttgctaattacatctgtggtggttgctgccaaatttacagatgatgcgtttttcaacaatgcattctatgctagagttgggggaatcagcacagtagagatgaaccgacttgagctggatttgttgttcaatctggacttcaggctgaaagtggatttagagacgttcggaagctactgcttgcaattggaaaaagaaacaatggttcttgtaatagatagacctattcaacaagttcacggcgtcaatagcactaaagatttgagtcgcaacagtagcattgacgagtcttgcaagagcgagctgatgcggtacagcagtcaggctctccaaggatgtagctgaccaacttgattttacatcctacatttttcaccaagggttaggaccactagaaattctttcaagagtaaacaattgtgcttcagattgtgtttaactgttctggagcttttggatgatagggcccttctttttttattgtaccactgtaattcttttgaaccacgatgtttgaattttcaccagtttattgaaaggcaacaagtctgaacattattcaatctaaaaaaaaaaaaaaaaaaaa

SEQ ID NO: 70615 - DNA, 458 bp, Oryza sativa
  unsure (1)..(458): unsure at all n locations
  Clone ID: PAT_MRT4530_7116C.1
tgggccgttcgaccgtcgcgtgcagagncacgcggaggccgtggagtcaggccggatgtgccagtcgtggagtcaggcggagtccgtgtgcgtgtgggttcttncntgggacccgagaatattttgcagccttgagtgtcggagggccatttactcggagccgtcaagcccaggataaagccacaaggggagagagcaagccaggtaggatcgcncgctccatatggtacccagtgagaaacctacggctagtaacggttgtatctggtcctgtnagcataactgtgaaataagggagtaaaatcctcaccctaggtaccaacctccttagtctcatggccctccatggcttcttgtagcaactagcacactgctatgtatncaactattgaatagcgcatttatcatggctcaaataagctctgcacgatgattgtgaaaaaaaaaaaaaaaaaaaa

SEQ ID NO: 70616 - DNA, 347 bp, Oryza sativa
  Clone ID: PAT_MRT4530_71170C.1
cctaggtgatgagatgactcgagttatttggaaagggatcaaagataagcttatattccctttcttggacttggacataaaatactatgacttaggtctacctaatcgtgacgctactggggacaaagttacaatagagagtgcagaagcgaccctaaagtaagcctgtaagcctcagttgtttgacgtcacagttctggtccattatttcttctattacttttttccatctaagttatgcttttgttatataattggtgctttaagctgaacctgtttaccctgtaggctcaggtagaatacataacgtccacttttttgggattctattataaccgtttacatta

SEQ ID NO: 70617 - DNA, 251 bp, Oryza sativa
  Clone ID: PAT_MRT4530_71171C.1
atggggagcggcggcgcacggccgatgcggcggcgcagccaaaggcggcgagaggacaaccacggtagcttacatcgccggccgaaaggggcaaaatggtgggctcaccggcgaggcgagggaatcagagctccggcgtcgttcggcggcaagcaagtggtggccaaggtgcgggcggactcggtgagcgcgacggcggctctagcggcggtggcgcgcggccggagatgggcggtggcggcgaagctcgg

SEQ ID NO: 70618 - DNA, 305 bp, Oryza sativa
  Clone ID: PAT_MRT4530_71172C.1
aaggaaaattggatttatcccaaccggattgggtctaaaagaggacagccaccaccggttcaccaggggggttaatcccgggcgaaaaactgaaattgggggaaaattcaccggttcggggggaaggcatgaccgctgtttggattatttttggccccctaaaaacagggttataacggttcttggagaagagttttctgacagacgggggattattacttgggccatcccccaagaacaccatccccattataatcatgggtgccagcattataatggaaatggtcgtttcgggcagttgcaaa

SEQ ID NO: 70619 - DNA, 300 bp, Oryza sativa
  Clone ID: PAT_MRT4530_71173C.1
aaagtgggttgtgagtacatggttttgatggtcgtgctcataacaattaaggaccgtttcacgagctactgttgtgaaacatttaccgtgccaaccacaagccagcgtgggcaacggctttaccttttgtatagcatgattcattacggggtgccagactgtgaagcggcgagaagtccgtgggggtcgcgagggagtccattgcccctggttatgagggggagattatgatcaggaacggtgcaatgtggtgagttgtgttgtgtgagaggtattgtcatagttcctttccaaggtacc

SEQ ID NO: 70620 - DNA, 478 bp, Oryza sativa
  Clone ID: PAT_MRT4530_71174C.1
aaaccagagcatcgaaattcaaattttgatatttgagagagagaaacaaaaaaaaaaaaggtaaagttgttccaccatctctctctctctcccaccatggaaacctaaccaacggcttttactacctaaagttccagcagatagtcaaatcaaatcatcgcggagaaaaggaggcaccaccgcctccacccaactcgccagaaatcgagggttccaatccaacgaacgcccccccaaaatcgaatcgaaatcgctcacgagcccaccgagggttggaccgggcaagaagaagaggaggaggagggaggaatcctcgctcacctttctcgcggcggagctcctcccggcgtcgcttccgctggtgcgcccagtcggcgagcgaggagcacccttcccccgcggcgcccttggcccccgccgcgtcgtccccggcgacgatctcgatccgcagcacccggtcggagaagttgacggagtt

SEQ ID NO: 70621 - DNA, 244 bp, Oryza sativa
  Clone ID: PAT_MRT4530_71175C.1
gcggccaccgcgactagaggccccaatggcgccaacggtggagatcagccacctctccttcacctacccgggcatcgacgggcgcccgcggaccggcgcgccggcggtgatcgaggacgtttgcttctccctacacgccggccaccgatgcctcctcctcggatccaacggcaccggcaagacgactatactgaagatactgggcgggaagtacatggtggagccccgcatggtgcgctagctg

SEQ ID NO: 70622 - DNA, 1028 bp, Oryza sativa
  Clone ID: PAT_MRT4530_71176C.1
atggccggagttggggaagaatgcggcgaggtggcggcgctgcgggaggctctgcggcagcaggcggcggccgcggaggagctgaggggcgagctggaggaggagcggcaggcggcggcgtcgggcgccgacgaggcgctggcgatgatcgtgcggctgcaggcggagaaggcggcggagcggatggaggcggagcaattccggcgggtggcggaggagaggatccagcacgacggtgactcgctggccttcctcaaggccgtcgtcttccaccaggagatggagatcagctccctcaaccgccgcctcctcgccgccggtgacggccgcgccgccgccgccctgagatccaccaggagagcttcgccggagatcatctccgaagaagaagaagacgacgacgaccacctcatctcccgccacggcgagaaggcgcgaaaaccatgcaactgcagcgaccgcaccgccattgctgaattgggcgcagacatggcgcagatcaagctcaacctacaaagtcttcacaccgaattcatcaaagcgaaggaagccaccatctccagaggcgattcgcaggcgcgattgctcgccgagatctgcgcgaaactcgacgcgatctccaaaacgcgtcaggattcatcatcagatgatcctgtgcaggtgagagtgagcagggaagaaggcagctcatccaaagggagaagctacacaaatagtgagctgctgatgaaccatttcattgaggcaatgatgtacataccgtgagatgtgtgaaggcctagacagcatttttattggtttttgaagattgttgacttgagtacaaagattgctgatttacgattcctttttctaccatattttctctgggcgatgatgtctactgtgtacatacacatatggtgatatgttgatagcttatgtaaattgtgacgtgttatacttcttttttttggtacttttgacagaaaaggcactgttgatgtaatgtggagtaaccaacaattgtaaggaaaaaaagattagat

SEQ ID NO: 70623 - DNA, 1011 bp, Oryza sativa
  Clone ID: PAT_MRT4530_71177C.1
atggcggcagtgaaccacggaaccgacgcctcgcgcgcggggccaccctatgcatcagcaccgagagggaaccaggtggccccagcgtcaggacacgacagtggcgatggcagcaccgcgtacggctattgttcacagaactgccgttgcactaactgtaagaacagagagtactatgaggactttgtggaggagcgtgtggacatgatcaagatgaaaaatccgagagcatttgatcccaagattgttagggttcaagatgcaagtgagattgaaccccagagctctaatgcagtgccggaaaatgagcatggatgtatgctaatgggtgcagatgccagaagtccaagtgcctcgtacattcgtgtgaatgcctcaagccagagagtagaggaatatttgggtgtgcctctgcacatcagattgaaaaagatttttaagttcgcaaatgcagttgagggtgcgatacaaataaaaatacccaaccgagctctcaccggccgcctcgtctccctcaacctcgccgtcgagcaacgccgccaccgccactccctcccatctccaacccacccggcggatgaggcggcggcaggtctccggcgtgcgcggcggcggccgcagggttccgacatggtgaaggtaggtggcggcggcggggctcccggcgcagcgagtcaagcggcagctaggcttccggcgcggcaaggtaagcagtggcccgggccttctggcgccttgccagccttcctcgttcctccctcgccgtcgagccgccccgtcgccctcgtcatgccgccgatggccgacgccgaagaaggactcatgcgtcgtcaagccgccccgtcgacgacagcaacggcaacctcggggacgacggcagtggatggcgatgactggcgacagcggctggcgacctcgacgatgatggtggcgcttcggcgtgggttcaagatgcacggcgcctgcgtcggtggcagcgtcgaggtcgtggctgcctgcgccattgggtga

SEQ ID NO: 70624 - DNA, 189 bp, Oryza sativa
  Clone ID: PAT_MRT4530_71178C.1
atggcggcgtcgctgcatgaggatttcgccgcggcggcgagtcctgcagcagcaggaggaggtggccgtgccgccgatcatcagccttccgctggaaccggcacctatagaattataggtgttggcggtttacgaatcggcaccattgatgtcactaataggtgtcggacccgaaaccgacacctataa

SEQ ID NO: 70625 - DNA, 550 bp, Oryza sativa
  Clone ID: PAT_MRT4530_71179C.1
cgggccttggggttcctttataaaacccccagaaaaatccccggctaaaaaccgggaaaaaaagggaattttttttggaaaaaaaaaaaaggggggggcccaaaagccacggatcaaaatttggggttgggggggtttttttttgggggccccaaaagggggaagggccttaaccctccaaaaggttaaccagggcaaggggaaaaagggagggggcccctggccccccagggggacaaagggggaaattcccccggggaaaagaaaaaaaatttggtccacccaaccccaaaaaaggcccggccaggggggtcaatttggcttggggcccggaatggccaaccccgggcaaggggtcccttttttcgggggtcccggaaaggaccccaacccctccctggaaaaaaaggggaaggggggaaaaaaagggccaccccaaaaaaagtcccccccccaaaaaaaattatgtgggggctcgaaaaaggccgggtttctaattaaaggctgggaaaacctccctctggggggaaccaaaggaaaaaccccgggg

SEQ ID NO: 70626 - DNA, 138 bp, Oryza sativa
  Clone ID: PAT_MRT4530_7117C.1
aaagtagcacccttgaaatgggatttgatcactgtaacactagacattttatgtggttgcaaaaaccataagaaaatacaatacacatttgggggtgctaggttgaatagttggatagcccaataattgatgcgccat

SEQ ID NO: 70627 - DNA, 276 bp, Oryza sativa
  Clone ID: PAT_MRT4530_71180C.1
atgggtgcagcgcaacgccatggcccatggggcaatgggtgcagcgcaaagtggccacttgaccagttctcatgtgcctggaaactcgccaattcgtcaatcgccatgggtgccgctggtagaatagaaagagagagaactaggtcatgcacatccatcaggtggggtgcactgggatccacatgttttggggtctgccacgatgacctggcgacgggctacctgctcaatgagttcaccgacgactgccatgcaaatgtgtggatacatagatga

SEQ ID NO: 70628 - DNA, 424 bp, Oryza sativa
  Clone ID: PAT_MRT4530_71181C.1
gctgctgacaagacaagcatcgtataactaatggtaatggatttaagaatttcacgtggttaacctttgacgtgagaatcactctcatgagatgtgtgcaaatgtaacccgttcatttttgcgatcatacggcacatcatgagaaggtaaagcacgcaacacaactgttcttaccgtgagctaaccaaattagaatcttattctggtaattttcttcgtggatctcaatacaaatcgtagtggaacctttgccttccaaaatctggagtccaaaaatacacaggagataagcagccatttgctcctggaagaatgagagaagcttgcgcgccggtgcctcctggggctcatgaggaggccgtcctggtgattatcttgagccgtcatcgtcggcgtcattagcatcttcgagcacattgcaact

SEQ ID NO: 70629 - DNA, 1113 bp, Oryza sativa
  Clone ID: PAT_MRT4530_71182C.1
atgccgatctcgactggcccagcgattattgagagcgaggacggtgtggttatgaccccggtcgactacatgtcgaaagatcctcccgcagaagcggagaacggaacatcgacaacatccgggcccgagaaggatcctaatgcggccaaatcttgttcttcccacaagaggcatgagccgacagggacaacttccggggcgataaaagcttggtgtccgttccacagaactagcaagcacaccttgcaagcttgttcggtttttctcgacgtgcaagctgaaacttcaagcatgcaattcacctcaacttcagagctagtcgcgaaccaggtgcacaaagactacaagtgctctagccccgagttatccgagtacctcgcagaactcaggaagctggagaagaggtttgatgggatcgaagtccgacacgtataccgtaagggcaacatcgaaccagacaacctagcacggcgtgcgtccagacgagagctactcgaacctggtacttttctggacatcctgatgaagccatcggtgaaagaggcaaacgacgaaggtagcacggttgcccccgacatcagcttgggggccatagaggcggaacacgtcgttgccgacatcgagaccacagacgactggtggaccccgctcatcaagttcctaagtagcgacgagttgcccgaggacgacgcagaagctgagaagataacccgacaagccaagatctattgtatgatcagcgacgatctatacaaaaaggcgccaaacggagtacttctcaaatgcatctcgtccgacgacggcaaacatctcctcctagacatacatgaagggatatgtgggtcacacgccggcggacgaaagttggtaggaaaagcctttcgacaagggtttttctggccgaccacgctcaaagacgcctgcaacatggtgcagcgatgtgaagcctgtcaattgcacagcaaacacacaagactaccagcgcaagcgctccagactatcccccttacttggccgttctcgtgctgggggctcgatatactcggaccattcccacgaggacagggcggctacaagttcctattcgtggctatcgacaaattcatcaagtga

SEQ ID NO: 70630 - DNA, 642 bp, Oryza sativa
  Clone ID: PAT_MRT4530_71183C.1
atggacgtcgaacagctgcagcagcatgccaggaggcttctgtcgaacggcagggtggtgtcggcggcggcggccgccggcgcgtcgcctggtccggctgggcgcgtgttggaaggcggcgcggcggcggcggcgcgtcgtccggcaccgttcagctcgctggacgcgacggtgatcacggtcctgtccctcctcctctgcgtgctcgtcgtcgggctcgtgctccacgcgatcgcccggtgcgcgttccgcgtcacgcggcgcatgtgctacggccaggagccgcccggggatcacggcgacgaggcggcggcggagcgatgcgcccgggtagccaggaagaagccgggacgcgccatcgcggagaagatcccggcgatcgtctgcccggccggcgggctcgatcggctcgccggctgcggctcgacggagtgcgccatctgcctctccgagttcgcgcagggtcaccgcgtccgcgtgctgccgcgctgcggccacggcttccacgcgcggtgcattgaccgatggctcgccgcgaggcagacctgcccgacgtgcaggcgggagccgtttgcggcggccgcggccgtgcagctgcaggtttaccctgacgccgccggcggccagcacgagacgccttag

SEQ ID NO: 70631 - DNA, 396 bp, Oryza sativa
  Clone ID: PAT_MRT4530_71184C.1
atgcggcatcaggtttctaacctcctgctgttcacggcacgggttctggcaaatcctgatgagattttcgaaagtagaaggtggggcgagtgggcgaccgctgaaggattccgccgggggaagagggttccgttggtgcagtggcagtgcgtcaagcggctcaagtggtgcggggatcctaacatgcactcttggccagaagctgcaatgcacccgcagcagcagaggttagagcatctccaggcctccagcggcctctataataacctctccaaaccaaaatttggtaactttagtaaaaaggcaacaccgattttcgctcaccgcgacctccagcactgccgccgggagcatcgcctcagcttctcgctcgccgtcggccgcctccagcgctga

SEQ ID NO: 70632 - DNA, 1704 bp, Oryza sativa
  Clone ID: PAT_MRT4530_71185C.1
atgcggagacaaggatttagacatgttcaaaccctctcagtgagagcaccggcatcgacgccagatcttggtgctatgccaaacaacagcatgattcctccatcagaggcatcacaactgcatgatgcaggagcaagtcccatgttcttggacaatacatctgctacaacgacgtcattcacaaatcttgttgagcctgatgattcatccgctggcctgggaatgaagcaaatagaaacggatcagggagcaaatgaagattctcaaaccagaaaagcttcagaaaaaatgacgccaaaggtcggaatgaaatttaactctgaacaagaagcttatgacttttacaatgcatatgcttctgagattggtttcagcattagaagaagcagctaccattatatgggaaatacaaaaattataaagaataggacattctgttgttctcgtgaaggaactagaggcgttgataaaagaacagaagctttaggctatggtaatagttttaacagaccagaaactcggtgcaagtgtcaagcatgtatgaagataagtcttatagatggattctatcaggtctaccactttgtgcctgaacatagccatattcttgccactaaaagtcaagctcaccagttaagatcacaaaggaaggtaaatgaagctcaggttgcaagtgttgaagttgcaaaatctgtaggcatttcaactaaagcggttgttgacttgttggcaaaacaatcatgtggatatgagaatcttggcttcactcgtgttgacatgaagaataagttatactcaaaaaggtcgctgcagacaaaacaaggtgacaccggaggagtgttagaatatatggagaagaaatcatcagaatatatcaagtttttctattctattcaggtcgatgaggatgatttaataacaaatattttttgggctgactctaaaatgattgctgattatgaagactttggggatgttgtttgctttgacacaacatacaggaaattgaatgatggacgcccttttggtttgcttgtaggagtgaataatcataagaagactacagtttttggtgctgcacttttatatgatgagagtgctgatagttttgtttggttatttaatacttttctaaatgttatgtcaggaaagaagccaaaaacaattttgacagatgaagacgcagccatggctaaagcaatcaaattagtttttaaaggaactcatcatcagatatgtgtatggttgttgggagataaaagatatgaagaggtaaagtgtgattttagagcaacacaaagtacaccaaggccaaaagcagagttgagaatattacgagatgtagtagaggtttatactccagcagtatataagatttttgaggaagaagtaatgcagactttaaattgtgatatattctactgtggtgatgttgatgaacaaaaggtgtataaaataaagtctcatggtaagcatcatgaacatgttgttaaattctcaccattggaatctagtgtcaaatgcagctgcaagaagtttgaatttgctggtatcctgtgctctcatgccctgaaagtacttgacatcaataacatcaaatcagttcctcaaataagacatagagaaatgcttgaaaatcagatgcaatccagatttagagacctcgtcatctccacaaggtgtgaaagaaaattagaagcctag

SEQ ID NO: 70633 - DNA, 1716 bp, Oryza sativa
  Clone ID: PAT_MRT4530_71186C.1
gggcgcgcaagccatggtgagagcgggtgtgtttctccatgcccttcacgccggcgtgggaagaggcgccgccgcctccctcagcccggccgcggtggtgatcttggccgtcgccgcaacggtggccgtggcagccgtcgccgcgttcggctgcgcggacggggccaagaggcagcggcggaagaacaggaacgacgtctactactacggccaggggtacccgccgccgtctcccgccggcgcgtacggctacccggcgcagccgccccccgtggggtacgcgtacccggcggcgaacgccgggaggcctggccgcagcgggagctacgggatgctgctgttcgagatgctcgggaggcggcggaacctggaggatggccatctccccctccagcatccgcaccacgctgctcatcttcggccgcgccgacggctggaactgcacgcaccacagcgccaccttgcacatcatctccgccttcgccctgtcctcttccccgatgccggcggcggacacgacgcactccatgtccccctgctcgtacctgtcccacacccacttggggaaccactcctggctctccgcctgcgcggcgaggtcgtagttccgccgccgccccagcacctcgaacagcaccatcccgaagctgtacacgtcgcacttctccgtcgccggtagcgccatccacagctccggcgccgcgtacccgggcgtgccgcgcccgcccgtcagcgacatgtgcgtgttctcccgctcgcccagcctcgccagccccgaagtcggcaaccttcggggtgaagtcggcggtgaggaggatattcgccggcttgatgtcgtagtgcacgatccgctgctggcactcctcgtggaggtacctgatccccttcgccgtgccgacggcgatgtcgtgcagcgtccgccactccagcttcttccccctgtcctcgccgccgccgccgtagaggtacttctccagcgagccgttctccaagaactcgtagaccagcgccttggtgtcggcgtcgaagcagaagccgtagagcctgacgaggtggacgtggtacgtcctcccgatggtgccgatctcccggcatgaacgcctcctggaccttcttgttcatggacaccttgagcaccttcacggcgacctgcaggcctttgggcagctcccccctgtagaccacgccgaacccgccggagccgagctccgacgagtagttcccggtgcacgccgccagctgctcggaggtgaagcgcatcggcttctcgctgaggatctcgttgaggaacttctccacggggccgatctcgatcatcacgctgtccgccgcgtcgcgggcttccatctcgcggtgctgttcggtcgcctcgtgggcgatcctagctagcatcttcttcttcatcttcctcctgtagcggcggcatcgcttgatcagagcgagcatcactactgcagccgcggttgccgagactgacgatattatggcaacagcagtagacatgctcacattcgttctctaattgagcttgtctttactctggagtttgcgtattgtctagtagaatctagataacttccttgagcttgatgttcttcattcttactgcatgtcgacgagctgtttttcgcagctaaatcattgagctcatctcatggaggatccaaaatgataagaggccccgttttcctctcacgcgagaggatacgactgggg

SEQ ID NO: 70634 - DNA, 2364 bp, Oryza sativa
  Clone ID: PAT_MRT4530_71187C.1
atgggaattgttagtgtgttgatgggccttgggaatgaatgggcggtgcaagctctggtccttttcagcttcacgctgcaagtcaccctcctctcgcttgcttggatccgtcggcacagcatcgccaccatgccaaagctggtcctatgggtggcgtaccagctagccgactccaccgcgctcttcaccctaggccacatggccatcagcagcaggtcgagggaggagcagccgctcatggcgttctgggcaccgttcctcatcctacatctcggcggtcaggacaacatcaccgcctactccttcgaggacaaccggctgtggctgcgccacctgcagaccctcgtcgtgcaggtgatgggtgcttcgtatgttctctacaagtacatgcccggcaaggagaccctggtcatggcggccgccgtgctcatcttcgtggtgggcattctgaagtatggcgagaggatatgggccctccgggaagccaccttcgacaatatagccaggtgtttggaccagcaggaggattatgccagcgctcgcgaacgcgaaggcgacgatcttctccagcatgttctacaaggaaggagctctatggacgaggagaacgttctgattggagcacatggcctgctcgacatttgccgagggctgttcatcgggtcacgcggtgggaggcgcggctacctcaggcatgtcctgctgtccttccaaatgtatgtccgtcttgataagctgatggagttggagctgtccctcatgtatgacatcctctacaccaaggccaccgtgatccacacatggatcgggtgctgcatccgtgtcatcgcgcttgccgccacggtgaccgccacgttcctcttcctgctcagcagcaaacacgggcacagcaggaaagatctcgccgtgacatacgtcttgttggccggggccttgctcctggaaatgatatccatggtgagggcagtcttttccacctggacggtcgtcttcttgtacaagctgaaatggtattggctctatggcgaggttctctccatccgccgtgttttcaggagattggcgagaacaagaccggcaatcgggtctcaacctggcgtgcgcgcgttcaaagctctcggcctggacggcagcctcggctggaggaccatccaagacatcggcttcgaggatagtatcatggcgtggcatctcgccagtgacatctgcctcttcagtgaccgcagcaacaagctggatttgcacgagggggtggcggttctgtccaactacatgatgttcctcctcgtgcaccgccggtacatgctgccaggccccgtgcgtcgcacgcggtacgagcaggtgcgcgacgatctcaacaagtttatgcatcgaaagggccgcgctcgctcgccgcaggacttgttcgtgtgggctcttcgcaggggcctccatgatcatctcaactccgacgatcctccggcgcagtacgacaccggagtaagacttgccgccgtgctctaccaccggttggacaggcttgatatcatctttggggagctctgcctcttcctcactgcaccgcgcacagttcattgcatgcaagagccatgtcgcctccgacgccacacgtctcgcattcgccgcatcgtcaatcccgctcgcctcctccgcgccgtggtcgctgttggcctggcgccgcttgggacttgggaggacaggatggtgttggaggccgtcctcaaggcggtccccgctgatctgctgccggtgctcgctgtcaaggagatgacgaaagacgcctgggatgccatcaagacgatgcgcgtcggcgtcaaccgtgtccgcaagtcaaaagcgcaggagctgcgcaagcagttcgatgcgatcgagttcaaggaaggggagtccgtggaggaattctccatccggctgagctggctcgtcaacaactttgcgtactcgggatccagcttgaggaatcaagataccctgtcgcttgagcagctgacaggggtgaagaacagtggtccactcgtgccgaggaacaggcagtccggcgagggatcgtcgggcaagaagcaggcatcaaccaccgccgccgcggtgggcaagaaaaaaaccgagggcgctgccaatggcgagcggtgcgcgcgcgatcaattgcgcgacaagtgcaaaaactgtggtcgtctcggtcattgggagaaagactgtcgccagcccaagaaacaagccgaggcacacgccgtccagggtgaggaggaagatgacgagccggttttgctaatggctcacgctgttgagctggcgcaacctccaccatcgccaccaccaactgaaccgttcgacctcgttgagcccaaggtgttcacactgttatga

SEQ ID NO: 70635 - DNA, 975 bp, Oryza sativa
  unsure (1)..(975): unsure at all n locations
  Clone ID: PAT_MRT4530_71188C.1
cgggccccccctcgagttttttttttttttttttttttttttttttttttttaccaactggaagcagttttgcttttgttccgtggtggtttacaccgagattaacatgacctctttattcacttagtactattattctttttgctcaatctacataattacaggacgcaagttgctataccccatccatccatccacgccaccgtacccctgccgacaagatcgtcgggaaatgagcttgcatccccgtatccgtcctcttcctcattcccggcgaaatgctcccgtcgccggatttgtggaacgggagaagcggcaccgcgcgctctcccgtatcacacaactcacaagctcacaactcactccactgcccacgcacacctctactcaacctacctaagtaaacggaaggcatcatgcgtcagctccactccgccgcccatgtcgtcgtgtgctctaggcgtctcgccgcgtggccgcccccgcgcatgctgcacgaactggacttctttgaatagagattcttttttttttccgcttcctaattttctgtctgatttcgagtggccattgttgtgccggtggccgcgtcaatcgagggggaaacatgtgtcctcacctccggtgttccagaggaaatgcgcgtaggcggcggcatggtgcgcgttgccggggtcggccgcgatggcctcctggtaggtgtcctccgccgccgcgaggtcgttcctcgccttccacaggaacgtcgcgtaccggctcagcgcctccgcgtccgccggctccgcgcgcaccgccctctcgaatactgctccgccctgcgattaacgggaggttagacaaaatggatcaccgtgggcgcgcttnggatgagatgagcacgacggtcaattcgttcgaacangtggtgggcgtaggtgaggggcctaacggtcgtggtcgttctgcacgaggtagaagaaatgcgcgaattggcca

SEQ ID NO: 70636 - DNA, 419 bp, Oryza sativa
  Clone ID: PAT_MRT4530_71189C.1
gttcatgagcgctcattattctcatactcataaaaaaaaggacaacacaaacacagtaacatactcccggaatcaagcaggccatgatatccgaaggaccacataagcccacgaccaagcaggcatcaacacctacaaccggaaccggggccaagacacgggatgcacccggaaaatacagaccgagcccaggaacagcaccaacttaccctataaagtgaagacataaaactggaagtaaacatgagaagcgcacgattgcagtgacaaaactggtatccgcggacgagtacacaaaaaaaacgagccggcaacagaaaaggcaacaacggtgcgccctaagacagccgagctaacatcacaatagattgcgctggcgcagtggccggctgcaagagggaaaccatggacgcccagcc

SEQ ID NO: 70637 - DNA, 136 bp, Oryza sativa
  Clone ID: PAT_MRT4530_7118C.1
cccactttacggggacgcatgggcggacgcgtggagaccacgtgcccctgcgcgcatgcgacggggcgttccacttcgtcggggagatccccaaggaaagcagatcccaagaggtaggcggcacccaccaagcatt

SEQ ID NO: 70638 - DNA, 217 bp, Oryza sativa
  Clone ID: PAT_MRT4530_71190C.1
ccccgcgtccgcccacgcgtccgaaaaaaaaagataataaaactaaaaaaaaaaaaaaaaaaaagggggatattggagaactacggggggggtgtcccacaaattgctgcaggtgtgtggagtgttttcacggagctcgatcttctggacacatttctggagtgctagtgaagatgatacaaaaacctgggtcgtgccattcacttcccgagactga

SEQ ID NO: 70639 - DNA, 654 bp, Oryza sativa
  Clone ID: PAT_MRT4530_71191C.1
atggagcgcgtccctctgctgggggtgctagggggcgcggctctctacacgtctcgccggtttttcgtggggagtcgtaggcaggcgacacgttgggggcttggggcgctcgtggacacgactaccgcacctgcgatttcccattctaccctcgatctcgttgctaggaggagggcgacggcggtggggaggaacccgaggcggcggcgcgagagagagacgccgacaagagagacaggaggcgtcaccagagctgcgagaagggaggcggcgtcaagagagagaggagagagaggcgatggcgacgacaaccggatctggcggagaagcaaccgcaccgcaccgccgccgccatcgccactgcttgaggcgcccgtgctcgccaccgaggagcacgcggacaacttcgtggtggtggtcgctgccgtcggccaccgggcagagacgggcagcggcgagcgtccgtcgcgaccttctccacctctatcttggactcctccgcacggagagagaggcgagcagcggcaggagagagaggagaaagtggcggcggcggcggctgggaagggcgaggagggaggtggcactggtgctcgcgagatagagagggagagggagggggaggacgacgacggcgccgagcggagggagtga

SEQ ID NO: 70640 - DNA, 392 bp, Oryza sativa
  Clone ID: PAT_MRT4530_71192C.1
ggttctgtaaacttttcttctttctgtatgacaatgcattggattggacaaaaaggtcgctcttgattccagtgacgctgtctccagcccacaattctgtgggaagtaacaaaaaacggaatatacagaatctggccctgaaagtgctccaaagctacataaccgctagagctcccgaccgagatacagactgatgggggaagatcgatgcatatgtgatccacgcagacacatcttaaattttacaacacttacttgggtggttttaaaatgccacccctattaataatatcggctactcccgaccttttttacgaatacttttccaaaccggtttcgttcccgccccacatggtgggcccatttccccatttttttctccatccggggcg

SEQ ID NO: 70641 - DNA, 354 bp, Oryza sativa
  Clone ID: PAT_MRT4530_71193C.1
atgacgggcacacaccgcgggaaggcagccgggatcagcgcagcgtcagtggagacgaccaccaacttcgagtggatccgccgtagccagccacgagagcgccccttcatcatagatccaacggtagcagcggcagaatttgacggtgacagcagggagcagatccactattgccagccctgggaaggcctctccctcagagatccagcggcggcggcaaggggtggcacggatcagccattgctgacctctagagcatcccttcctcgcagattcagcgacagcgacagggtgaggagcggatccaccattgctggcctcaagaacgccactcccttgcagatccgcgggtag

SEQ ID NO: 70642 - DNA, 251 bp, Oryza sativa
  Clone ID: PAT_MRT4530_71194C.1
gttccgccgcgccgttgccttgaagccgccgcactgcgccgagtgccgcgctgagcgtcgccgccttgcgccgccgccgccgccgtcggtaagccgccccccctcgcgtccggtcgccagaataaggactattctgagcaggcaagtcatcactattccttgaacatgttgatcccaattgcgaaattgttttgtttacaaataaaattgcatgcaatgatgaacatcctacttgtgattatgccatgcct

SEQ ID NO: 70643 - DNA, 519 bp, Oryza sativa
  Clone ID: PAT_MRT4530_71195C.1
aaaaaaaaaaaaaaaaaataaaaaaataaaaaaaaaaaaaattaaaaactacaaacataaataaaaaatgcgagctaaaaaaataaaaaaaaaatacataataacttactctctattttaagcctacagggtgtgcctttttctgattttccatttttccttcccctttgatccccctttttttttttttttttgtcccctttaatttcatttcctttcccgtagttttccaaattattcctggggaaacctctcctttttctttcgattgatccataggatcacttgtccttttcccctcttcctttttccctttaaagcccctccctatttttttttttcaacttttccccacctttatggctttttgtcccccccctttcttttgccttttaaccccgctggttttgtggattctccccagtttttcccttttttttttcaacttcttagcctccctttttttcttttttttcctttttttccccccccctttccccgtttttccccttcaggttt

SEQ ID NO: 70644 - DNA, 3701 bp, Oryza sativa
  Clone ID: PAT_MRT4530_71196C.1
atgggtgagttgcaggtgagctcagcgcacagcgccgtggactcgctcctggggcggctgatccggatcctggaggacgaggcgaggctgctcggcggcgtccgcggcgacgtgcagttcatcaaggacgagatggagagcatcaacggcttcctcctccacgtcctccacctcgaccgccccgaccaccagctccaggggtggaccaggcaggtcaaggacctcgcccgcgactgcgacaactgcgtcgacgtctacatgcagcgcctcgccggcgccggctccggcggcagcgcgcggcggctcctcaggctcctcacgctgccggcacgccgccgcatcgccacgcggatccgggagctcaaatcgcgcgcctgcgacgtcggggagcggcggcgcaggtacggcgtcgtcgtccccagaaccagaaacaatgccgccgccgccgccgccgcccgtcgcggcggccaacgtgggctggcgaagaggcagctgtcggaggctggcggcggcgaccaccatgccgacgcctcctccgccggcaacaccaccaagcaagatcaccggaggcgcgcgctgctggaggaggagacacccgcgaaccttttcgcaggtgaaaccgacacgctggtcggctggctgctggctgccgccgacgagcaccgacggccaaaagtgatatcaatcatacgacctgatgacgaggagctcgtcgcagctgccattgatcctgtaaagcgagcgttggatgatccgcgcatacttgaattgttccaaatcaggcagtggcacagcggccaatctcatcccggctgggtttaccaagacatgatgacacaaatactccctatgattcagcacatgcatcgggcgctgggagggatggtatccgattacgacaagaggaacaagaggagatatacgcggctgaagaagaaaaagaagagaattgtggtctcaaatttttcgagaaaaaatctgggctcaaaggggaacaaatttcctgtaggaacgacgtttgacgaggtgaaggaatttatcggtggaacagcatccgacaaggaggaggaggaggaggaggaggagggatttctacaagcagcggcaatggaagttcatgaaggatttgcaatggacgttgccaagattatttcagaaacgatggcatccgagatgggatttcatcaaggaatgacatttcaggagatgatggagaacttcctgaaagataagagctacctaattgttcttgatgatgttcctgatgaatcgctatggcgtggcatcgaatcagctttccccggcaacacggctcacagtgccatcctgctgacaacccggtcacctgccgtagcctactcctgttcaccacatgacagagtcttccctcctctggatcatctcatcgacttcttccatgccaaggctgtctccctggttgaaaactatcccagcaacggtaacctggatgaagtgattagatccatactgtcaaaatgtgcctccaactccactgacatgtgcatcagagcattcctccatgtcctttatgccaatcctaacaggaacagggaagaacttcagggcttgtgtgatagcctgcatgattcacatggtttaatgctggatgaaaacatgcagcaaatcctgatgttctggtacaacgacctgcctgtccattacaagagctgcttgacgtatctctctctatttatccaagatgatggaagcagtagcaacagtactatgatgatcaggagaacaagcttagtcagaagatgggctgctgagagcataaacacagaacgaaacgggcagacagcgctggatgaagccgagcgatgctttggtgtgctcttagcaaaaagatttgttcttgagagagacatcggcgcttctgggaagatcaagagctgtgcagtgaatggcttgatctcaaagttcatcaccaaggttgctagagaggataactttgtggatgcagatcttcagccagattttgcacaccgtgtttcgatttggaacaggagtcagctgcaacaggtcctagcagagcttcaggcttctccacgccccagttcttcctcatgctggaacatgcgcaagcattatgatcagcccttggatgacctcacaatttttctgaagtcattgccagcattctctcggctgggattgctcaaagtgctggatctagaaggctgtgatggcttaaaggaccatcatctggagaacatctgcaaactatttcagctcaggtatctgaaccttcgaagaagtaagctcaccaaacttcccaagaaaattcaaaatctccagcagctggagacactggacatcagagaaacaaccgtgagctcattcgctacaaaatctttagttcttccaatgctaaaacatttgctctctggatacacccaacaacaaaatgaacagaccgaaaaattttccacagtgcgtatgccacgtgggatcggaagcatgacaaatctgcaggtattgtgccatgttgttgtttctggcatagaagatgagctgatggacattgggaagctactacaacttaggaagctaggtgtggtcttccatggtgaccaaaacagcttcaagcacttagtccaggcaattgagaagttgcataaaagtctcatctctctgtcaatccgtgttgaagtaccagatggatgcgagaattttcctgacatgaacatggcagagcctacagcattctcatatccaaagcttcttgagagcctgaacatatgcggcataagatgtgggctgcctcgttggatcaaggagctcagccgacttgcgaagttaactctttgcgacactcatctaggagaacaagatatggcagttgttggcaatctcaaagcactgcggtatctccggctccggtgcaggtcatatgtccaaagcaagctcacccttggggaaaaacagttccagcatctcaaggttcttctcatccacggcgaagacattaccgatatcagcttcagcaagaatcctaagttggaaaaaattgtttggagtttcagggagatgaaatccatttctggaattgagcgtcttccgagcttgcgatcatttgagcttcatggtgactgcaacccagataaggtggaaattgctctaaaagatcaccccaaccatccagatttggagcatcatggtaaccgtcaaggccagggagacgctgctggaagcttggatgctgatgctgcctcaacctgtgcctcagtctcagctcccaaccatccagatgtgaagcatcctgataaccgtcaaggccatggagatgattctgctgcctcgacctctgcctctgcctcagcatcagctcccaaacacatccagagtattacttgattgattcattaatttatcctcaatcaagatgcatctgtggataaaatccttgtcatcttcgtcctatctcaagtgccagctcaccgagtttgatgaattccttctagtgtcaatccgttggcctttcctgcatgtatgtcaaatttctttagacatataatagttgtactcttctggactcctaattttcaacccttatgtaaattgtaatgcgtgcttgtttgtatggtgtttgagagctgccctagctgctagtcatgatttggaattggatttgcatgtatatgtgattgtgttcagctgaaaaaaaaaaaaaaaaaaaa

SEQ ID NO: 70645 - DNA, 2559 bp, Oryza sativa
  Clone ID: PAT_MRT4530_71197C.1
atggcgtacaagatgggggagaccggcacgcaggcccggcaatacctacgtactgccatggatggcacatctgccaaggttgtgctcttcatcggcgccagctttagcttcttcctcatcacgcatgctcagcaacaagctactcgttgcagaccacaagagagagacgccctcctgtccttcaagcaaggcatcaccaacgacagtgtgggcctcctctcctcatggcggagaggccatggcgattgctgctcatgggcaggcatcacctgtagcagcaagactggccatgtcgtcaagctcgatgtcaacagcttccttactgatgattcacctatggttggccagataagtccatctttgctgtctctcaactacttgcagtacctcgacctcagctcaaacttgctggcagggcctaacggcagtgtcccagagttcctaggttcaatgaacagcttgatacatcttgacctctcctacatccccttctccggtacactgccacccctgcttagcaaccttaccaacttggaatatctcgacctctccttcacatcattttctggtacacttcctcctcagctgggcaacctttcaaatttacggtatcttgatgttagtgagatgcagaatgtagtgtattcgactgacctctcatggttaagtcgtctgcatttgttagagtatattgacatgagcaatactattctcagcaaaataacgaatttgcctgccgtgctcaacaagatcccaactctaaagcatgtcctccttttgaattgttcaattccaagtgcaaaccaatccatcacacacctaaaccttacccagcttgaggagcttgatctctctctcaactactttggccatccaatttcatcatgctggttttggaaagtaacaagcatcaagtcgctccgcctagatgaaacctatctccatggtcccttccctgacgagctaggcgaaatggtgtcgctccaacacctagatttttgtttcaatggaaatgcagccacaatgactgtggacttgaacaacttatgtgacctggaaagcatataccttgacaagagtctctcatccgggaacataacagatttgatggataagttacagtgttccagcaaattgtatagcttgagttctataagcaataatatgataggaatgcttccaagtagtatagagcacttcaccagcttaaatcacattgatcttactaacaacagtgtcagtggagtcatgccacgaggatttcagaacatggctaatttggagtacctacatctcagttccaatcgactcagtggccagatgcccttgttaccgacaagcctcaagatattgcatgcccaaatgaacttcttgtcagggcatctcccgttggaatttagagccccaaatcttgaaaacctaattatatcctccaattacattactggccaagttcctggatctatttgtgagtcagaaaacatgaaacacttggatttgtcaaacaatttatttgagggagaagtacctcactgtcgtcgtatgcgaaacttacgtttcctgctcttaagtaacaacagcttctctggaaagtttccccaatggatccaaagcttctcttcactggttttcctagatctttcatggaacatgttctatggttcgttaccaaggtggattggagacttggtgaccttgcgtattctgcacctgggtcataacatgttcaatggagatattccagtcaacatcacacatcttacacaacttcaatacctgaatttagcagacaataatatatcaggtttaattcctctatctttgtcacattttaatgaaatgactctaaaagctgtgggtgattcaatctcgaccctggcatttgatgagtcatttgatacattttccctcggaatgaagcatcaaatactcaagtatggatcacatggggtcgttgatatggttggaatcgacttatcgctcaatcgcataaccggtggaattccagaggaaataacatctctcgatagattgtctaatttaaatttatcatggaatcgcttgagtgggaaaattccggagaacattgggtctatgaaatcaatagaatcactcgacctctcaaggaactacctttgtggtgaagtcccatcaagcttgacagatcttacatatttaagctacctggacctatcgtacaacaatcttactggaaaagttccatccggacgccaacttgacaccttgtacttagagaatccatccatgtacaatggaaacattggtctttgtggccctcctcttcaaaggaattgttcaagcaatggttatgcacaagggcatggtgatcacaaaggacaagagaaggattccaattcaatgttcttttactatggtcttgcatcaggttttgttgttggttattgggttgtgttttgtgctctgctattccacaagtcatggagagtcacttatttctgccttgtggacaaggtatatgacaagttatatgtgtatgtggtcattacttggaccagatggatgaacactacaaattaa

SEQ ID NO: 70646 - DNA, 197 bp, Oryza sativa
  Clone ID: PAT_MRT4530_71198C.1
gaaataccgctctgggtgcatattagaaaaggccattgcacccgattgatggacccactatgcttgacatacgattgagattctactgacctgcaaattttcagacatcacgtgcattacatttttcgcttgagacaccatgtgcctagatagaaaaaggccgattataccttgattacatgacaaactatacaccc

SEQ ID NO: 70647 - DNA, 359 bp, Oryza sativa
  unsure (1)..(359): unsure at all n locations
  Clone ID: PAT_MRT4530_71199C.1
tcgcccacgcgtncggccacgcgtncgcgacgggttctgaaacctgggatgcgcaaggaagctgacgagtcggagcgcaagaagcagaagaaggagaagaaggaaaagaaggagaagaaggacaagaagaagcgtgacgccgatgaggccgcggtcgccgatgccggtgcgtccccagagaagaagaagtcgaagaagaagaagaagaagtcggcgggcagcgactcggaataagtgttcgtgtcccccactctgactcttgtacaacccaaacaaaaaatcgaaagaagttgcatgccttatcgattgggcttcgatcggtaccggattcttctggcacccggcccttttccccaagt

SEQ ID NO: 70648 - DNA, 1740 bp, Oryza sativa
  Clone ID: PAT_MRT4530_7119C.1
atggctgtcgtgtcccgtgcaggccaggtgttcgacgaaatgtcgctggaagaaaccaacccggcggtggtggaggaggaggaagggaagcccggcagcgcggaggaggatgccgtcgcttacggtgaagtccaggtgttcgacgaaatgccgctgaacgaaaccgacccgccggcggcggcggaggaggagggggagcccggcatcgcggaggaggacgccgtcgcttcgggcgaagaccgcctcagcgagatgccggacatggtgctgcaccacgtcatgtcgttcctcaaggcgtgggaggcggcgcgcacctgcgtgctctcgcggcggtggcgccacctctgggcctccgcgccctgcgtcgacatcctcctgacgagcgaccgccagccgccgccgatgaacaggcgcatgcgccaccaccgggcctccgcgccctgcccctgcgccgacgtcctctggacgcgcgaccgcaatgcgccgagtgacacgcgcaggttcgtgaaccggctgctgctcgctcgcgacgagctcgcgccggtggacacgctccggctgcgctctgctcacgtggatggtttcggggacaagtttaagaatgtcgatgtcgagaagtggattagtgaagctatcaagagaaaagctcgggtgattcagcttgaagatcattatgggatgttcgttgtatttgctcaccaggtcttcgcttccaaccatctcaaaatcttgaaactgtcgtacgccgagctggatgacgatgttttcaggggattctcctctcgatgcccttctttggaagaactggagctcaagaaatgcgtggtaagtgcccgtgagatttcatcagtcactctgaagagtttgatcatggttgaatgcaagttcactatgaatctctctgttggtgctccaaacctcgtgtttttacaatgcatcacaccaatgaaatgggttcccgtgctcaaggactctgggtcgctggtcacaggaagtatcatgattgatgactcgctacttattggtgattctaaaaaaggacatgaggtggatggtttctcttctgattattcttatggtggctcttctgaagattattttgatgacctttccagtgacatcagtgatgactatgactataactatgaaaatgatatcaatagtgatgctgatacatatgagtacaatgagattgtgaatgaatataaatttgagcagtataaagaccatgatgatggaggtgattgcagtatgggtggtaaatatcatggctccagttctaacaatgggttcaatgatgataaaactttgggtggacaaaatgttcttcacagcctttcaaatgctagaagtttggagctgttagctcattcaggagaggtggttctgagcagggaatcaagaagttgtccaacttttagcaacctgaagactttgtcccttggtgagtggtgtatcagtatggtcgctgacttcgacatattgattctcttcctccagaattcacctaatttggagaagctttttcttcaacttgaaatgagttacaacatccaaaaggaattggaaaaaggtatcaaaccaaaaggaggatcgtttgcctgtaaacgccttagtacggtgaagatcagatgcaccaaggatgatcttagagtccatatgctggcacagttgttcaattctaatggcttgtccttagagaagattttcgtccgtcgaagtgggagcttccctggctaa

SEQ ID NO: 70649 - DNA, 500 bp, Oryza sativa
  Clone ID: PAT_MRT4530_711C.1
ctgatagactcagtaatcttgttactaatgggccaatccgaaagaagtgtggaaggaaagaaaaaaaagtgtggggaaagtttctttcttattcaagaaggactagtatctacccatgggtataaatatgtacaccgaggtcattgtaaactatctcatagatcaatacaactactctcggcgcattgccaccctatttcctaagatttttacttatcacggcagaacttgacacctgacacgggactgcatcggcttttgatctccagcgaaagggtaagtccaatgttctgcctgccctggaaattgtattggctgcattggcgtcgttcaaggctgcatcgcttcaacctcttgggttgctctggtttggttcatatattttcctacctatttatcatatattttttaatgaattgatactactattattaatgattactttttatgaagaggaactgatgtgttggcatcaataccagttcttgcttacaatgggt

SEQ ID NO: 70650 - DNA, 377 bp, Oryza sativa
  unsure (1)..(377): unsure at all n locations
  Clone ID: PAT_MRT4530_71200C.1
cccacgcgtccgatcttttctttgttcatctggaggtgtccatcaaattaatgaagatgatcctctacttaacatggtcgtaatcagtattttacggaccaagaaagagctgagttctggatggcgaaatctgtgcagtgtctgtctatatagatgccatcttggagctattctgcctgttcatatttcagttccattttgcctaaaaccgcaagagccgttctggatggtgtgaccgactaatccaagttatgaaatatgtgccctgcatatagattcctgtatatatctcagattcagttccttttgcctagaactcacctatgcacaatcctcttatggacgtcttgactaagctgaaggaattgtgttcanaa

SEQ ID NO: 70651 - DNA, 936 bp, Oryza sativa
  Clone ID: PAT_MRT4530_71201C.1
attatggcgcaaactaccagcacattgtattaaaagataataatatgcagcaaaatattcatcaaatagaatttttacctttacaattcaagcatttgggctcgtagcaattatgccaaagtaaagtatgacaaaacttattcacaatgagaccacagtctaaaaatacattattttaccatctattattcactacactcgtatatttcatggacttgatgtcatttgctataacataaagtttagctatatatatttggccattggaaagtataataagtatatattgttaaaacttaaaaaccaacatgctgagtatactgagcatatgcctcagactgcatgccgattggggcacgaatgatgagatctggaagatcaaatgcgtcgacgagttcctgagcaacaagcctcacttggtaactgaggtagtcagctagtttatggatagccttggctttatttggggcaacatagtccacattccgataggttcctatatctttccagatcctatcgagcgcgtaaaggtcgcacaccaatttcaaccaattcccgtgtttttccatccgggcatcttttgaccgcttcctataaacttcgcaagaatgacagactcaatgtgtgattccgcaagtgtgagcagatggtttaaacatctattccatgcaccaaatcctccaagcgtcttgctatgcttctggagtcgagcggcaacgctgtgcagtaatcgagatgttcggtatctgaatgcatccagctgaaagttgggatcccgtagatggtcttccccttcccatcgagaagtgacaggattcggctgggacaggtaggtgcccatggagtccctcaagtagttccaggtggctgagagtgtccctcccttaaatttttcctggtattgcttcaggagatctccagcaacctgcaacagcg

SEQ ID NO: 70652 - DNA, 586 bp, Oryza sativa
  Clone ID: PAT_MRT4530_71202C.1
tccactgctgtcctgcggactgctgtgggctggactgctgtgggaaaaaaaaaaaaaaaaaaaaaaaaaaaaaaaaaaaaaaaaaaaaaaaaaaaaaaaaaaaaaaaaaaaaaaaaaaaaaaaaaaaaaaaaaaaaaaaaaaaaaaaaaaaaaaaaaaaaaaaaaaaaaggagaaggggggcctttttttaaaggatcaaagtttacttccccgtgcttgcaacttaaaattttttttatagggccactaaaattaaattaattggccggggtttaaaaacgtcggaattggaaaaaccttggctttaccaaattaaatcgctttgaaaaaaatccccttttcccaagttgggaaaaaaccaaaaaggcccgaaccaatggctttttcaaaaagttgcccaccttaaatggaaaatggaaccccctttttaggggccattaaagcgcggggggtgggggggttacccccagggggacttttaaatttgcaagccccttagcccccgttcttttcgtttttttcctttcttttttggccacgttcgcgggttttcccctgaaagttttaaatggggggtttttttta

SEQ ID NO: 70653 - DNA, 497 bp, Oryza sativa
  Clone ID: PAT_MRT4530_71203C.1
cctgctgtcacgcggcgggttcgtcgaccgcgccatgccggtgaagtgcgaggcgatgagtttgtgacgggtgccagccatggcacggcgatccatcagcaggacgtcgccggcgcgatctgatgcggagggtacggaccacgcggggatggatggaacagaagatccagcacggtggcgggaaaccggagagaagtttgaattgttcgatacatcttcgctattgtacagtttggggagaggggtacttgaaaaaaaaaaattgaaccggaccattcagaaaaccagcaccaaaaaaaaaattcagagtggccaggccaattgttggcagggaggtgtggattggagggtaaatttttggttgcatcttctttaatgtgagttgttacagtcagttaccctcaactcctacctgtgttgttgagctactggtacccctaatataatcatgtgtatacatcctctccttttttttccttcaaaaaaaaaaaaaaaaa

SEQ ID NO: 70654 - DNA, 201 bp, Oryza sativa
  Clone ID: PAT_MRT4530_71204C.1
atggggctcaagtgttggtgctccgacgatggaacaagagcgattgagtgtgtcctacgactcggctcatccaaaggtggagatatggatctcggccttccaagggtgtcatcacgcgtcccctgtgacaaggaactcgctttctatgttggagatgttgaggaggtgtgggtgaggctagtggctgtggagtggatctag

SEQ ID NO: 70655 - DNA, 149 bp, Oryza sativa
  Clone ID: PAT_MRT4530_71205C.1
gaacaaaaaaggacagcagtttgccatagatgtaaatgacgatgtggcgaaaacaaaaacgtccggccctaccgagacagcaaatactgttgacccagcataattattcatagtacacatactgacactcgttgaacatgacaggacta

SEQ ID NO: 70656 - DNA, 289 bp, Oryza sativa
  unsure (1)..(289): unsure at all n locations
  Clone ID: PAT_MRT4530_71206C.1
cggacttggcatangncttcctctnnttttcttgggccgaaccccccatcaaaacgccgtcnccgccgaggggagaaaaaaaaaggccgccggcgncgctaccactaaccccccccctngccggagcgccccgtcgccgggtttaatcgatggcgtccaagaggatcctnaaggagttnaagacctcagaaggaccctcccacctcatgcagcnaggtcctntgggtaagncatgttcattggaagtactattatgggacctagacagccatttgctggtggggatttt

SEQ ID NO: 70657 - DNA, 1229 bp, Oryza sativa
  Clone ID: PAT_MRT4530_71207C.1
ccggccggcctctgtattggaactattacgaccacatgctctcttcctactctcctccttagaccatacggacttaatctctctcgccctaatcatcatcgtcttcctcctcttggatcttctcctctgccatggcgggcaacagaggaggcgatgccggggaaggggagtggctcaaggtcgccgagctcagggccacggtggaagcccaggacccccatgccaaggaagtggacaacctgacgctgaggaggttcctgcgggcgcgagaccacaacgtggagaaggcgtcggcgatgctgctcaaggcgctccggtggaggagggaggcggtgcccggcggctcggtgccagaggagaaggtgcaaagcgacctcgacgacgacaaggtctacatgggcggcgccgatcggaccggccgccccatcctcctcgccttccccgccaagcacttctccgccaaacgcgacatgcctaagttcaagagttattgtgtctacttacttgacagcatctgtgcaaggatccccagaggccaggagaagttcgtctgcatcgtggatctcaagggctggggttactccaactgcgacatcagagcttacatcgcggccatagagatcatgcagaattactacccggagaggctcggcaaggccctgatgatccatgtaccctacatgttcatgaaggcctggaagatgatctaccctttcatcgacaatgtcaccagggacaagttcgtgttcgtggacgacaagagcttgcaagaggtgctgcaccaggagatcgacgatagccagatcccggatacgttgggcgggaagctggcaccggtttccctcaagaacaacgcgcgaattaaccttgattagtagcgaggctcaattagcacgcagttataccgataatcaagcacaagattatacacacacgtatactatacatggatcgatgggatgaacaaaagatatgtgtaattgtgaaaaatgcagctctcatatcacagctggtctcactgtttgtagcattgccatcgtcatttatctcagtaacaaaagcttctgatcagtaattacatgtactactgtcactatgacaagtaaagactccaatactccatatcgaaaaaatatgaaaaagggagccacgtggctaagaagtataaatttataataaagtatgcaccattccttctaaaaaaaaaaaaaaaaaaaaaaaaaaaaaaa

SEQ ID NO: 70658 - DNA, 840 bp, Oryza sativa
  Clone ID: PAT_MRT4530_71208C.1
atggcgggcaacagaggaggcgatgccggggaaggggagtggctcaaggtcgccgagctcagggccacggtggaagcccaggacccccatgccaaggaagtggacaacctgacgctgaggaggttcctgcgggcgcgagaccacaacgtggagaaggcgtcggcgatgctgctcaaggcgctccggtggaggagggaggcggtgcccggcggctcggtgccagaggagaaggtgcaaagcgacctcgacgacgacaaggtctacatgggcggcgccgatcggaccggccgccccatcctcctcgccttccccgccaagcacttctccgccaaacgcgacatgcctaagttcaagagtacgtctccgttggattcatattctcctaccataatgacactaccattacaatcactgacgtgtgggggaatagaaggttggaacccatataccggttattgtgtctacttacttgacagcatctgtgcaaggatccccagaggccaggagaagttcgtctgcatcgtggatctcaagggctggggttactccaactgcgacatcagagcttacatcgcggccatagagatcatgcagaattactacccggagaggctcggcaaggccctgatgatccatgtaccctacatgttcatgaaggcctggaagatgatctaccctttcatcgacaatgtcaccagggacaagttcgtgttcgtggacgacaagagcttgcaagaggtgctgcaccaggagatcgacgatagccagatcccggatacgttgggcgggaagctggcaccggtttccctcaagaacaacgcgcgaattaaccttgattag

SEQ ID NO: 70659 - DNA, 522 bp, Oryza sativa
  unsure (1)..(522): unsure at all n locations
  Clone ID: PAT_MRT4530_71209C.1
ggccgattcggtcgacccagcgtccgcgactcagtctgggacaggacggggaccgacatcctgcaacaacgtttntcgcgggaagggggccgggagcagaggatctaccttggtcgccccaccaagactaccactctatccgtcttggaaccttcatgacggtcttcgggacgacacgccgatcaggggttcaagaacagcaaggaccggcggcggtacccgtcaccagcgagaagcttatccagctgggaacgccacacggccaccgcggggcggagaagacgatggtcgggcgccgtcgcgctctacgggcttcagtcatggtgcagcgtcgggaggccgtctgcccaccaggcgccggggggaccagcggagtccggactgacccgacagacgcgctgctggtcgagaccaacattacactactggacacggacgtcccgctgtgcgggcacggacggagcgaactatcaactggacatctgtgcgcatgatgagtgatggtatcttcgtcatatatat

SEQ ID NO: 70660 - DNA, 298 bp, Oryza sativa
  Clone ID: PAT_MRT4530_7120C.1
atggaaaggatgaggtctgaggggaagggcggacgaggagggcggatggcgcgggccggaggtgcgagcggagagctttgggcaggggggacggcggcgcaggcggcagggatggcttgggttggcggcgcggtgtggacggggggacggcgacgtgggtggcggggacggaggtctcgatctgacgtgcgctcccgcaaggttgtggagtgcgaggccgagctggttgcgccgccgagctactgcatcgccaaccgcttcactcgcgattgggctgtacaacgggcgctgtcctcag

SEQ ID NO: 70661 - DNA, 513 bp, Oryza sativa
  Clone ID: PAT_MRT4530_71210C.1
aaaaaaagggggcggcaagccccaaaaaaaaaaaatttcccacccaattaaaagttctaaaaaagcccccaacgcagtttttaaattaaaaggggcggcccaaacaaaccagggggataaaaaaaaggcaaagcagcaaagttttttaacccaacaaaaaagaaaccctaaaaaggcaaaaaaaaaactggaaggggggaacaaaaaaaaatttcgggctaaagcaaccccctcaatttgggggccaacaccggtgcccccagccgggggagaattgtccttgtccatgccgccggccatgtccgccccagggccctggaacatttgggaaaaaagggggttgaaaaacccccccagctccttaatttgggaatgaaactcaaaagcctaagggaggggggggccgcccacccacgggagggccggggcaagggaatccccaatcttttttttggccgcggccgggagcttcgagggaaacttttaaaccttgaggggggggcccatgttgga

SEQ ID NO: 70662 - DNA, 2565 bp, Oryza sativa
  Clone ID: PAT_MRT4530_71211C.1
ttttttttttttttttctgcagcttaatagggccttcctccttcttgcttggtctgtttggcggtcctgcaccgtagccggctcctgctgcgacagtaaacaccacaatattacagcagcaaaatatggatttccaaattctttgctaggacaattagtttggtgctacaacaaaaactgctccagtagcgcaagctcgggagaacgagtaaatataacttgttatataacatacaaaaactgtataagtaattaaagaagcgcatatgaaccaacaatttaaagtctcaaggcagcaattgcttcaggcctgaagtcaatccgaagccctaacaccctcctaacctctgctggtgtcaaaagccatgtcagatgcccggcattgtcaccccagaaatccagtatctccgatacccgctcaaaattcagaattgttgacatctgggaaagtcttgagaacttgtctcggactggtctctgtgacatttccgagaaatggttgatcagggagcgtacctccttgtcgagctggagcccaccaagctggctgaacctcttctgcatcattatcacttcaagcctcttgacaatgaagtcgatgattaagtgcacaaaggaatcatagttgtttgatgtcatcacgggctggagccatgcaacattagtattaactgtaaggagaagcttctgcacccatggatcattcacctcattttctccatattcggcatcatccagctcataactgacagtggcaacagtgtccagaacaggacgaacacggggtgccacagatgccactaaatgctccagtccagaatgaaggatcttcttgaaggaagcactgatctcacctagctcagataaacaggatttgattttctctcggtcagcaggagcatgaaaagcctctgaacagagctcctcaatctcatgacggagcttcaggacatactctgagctaacatccatgttgttcagcgcagttgcaatctcctcaccagtcttctgaacaccaacaccaccaagaaagagctttgcacccaagtttggttccctcatcctccattgcagtgcttcctggtactcattgctcagtaggctcgccgccccaccaagcactgcaaaaattgagtttatacttgcagtggatgctgctcttcggcagcaactctgcagtacgaagaacacatcatccaccattgatgttgtgagaccatcaggcactggttcatcaatccggatggctttccttacattctcaaccatgaagaattcttccaggatcacataaaacccagttaaatcctgcaccattttattgaagctaccattccggaaggacttcatcgcttgtggtcccagctcaggtttgacatctcgcaatccacgaatcttattcaccataaattcagtatagtcttcaccaagctgtgtcagtgacagaatctcctcaagatagagctcgacctccctggggtcaggcccttcattgccccctgcagcattggccacagaactcaccacagagaggaggttcttggtatatgagtttatatccgaggcaagacgtgcaagtttcctgtaatcagcatatcggcgcagtatctgtgtgccccgggaatcacactcctcctgcagctcaatgatggcataggcaacaccatcctcacctctgagttcacgaagcacagcatcattctcctcaacggccaggacaatgtccttgaagagacgggtaaggcagccaacaaaatcaggccgctctgaagtaggctgtgttgcagaggttaactcagctaggtgctcgaagtcggcacgagcgcgcagggcgacgaccttcttgaggtaggcgacatagacctgcaatccctcatcagcgagagcgaggagagggaagaggcggacgaggcggagaacggcgggatggttcagcgcgtccacagcatccgccagccttcggcgcgcgagcccctccagcctgcgcttgatgtccagaaggtcgcggcggaggtcgtcatcggtggggaaccgggcgtcgatggcgaggaagtcgtgcgcggcggtggcagcggccgtgagatcatccgccgccagagcacggcgtgcggcgtcgagcgcgcgggacctatcgagcgccgcctcggcgcgcgcgagggcggcctccgccctggagtgcgcggcgtcgaggtggcgcacgcgggaggagagcgcctcggccagcgcggcggtggaggaggaggagtccctgagcgcggcggcgtcggaggcggcgagcgagaggagcggcggggcggagcggagaagggaggcggcggcgcggtcgaggtcggggcggcgggcgaggagcgcgtcgaggcgggcgtcgagggcgcgctggtaggcgacgcactcgtggaggaggcgggtggcggcgccggcgtcggtgagggcgcggagggcgacgacggaggccgggtcgccgaagtcgagggacggggcggtgtcggtggaggcgtcggggggcagcgcggcatcggggcgtggggagcgcgggatgggcaaggggtaggacgccacagccat

SEQ ID NO: 70663 - DNA, 1929 bp, Oryza sativa
  unsure (1)..(1929): unsure at all n locations
  Clone ID: PAT_MRT4530_71212C.1
gccagcggaaaccatctagaccagatcgtgcattcatcaaggcgtacatccgcccagggaaagcataatcttcnacgtgctctcgccaccgtggacttccngacgtgcgagtccatcngcatgtcgcagcaggtggaccgcaccggcatccgcacgctggccgtcgtcaccaagtccgacaaggcccccgagggcttgctcgagaaggtcaccgtggacgacgtgcgcatcggcctgggctacgtctgcgtccggaaccgcatcggcgacgagacttacaagaaggcccggaaggcgaaggcgcggctgttcgcggagcaccctctgctctccaggatcgacaagtccatggtgggcgtcccgacgctggcgcggaggctgacgcagatccaggcgagaatcatcgcccggtccctccccgacatcgtcaagcagatcaacgacaagctcagccgcagcagcgacgagctcggccagatgccgccggagctctgcaccgtggcagacgcggtgagggaattcttccacatcgtcaatcagatgcgcgcgtcgctggagaaggtgctcgtcaggggagagttcgacgagtaccccaacgaccgccaccaccacggcacggcgcgcctcgccaagatgctcgagggcttcgcgcgcaggctcccggcggcggccgcgaccgacggcgagccgttcctggtggaggagatgcgggtgctcaaggagaccaagggcatcaacctccccaacttcatgccgaggtcggcgctccacgttctgctcaaccggaaggtgaagagcatcgcgcaagtcccgcacgatctcgtcaggcaggtgtgggactacgtggaggacctggtgctcaaggagctgcagcgccactcgcgcagctacccgcaggtgcagccgtcgtgccgccccgccgtgcagagcttcatggacaaggcgcgagagcggtcggcgcggtacgtgaacgagctcatcgacatggagatggtggccaactacacggcgaaccccgagtacatcaagacctggaccagcatgatggatggccagagcaggctccgcgaggccctggaggaccgctccaagccagtggcgaagcttcgctctttctccaagcccccggcggtcgccctcccggggttcggagagaccgacgtgtcgcacctccaccagctgccgccggagcaggtggagctcgccatgcaggccttcgacctcaaggcgcgactcgccgcgtactggaacagcgtcgtgctccgcgtcatcgacggcttggccctgcacgtcctttacagcatcaagcgcctcgctgagaaggatctcgaggatgagctcgctgctcaggtcatgggcaataacatggacggagtggagcggatgttggtgcccacacccgccgccgccgccaagcgtgactgtctcaagaaaagcatcaaactgctccgggaatccagggaagtcgtcgccaatatcatggacagattaacgcggcaagcaccgaccattgacgagctcagccagatgccaccgaaactctgtaccgtggcagatgcggtgagggagttcttccacatcatctatgctggagaagaggagatgcgggtgctcgaggagaccaagggcatcaacctccccaatgtcatgctgaggtcggtgctccacaatctactaaaccagaagatcgagagcattgcacacgtcccgcacgatcttgtcaggcaggtgtgggactatgtagaggacctggtggtgaaggtgctgcaacaccactcgtggagctacccgcaggtgcagctgtcgtgtcgccgcgccgtgcagagcctcaatgtcatggacaaggcgttcacgggaacgatcggcgcagcacgtgtacgagccattggattagcttgttccttgagagggattggtttggtgttctaa

SEQ ID NO: 70664 - DNA, 594 bp, Oryza sativa
  Clone ID: PAT_MRT4530_71213C.1
atgggtcacctacttcctcctcctcactccggtgagctcaagctcgtcaagatcaagcacctcctccacgccttcgtcctcaagcacggcggccgcctcgccgccgctctcggcggcgcaaaggcgctgctcctcaccattgccgcccggggcagcattgccgggctgaggaacaagatcaggaggaggagggggaggaacaccaagaaaccacggtgccgcggcagcggcggcgatgccatgatgacaatgcagctcaagctactgcttccggccgccgtcgccgtgccgccgccgtcagagatcgccggcggcggcgttgagccgttcgacgccgagctggcctactacgactcgtcgtggaacaccatgatccccgcggaggagcagctgctgcggccgatcaccggctacctcagctggcctgagcaggaggccgaggaagacgacgatcagggtgaggaggaggaggatgagaagaacgagatcgacaggctcgcagacaagttcatagaaaggtgccatgagaggtttattctggaaaagcaggagtcctacaggaggttccatgagatgctagccaggagcttgtag

SEQ ID NO: 70665 - DNA, 580 bp, Oryza sativa
  unsure (1)..(580): unsure at all n locations
  Clone ID: PAT_MRT4530_71214C.1
aacccccgggtttgacccacgcgttttcttccacgcgtccgcgctggagcgggcgcagggggcgtgcactacgagggcaggcgccgtcgggagacgccgtcaaggagaagaactccctgaagaccaaggcggcggtggcgacagcggtgctgaaggacttcgacctgaacctgccggccgcggcgacgacggcgggggacgaggccgagagctgggggggggaggccaagagagcacgtctgctgcttctcgtctaacccgcggcggtggcggcggcggcggcggcggcttggggntttgatggtttaggtgcttagccgttccggtttaggtttcagattgataccgggttgttaatttcattgattgatttattttagttcacttctggttgggcgatggatactggtggcatgataaacatgccgtgtttagatggtttactgcaattctagggagctagaaattgtcctgggctccattttttaaatttttaccatgtataccagtacataatttgatacttaaatcaattcgattatgnnnnaannnnnnnnaaaanaaaaaaaaaaaagggcgg

SEQ ID NO: 70666 - DNA, 1010 bp, Oryza sativa
  Clone ID: PAT_MRT4530_71215C.1
cccgggctgcaggaattcggcacgaggatcgcaactagtatccccattcgccgccgcgccgcgccttcgccgccggcgataggggggtcagcgccgccgcggccgctcgtatctaaaggtatatggccaaaatggttagtcagtgtatctctccgcggcagtcctttcgcgttcctcgtttttcatcagctcggcctacgctaagttcacgtttagcaattggctacgccaaggggtcgttttgcggtgttaaacgctcaaatcgtccgagttttatagcagcagcactggatgtaccaaaaagtatgtcctcccctaattcagagagctccctgcctttgaaagaggttatctgggcatggtgcaatgctgacgcggtgtgcttcgatgttgacagcacggtctgcttggacgagggtatcgatgagctcgcggacttctgtggggcaggccaagcggttgctgaatggacggctaaggcgatgactgggtcagttccgtttgaaaaggcattagctgctcggctatcgttgttcaagccatctttggggcaagttgaggactgcatggagaagcggccaccaagaatatctcctggaattgctgagcttgttaagatgctgaaagctaaaaatgttgatgtgtacctggtttctggaggcttccgacagatgatcaagcctgttgcaatgcagctcggcattcctcctgaaaatatttttgcaaaccagttactgtttggaacttctggagagtatgttggttttgacccttcagagcctacttcacgaagtggaggcaaagctgtagcagttcaaaacataagacagaagtgtggttacaggacactctttatggttggagatggtgcaactgatcttgaggctcggcaacctaatggagcagacttgtttatctgctatgctggtgtgcagatgagggaagcggttgcatcaaaagccgattggttgatctttgattttgacgaactaatgggctatttggtttag

SEQ ID NO: 70667 - DNA, 168 bp, Oryza sativa
  Clone ID: PAT_MRT4530_71216C.1
atgggtgctaccctggtgggagcaggagaatggaatatggactttgaaggagaatggaaccagggcaatttgcatcatcctccattctcctactccttcaaagtccatattccagttcctgatggcctaatatgctctgtcctcaagttctacagggagttggcatga

SEQ ID NO: 70668 - DNA, 105 bp, Oryza sativa
  Clone ID: PAT_MRT4530_71217C.1
tccaagctttcgagaggaggtacagcccaccatatcagagtacccctaggaggggcgtcggcggcagaggacgaagttctcataggaggagatattggcggattt

SEQ ID NO: 70669 - DNA, 410 bp, Oryza sativa
  Clone ID: PAT_MRT4530_71218C.1
catgtccatgcggccgcggcggatgagcgccggattctaatacactacgctgaaaatgattgtggttatgggtacaaaatggagattgcacaaccaataacaaatgttgatgaaaacatagtgtacaagtgacaagatttatcaggacaacacgaacctccaatatgaggcaagcaaacctatggaacaaaacaacatcacaacatgctacaaccataatagaacaacctccttttgttgttgtcaggaagccactccctaatcatgtgagtaagttggaaaggcaagcaacaatattacaaggctgcaaggtaggtatagggaagagaaacaacaccaacatagctgatttgcgactagaggcaacgaagcgcaagctaaatgatacctaccaggaagctgaaaacagt

SEQ ID NO: 70670 - DNA, 1497 bp, Oryza sativa
  Clone ID: PAT_MRT4530_71219C.1
atggggctaagttacattagggaccatgcagtggagtcatacgtttggtccaacatggtgttctatgaggaagacttagcggtcataaggatggtatttgccaagttatttgtactagctgtcattatggatgacacatatgattgccatgccaacatcgaggaatgtcggaaattgcatgaagccatacaaagatgggatgagagtgctatctctttcctgccggactatatgaaaacgttgtacaatgaaattatgaacaacttcaaagagtttgaggatcaagtaggggtgaaaggccgctatcgggttgctcaaacaaagaaagagtttcaaaagctgtccacctattacctgcaagaatctgaatggtcacatcagaatcataagccaaactttaaagagcagatggaattgtctacgatgactgcaggaggaccactactatgtgtatgtactacggttggccgagatgatacactaacaaaagaagcatttgagtgggcagcgagcgacactggtgccataagagcatatgcaaatatggtgctcaaaaattttggtggcaatccatcggaaaccaaaggagttttaaatgtagagctagcagtcggcaacaaaactatccctacaacattttttgtcatcgatgggaagggttcctacagcttgttgcttggaagggattggattcatgccaattgttgtattccttcaaccatgcatcaatgcttgattcagtggcaaggcgacaagattgaaatcatgccagccgacagccaattgaagatcgagagcccaagctattattttgagggcatcgtgaagggttcaaacgtctacaccaaggacacagtagatgatctcgatgacaagcaaggacagggtttcatgtcggctgatgatttggaagagattgatataggtccggagtgggtttctagtatagttcctgttatcaagaaaaatggtgaggttagggtgtgcattgatttcagagatttaaacaaagctaccccaaaggatgagtatccaatgccagtagccgatcagctggttgatgctgcttcaggacacaagatattgagtttcatggatggaaatgcaggatacaatcagattttcatggccgaagaggatatccataaaatggcttttaggtgtcctggtgcaatcggcttgtttgagtgggttgtaatgacttttggcttgaaaagtgccggagcaacatatcaaagagccatgaattatatatatcatgatctgatcggctggttggttgaagtctatattgatgatgtggttgttaagtctaaagagatagagaaccatatagccgatttgaggaaggtttttgagagaactaggaaatatggcttgaagatgaacccgacaataagaaggtggtacccaaggataaggaacgagttgtttggcattacaacaagaaggtggtacccaagattattttggaaggtgaacttgtatggaagttaa

SEQ ID NO: 70671 - DNA, 528 bp, Oryza sativa
  Clone ID: PAT_MRT4530_7121C.1
ggccacatgctaacgaggcatctgggagcgatcttgatggggatctctactttgtgacatgggatgagaaacttatacctccaggcaagaagagctggaaccctatggactactccccacctgaagcaaaacaacttccgcgccaagtatctcaacatgatatcattgatttcttcttaaagaacatgataagtgagaatcttggtaggatctgtaatgctcatgttgttcatgctgatcttagcgagtatggtgcaatggatgagaagtgtattcacttagctgagctagcagcaactgccgtggacttccccaagactggcaaacttgcgataatgccaccacaccttaaaccaaaagtctaccctgacttcatgggaaaggaagatggacaatcttataaatcagaaaagattcttggaaggctttatcgttcaatccaagaggcctccaatggtgatgtggtgtcacaagaggtttgcactccaaatgatctgccttatgacatagatctggaagttcctggtg

SEQ ID NO: 70672 - DNA, 433 bp, Oryza sativa
  Clone ID: PAT_MRT4530_71220C.1
tttttttttttttttttttttttttttttttttttttttttttttttttttttttttttttttttttttttaaaaaaaagaaaggggattcccatgggggggggacacttggtaaccggaggggaaacttaagggtacagggaccacaccaggtaaatctaggccaacttaaacgaaaaggggtatctgggggtttttctcttccctggaaaaaaaagcatggggaagctttcaccaacagggcatttaaaccgggaattaggttaaatttatgggatgggaagggcttttacgggcggatattcgctaaggggggcgaatccggtgggggaaaaggggccccttttttatcccaaatggggggccccgcccttattttttaaaaaagccctaccccaactatccaaaaggggcccatagaaggggatttggg

SEQ ID NO: 70673 - DNA, 893 bp, Oryza sativa
  Clone ID: PAT_MRT4530_71221C.1
ccacccctcgccgccgccgccgccgccgccttcgtcgtcttctgccgtcgagcagcagcagcagtgcctttcaccatgccgaagcagatccacgagatcaaggacttcctcctgacggcgaggaggaaggacgcgcggtcggtgcggatcaagaggaccaaggacgccgacaagttcaaggtcgcgggctccaagggcctgtacaccactgtgcgtatcaagcgccaacaggctcaccaagcttaagtcgttgttctggaggagttcctctgggaattcaatgataacatccccactgattaagctgtcggtgctgtaggaaaagcagcctccgataggtagaaatacctgaccgaagcggacaatgatccctatgtagcctaggccaacaagctcaaggccgagtacaacaaggccattgctgcctacaaacaagggcgagagcactgtctagaaagcaccccccaaggaggaagaggatgaccaccaggggggaatttgacaagtccaagtccgaagtctattgattatggtgactacgacgggcagctaaaatgatgattactattacgattgaaccctttccatggtcaagatgggagcagcaaaaccctaagggctgcgtgcgtttctaaggagcctttccaacattataattaattgacttctaggaggtatttcactttccctctacatacctgatggtttaactttttattctcccctataaacggatagcgctcctatttggccccaactgggtggtgttgttgtgccacccaattgatttggtcctcctcgacaatgaatcttttgtacctagataaactttctaaatggtcatgggctgacctttgtttacataatagttagccgctttctatattaaaaat

SEQ ID NO: 70674 - DNA, 478 bp, Oryza sativa
  Clone ID: PAT_MRT4530_71222C.1
gggagggggctggctttatttccgcgaaaggcggcacaagaaattgcgcgcaggcgcagcagcgagatcggctgggagatgcgcgcacggtgtccggggccacgcaaacaaagctgctgcttcaccgatcgatcgatcgaccgacggaactggtgggggctcgtgtctgccgcgcacgggtagccgactagcccaacccagtgacgaaccgcgcgtgcgcaaccgcgccatgagagcaagcatgcagacccccaccacccatggccgcctgccactcactcactcactgagaaactaacactggttactcattgattagcactctatgtacactactaatctcccctcttacaagtgattaattaattaattaaccaagatgcatcatgcatcatgctcatgcatggcagctacttgatcagaagtaatcgaagtggttttccggtcggtagttgtacggctcttgccgctccttctt

SEQ ID NO: 70675 - DNA, 861 bp, Oryza sativa
  Clone ID: PAT_MRT4530_71223C.1
gctgagtatgaagcagttctcaaagggttgcagttactcaaggatgttgaagccgatgctattgagataatgggggattcttggctagtgatcagtcaattggcaggagaatatgagtgcaagaatgatacattaatggtttataatgagaaatgtcgagagctaatgaaggaatttcagctgaatattgaagctaatgatttggcccaaggggcgtcgggatataagccgatgatcaaagatatcaaggttaaggttgctgcattaatagccgatgattggagatatgatgtatatcaatatttacagaatccatctcaatcggcttctcggaaattgcgttacaaagcgttgaattatactttgttgaatgatgagctctattatcggacgattgatggggtgttgcttaagtgtttgagtgccaatcaagctaaggttgcaatcggtgaggttcacgaaggaatttgtggtgctcatcaatcggctcataagatgaagtggttacttcgacgtgcggggtatttctggccgacaatgctggaagattgtttcaaatattacaagggatgtcaaaattgtcagaaatttggagcaattcagagagcaccggtgtcgactatgaatcctatcattaaaccatggccgtttagaggttggggaattgatatgatcggtatgattaatccaccatcgagtaaagggcataagtttatattggtggcgaccgattattttaccaagtgggtggaagcaattcctttgaagaaagttgattcgggggatgctatacggtttgttcaagagcttataatccatcaatttggtattcctcaaaccattacaaccgatcagggttaa

SEQ ID NO: 70676 - DNA, 5091 bp, Oryza sativa
  Clone ID: PAT_MRT4530_71224C.1
atggagggcaataagtccagcagcaacgatagcctttgtcgccatcatgccgaggacatcgaggagggggagatctgcaatccgggtggtggtgatgggtgctacgttttgggctccggcaccgaggaggacaacgaggaggagaaggtgggcatgcagccagtgacctgcaagtggtgccgtctcaaggacatcctcgcgctgccttcgcccatgccatcttcttctggttctgaggggacgatcaacgaccatggtgccggcaacgctgccgccgtgttgcgactggaggcatccccgtgccacttgtgcagcagggagttcggcaacatgaaggcggttcacgggcacaagagagtccatcagaagtcagaatcacaacaacgttttctcatggctgagaaaccgccggcatcaccgtcttcagctagtaaagatgattcttctaaatctaagacccagaagcctggttcttccaaggatggagaggtacaacaagttgcagatggtgcagctcaatcaagtgataaaggtgctgcagatggttttcaaggggttcaaggtgatggctctcaaggggttcaaggtgttggttctcaaggaattcaaggtgacggttctcagggatttcaaggtgaaaatcttaaccaagatggcaacacggcacagctacagtttaacaacttccaggatcggattgattatgttgtgcaacatgctttgattaatcaatctggggtattagtcaacacattatcaaacatggtgaagtcgatggttgatggctcgatagctgaatatcaggctacaggactggtttatttgccaggaggggttttttcaaattatcggcccttgatcactaacaatcagccgactgttcagccagttcctcccaatgtaccatcggctcaaccgacagcaccagtatcggctcctgcacctgctgcaccatcatcggcaccaggggccaatttgaattatcagtatcagcctccatcgccgcaaactcaatatcagcaaggaggaccggctcagccccagtttattcctcagtacaatcaattcgagcctgttccacagcaagcacaaggagcgcctcagcaacgaccatggacagatatgattgcagatgtaatgagggaacagtttgggcttaagccgaaagatgctggaaatttgtatcggcatccttaccccgagtggtttgagagagttcctctgcctaaccgattcaaagttccagacttttcaaaattctcagggcaggatagtgtttcaacctatgaacacgttagccggtttttaactcagtatggtgaagcatcggctgtggatgccttgagggttaggttgtttccattgtctttatctggatcgactttcacttggttttcttctttgccatgtgggtcaatcaacagttgggccgatttggagaagcattttcatagttatttctatagtgggattcacgagatgaaactatcagatttaacagcgattaagcaaaggcatgatgagcctgtgcaggaatacattcagaggttcagagagatgaggaataaatgctacagcttggccttgactgatgctcagttagccgatttggcttttcaggccgaatgggttagaagcaagaaggttataccatgccaatgggtaaagaattctggagaagaggagaggtatgactttgatatcaccaaggctaataagatttctgatttgctacttcgggagaaacagattcaacttcctgctggtcatacaatcccatcggctgaagaattgggcaagaaaagaagaagtatgacaaacagtaagagaggcattatgaagaagatgatggcggttttgatcctcattggggctgtgagttctttagattttgctggaatgaagaatcagaagagaagggttcaaaggttgaggaacagggagcgctttcaggaggttgagcaagaaatcaatcatcggctaaagaagacgaagccgaggcaggagtggcgtgttaagaatcaagttcctgtagccgatgaagccgcagccgatgaagcaaagagattagctaaaggaaaacgtgttgtgactgcatcggttaacatggttttcacgttacctgctgagtttggggtcaagcaagccgatgttgatgaagttgaagaagaatcggctaaattgatgctatcaccagaacaagcagtctttgagaatcctgaagggatagagaatcggtatcttaaaccattgtatataaatagctatgtcaatgggaagccgatgtccaagatgatggtcgatggtggggttgtagtgaatttgatgccttatgctacgtttaggaagctgggaaggaatgctgaggatctcatcaagacaaacatggtgctcaaagattttggtggtaatccatcagaaaccaaaggagttttgaattggcaaggcgacaaaattgaaatcgtgccagccgacagccaattgaagatggagagcccaagctattattttgtgggcgtcgtggagggttcaaacgtctacaccaaggacacagtagatgatctcgatgacaagcaaggacaaggtttcatgtcggccgatgattgggaagaaattgacataggtccaggtgatcgaccaaggccgacatttattagtaagaatttatcttcagaatttagaaccaagttgatagagctgttaaaggagttcagagattgcttcgcttgggagtattatgagatgccaggactcagccgatcgattgttgaacatcggctacctatcaaaccaggggttagaccacatcaacaacctccgagaagatgcaaagccgatatgctcgaacctatcaaggctaagattaaacgtctatatgatgttggttttattcgtccttgccgatatggtgagtgggtttctagtatagttcctgttatcaagaaaaacggcaaggtgagggtgtgcattgacttcagggatttaaacaaagctaccccaaaggatgagtatccaatgccagtagccgatcagctgtctaaagagatagaggaccacatagccgatttgaggaaggtttttgagagaactaggaaatatggcttgaagatgaacctaacgaaatgtgcttttggtgtatcggctggccagtttttgggatttcttattcatgagagggggattgagataactcaaaggattgttaatgcaattaagaaaattcagcctccagagaacaagacagagttacaggagatgatcggcaagataaattttgttagaaggtttatttctaatttgtttggaaggttgaggcattatctattgtccaacgaatgcactgtcatatgcaaagccgatgtcgtcaagtacatgttatcggctccaattttgaaaggaagggttggaaagtggatattttccttaacggagtttgatcttcggtatgagtcaccgaaggcagtcaaagggcaagctatagccgattttattgttgaccatcatgatgattcaatcggctcggttgaggttgtcccatggactttgttctttgatgggtcaatatcctcttatggttgtggtatcggcttggttataatttcccctcggggggcaagttttgagtttgcctatactattaaaccttatgcaactaataatcagactgagtatgaagcagttctcaaagggttgcaattattcaaggaagttgaagccgatgctattgaaattatgggagattctttgctagtgatcagtcaattggcaggggaatatgagtgcaaaaatgatacattaatggtttataatgagaagtgccgagagctaatgaaggaatttcggctggttactttgaggcatgtatctcgagagcaaaatattgaagctaatgatttggcccaaggggcgtcgagatataagccgatgatcaaagatgtcaaggttgaggttgctgcattaacagccgatgattggagatatgatgtacatcaatatttacataatccatctcaatcggcttctcgaaaattgcgttacaaagcgttgaagtatactttgttggatgatgagctctattatcggatgattgatggggtgttgcttaagtgttttagtgccgatcaagctaaggttgcaatcggggaggttcacgaaggaatttgtggtactcatcaatcggctcataagatgaagtggttgcttcaacgtgcggggtatttttggccgacaatgctggaagattgtttcaaacattacaaggggtgccaagattgtcagaaatttggagcaattcagagagcaccggcatcggctatgaatcctatcattaaaccatggccgtttagaggttggggaattgatatgatcagtatgattaatccaccatcgagtaaagggcataagtttatattggtagcgaccgattattttaccaagtgggtggaagcaattcctttaaagaaagttgattcgggggatgctatacaatttgttcaagagcatataatctatcgatttgggattcctcaaaccattacaaccgatcaaggttcaatcttcgtgtccgatgagtttgttcagtttgccgatagcatgggtatcaaattgttgacttcttcaccatattatgcacaagctaatggacaggccgaggcatctaacaagagtttgatcaaattgattaagagaaagatttctgattatcctcggcagtggcatactcgattggccgaagcattgtggtcttatcggatggcttgtcatggatcgatccaagtccctccttataagcttgtttatgaacatgaagctgttttaccatgggaggttagaattggctcaaggagaacggagttacaaaatgatttgacagccgatgaatattatcatctcatggccgatgaaagggaagacttggttcaatctagattaagagcccttgcgaaggttaccaaggataaagaacgagttgctcggcattacaacaagaaggtggtgtccaagactttttcggaaggtgaacttgtatggaagttgattttgccgattgggactcgggataacaaattcggcaagtggtcgccgaattag

SEQ ID NO: 70677 - DNA, 6059 bp, Oryza sativa
  Clone ID: PAT_MRT4530_71225C.1
ttgtaggatcaaatcaactggcacgctagcatatccaaaggcaagtttttgacctgcactggagttaagcagatctcccggacctcgtgttttcacatcaacacgcttttggcacgcctggtgggactgatcagaagtcagaatcacaacaacgttttctcatggctgagaaaccgccggcatcaccgtcttcagctagtaaagatgattcttctaaatctaagacccagaagcctggtctatctgaagttaatgagagcaacatcatgcccatcactccggacaagttgaaacccgagcaacagaaggatcttgaggcaatgatgcagcaagcatgaaaccaattcttgaattcattcatggagacccaaggttcagaagtataaagtaaaagtaattgttgatgttcccgcaacaggttcttccaaggatggagaggtacaacaagttgcagatggtgcagctcaatcaagtgataaaggtgctgcagatggttttcaaggggttcaaggtgatggctctccaagggttcaaggtgtttttttcaaggaattcaaggtgacggttctcagggatttcaagatcggattgattatgttgtgcaacatgctttgattaatcaatctggggtattagtcaacacattatcaaacatggtgaagtcgatggttgatggctcgatagctgaatatcaggctacaggactggtttatttgccaggaggggttttttcaaattatcggcccttgatcactaacaatcagccgactgttcagccagttcctcccaatgtaccatcggctcaaccgacagcaccagtatcggctcctgcacctgctgcaccatcatcggcaccaggtcaattaattaatccttggttgttggtgagagagcagccacagcatagtgggcagaatatgaatcggctaacctaagatcaagttacggctatgttcttatcacctcaacctactgttgacacaatccagcaacaaccgattcaacagacaccaccaaggcagcaggttgtgcatccgattcaacagacaccaccaaggcagcaggttgtgcagcacgctgcgaatcaagttgtcccagagcatttggttcataatgtccaaccagaccaaacgatgtaatgagggaacagtttgggcttaagccgaaagatgctggaaatttgtatcggcatccttaccccgagtggtttgagagagttcctctgcctaaccgattcaaagttccagacttttcaaaattctcagggcaggatagtgtttcaacctatgaacacgttagccggtttttaactcagtatggtgaagcatcggctgtggatgccttgagggttaggttgtttccattgtctttatctggatcgactttcacttggttttcttctttgccatgtgggtcaatcaacagttgggccgatttggagaagcattttcatagttatttctatagtgggattcacgagatgaaactatcagatttaacagcgattaagcaaaggcatgatgagcctgtgcaggaatacattcagaggttcagagagatgaggaataaatgctacagcttggccttgactgatgctcagttagccgatttggcttttcagggtatgatagctccgatcagggagaagttctcatcccaagactttgatagtttgtctcaccttgcgcaaaaggtaaaccttgcatgaacagaggtttgcacaggccaaaaagaactttaaaaaggttaatcatgtctgtccttacatatatggatcggatgatgatgatgatgatgactccgaaatagcaacagccgaatgggttacaagcaagaaggttataccatgccaatgggtaaagaattctggagaagaggagaggtatgactttgatatcaccaaggctaataagatttctgatttgctacttcgggagaaacagattcaacttcctgctggtcatacaatcccatcggctgaagaattgggcaagaaaaggtattgtaagtggcataattctggatctcattctactaatgattgcaaagtcttcagacagcaaatctagccggctattgagggaggcaaaatcaaatttgatgattccaagaggccgatgaaggtcgatggcaatccttttcctgttaatatggcacacacggttggccgaacaacagatggaggaagagccaaaaggtttcaggggaattcggctaaattatcaagaagtatcacaagaagtctgacaaacaataaaagaggcattatgaagaagatgatggcggtatgagggtgccatttattgaagactgtccttaaggcaagaattgtgcaaaaatttccagtggatccatttaatagaagcaatcggctaaagcaaacaagggttcctgtggatcaaaggttgggcccagtgaaccaagatcgtaaccaaaaggacaatgaagacaggaagactcaatggtgtccttctggtatctttacaaaaaatcagaagagaaggaaggcgaagccgagacaggtgtggcgtgttagaaatcaagctcctgtagccgatgaagccgcagccgatgaagcgaagatgttggctaaaggaaaaagtgttgtgaccgcatcggttaacatggttttcatattgcctgctgaatttggggtcaagcaagccgatgtcgatgaagttgaagaagaatcggctaagttgattttatcaccagagcaagcagtcttcgagaagccagaaggaacagagaatcggcatcttaaaccattgtatataattggctatgtcaatgggaagccgatgtctaagatgatggttgatggtggggctgcagtgaatttgatgccttatgctacatttaagaagttaggtagaaatgctgaagatctcatcaagacgaatatggtgctcaaagattttggtggtaatccatcggaaaccaaaggagttttaaatgtggagatgatagttggcagcaaaactatccctacaacattctttgtcatcgatgggaagggttcttacagtttgttgcttggaagggattagattcatgccaattgttgtattccttcaaccatgcatcaatgcttgattcagtggcaaggcgacaagattgaaattgtgccagctgacaggtcagttaatgttgccagtgacgatttattttttgagggtgtcgtggagggttcaaacgtctacaccaaggacacagtagatgatctcgatgacaaacaaggacagggtttcatgtcggccgatgatttggaggaaattgatataggtccagaatttagaaccaagttgatagagcttttaaaagattcaaagattgctttgcttttgtatattgtgagatgccaggactcagccaatcaattgttgaacatcggctacctatcaaaccaggggttagaccgcaccagcagcctccgagaagatgcaaagccgatatgctcgaacctgtcaaggctgagattaaacgtttatatgatgcttgttttattcgtccttgccgatatgctgagtgggtttctagtatagttcctgttattaagaaaaacgacttgaataaagctaccccaaaagatgagtatccaatgccagtagccgatcagttagttgatgctgcctcaggacacaaggttttaagttttatggatggtaatgcagggtacaatcagatctttatggccaaagaagatattcataagacaacttttaggtgtcctggtgcaatcggcttatttgagtgggttgtaatgacttttggtttgaaaagtgctggggctacatatcaaagagccatgaattatatatatcatgatctgatcggctggttggttgaagtctatattgatgatgtggttgttaaatctaaagaaatagaggaccacatagccgatttgaggaaggtttttgagagaaccaggaaatatggcttgaaaatgaacccaacaaagtgtgctttcggtgtatcgtctggccagtttttgggatttcttgttcatgagagggggattgagataactcaaagaagtgttaatgcaatcaaaaagattcagcctccatagaacaagacggagttgcaggagatgatcgacaagataaattttgttaaaggtttatttctaatttgttcgaaaggttagagccttttacaccattattaagattgaaagacgatcaaaagtttacttggggggtagagcaacagaaagcattggataatattaaggaatatcttagctctcccccagtgttgattcctccacagaaaggggtacctttcagattatatctatcggctggtgagaagtcgatcggctcggtcctgattcaggagttggaaggaaaggaaagggttgtattttacttaagttctcgactcttggatgcagaaaccagatattcccctttggagaagttgtgcttgtgcctgtatttttcctgtacaaggttaaggcattatctattgtccaacgaatgcactatcatatacaaagccggtgttgttaagtacatgttatcgcctccaattttgaaaggaagggttggaaagtggatattttccttaacagaattcgatcttcggtatgagtcactaaaggcagtcaaggggcaagctatagccgattttattgtcgatcatcgtgatgattcaattggctcagttgagattgtgccatggactttattctttgacggatcagtatgtactcatggttgtggtatcggcttagtgataatttcccctcggggggcatgttttgagtttgcttatactattaaaccttatgcgaccaataatcaagctgaatatgaagcagttctcaaagggttgcagttattcaaggaagttgaagccgatgctatcgaaattatggggggattctttgctagtaatcagtcaattggcgggagaatatgagtgcaagaatgatacattaatggtttataatgagaagtgccaagagctaatgaaggaatttcggctggttactttgaggcatgtatctcgagagcaaaatattgaagctaatgatttggcccaaggggcatcgagatataagccgatgatcaaagatgttaaggttgaagttgctgcaataacagccgatgattggagatatgatgtacatcaatatttacagaatccatctcaatcggcttctcggaaattgagatataaggcgttgaagtatactttattggatgatgaactctattaccggacgtatgatggggtgttgcttaaatgtttgaataccgatcaggctaaggttgcaatcggcgaggttcatgaagggatttgcggcactcatcaatcggctcataagatgaagtggttgcttcgacgtgcgggatatttttggctaacaatgctggaggattgtttcaaatattacaaggggtgtcaagattgtcagaagtttggggcgtttcagagagcaccggcgtcggctatgagtcctatcattaagccatggccatttagaggttggggaattgatatgatcggcatgattaatccaccatcgagtaaagggcataagtttatattggtggcgaccgattattttaccaagtgggtagaggcgattcctttgaagaaggttgattctagggatgctatacagtttgttcaagagcatataatctatcgatttggtattcctcaaaccattacagccgatcaagattcaatttttgtatctgatgagtttgttcagtttgccgatagcatgggtatcaaattgttgaattcttcaccatattatgcacaagctaatgggcaggccgaggcatctaacaagagtttgatcaaattgattaaaagaaagatttctgattatcctcggcaatgacatgctcgtttagccgaagcgttatggtcttatcggatggcttgtcatggatcgattcaagtccctccttataagcttgtttatgggcatgaggctgttttaccataggaagttagaatcggcttgagaagaacggaattgcaagatgatttgacagccaatgagtattataaccttatggccgatgaga

SEQ ID NO: 70678 - DNA, 358 bp, Oryza sativa
  Clone ID: PAT_MRT4530_71226C.1
gacatggccagggggattttaataacccatcactttaactgatttacagcctaaaaccgccttatcctcaaagaacacagcgtttcacagcgtgcaaagatctgtgcctccagcattcacatagccaccttacacaaaccaaacccttacttaagtgctcaatcataacaaaacgaggctcactccccccttcattgtataaagaaacacgcttcagagcgcaattagataacttccattgggcaccaatcctaggcgctggccgaaagcgttcaacacctcccataagatctggtgttagatgttcccaatgaaatagaccccgcactccgtgccggagaacaccatggagaaagtg

SEQ ID NO: 70679 - DNA, 4620 bp, Oryza sativa
  Clone ID: PAT_MRT4530_71227C.1
atggatgagaaaccaccagcatcgccggcttcagctggtaaagatggctctgttaaatctaagatccagaagcttggtttatctgaggttgatgaaggcgacatcgtgaccatcactctggacaacttgacacctaagcagcagaaggatcttgaagcaatgatgcaacaagcatgtaaccaattcttgaactcgttcatgcagacccgcaagggaacaattgttcagaagtataaagttcttccaaggatagagaggtacaacaagctccagatggtgcagctcaaccaagtgataaaggtgctacagttggttctcaaggagttcaaggtgatggctctcaaggggttcaaggtgttggttctcaaggaatttaaggtgatggttctcagggatttcaaggtggaaatcttaatcaagatggcaacacgttgggccgatttggagaagcattttcatagctatttccacagtgggattcatcagatgaaattatctgatttaacaacgtttaagcaaaggcatgatgagcctgtgcatgagtacattcagaggttcagagagatgagaaataaatgttacagcttgagtttgactgatgcccagttggccgatttggcttttcagggtatgatagctccgatcagggagaaattctcgtctcaagactttgatagtttatcacatcttgcacagaaggtaaccttgcatgaacagagattcgcagaagccaggaagaactttaaaaaggttaatcatgtctgtccttacatatatggatcggatgacgatgatgataatgattctgagatagcagcagccgattgggttagaagcaaaaaggttataccatgccaatgggtgaggagttctggaaaagaggagaggtatgactttgatattaccaaggctgataagattttcgatttgctacttcgagagaaacagattcaacttcctgctggtcatacaatcccatcggctgaagaattgagcaagagaaggccgatgaaggttgatggtaatccttttcttgtcaatatggtgcatacagctggtcgaacagccgatggaggtcgtgcaagaggttttcaggtgaattcggctaaaattatcaaaaagtatcagaagaagtatgacaaacagcaggaaatgcattatgaagaagacgatggcggttttgatcctcattggggctgtgagttctttagattttgctggaatgaaggtatgaggctaccatctattgaagactgtcctgggtgcagtaatgttgcagaaggttcaagccgatcgtataatagaggcaatcagctaaggcaagcaagagttcctgttcatcaaaggttgggcccgaagacgaagccgaagcaggagtggcgtgttaagaatcaagctcctgcagccgatgaagcaaatagattggctaaaggaaaaggtgttgtgattgcatcggttaacatggttttcacgttgcctgctgaatttggggtcaagcaagccgatgtcgataaagttgaaggggaatcggctaagttgattttgtcaccagaacaagcagtcttcgagaagccggaagggacagagaatcggcatcttaaaccattgtatataaatgactacgtcaatgggaagtcgatgtctaagatgatggtcgatggtggggctgcagtgaatttgatgccttatgctacatttaggaagctgagcagaaatgttgaggatctcatcaagacaaacatggtgctcaaagattttggtggcaatccatcagaaaccaaaggggttttgaatgtggaactgacagtcggcaacaaaactatccctacaacattctttgtcatcgatgggaagggttcttacaacttgttgcttggaagggattggattcatgctaattgttgtattccttcaaccatgcatcaatgcttgattcagaggcaaggcgacaagattaaaattgtgccagccgacaggtcagtcaatgttgccagtgccgatttagctctttgggagatggatggtctcgattgcttatctggtaaagtttgggatggagattttctaaaaatggagagcccaagctattattctgaggcatcgtggagggttcaaacttttgagggcgtcatggagggttcaaacgtctacaccaaggacacagtagatgatctcgatgacaagcaaggacagggtttcatgtcggctgatgatttggaagaaattcacataggtccaggtgatagaccaaggccgacatttattagtaagaatttatcttcagaatttaaaaccaagttgatagagctgttaaaggaattcagagattgctttgcttgggagtattaccaaatgctaggactcggcctattgattgttgaacatcggctacctatcaaaccaggggttagaccacatcaacaacctccaagaagatgcaaagccgatatgcttgaacctgtcaaggctgagattaaacgtttatatgatgctggttttattcgtccttgccggtatgctgagtgggtttctagtatagttcttgttatcaagaaaaacggcaaggtgagggtgtgcattgacttcagggatttaaataaagctaccccaaaggatgagtatccaatgccagtagccgatcagctggttgatgctgcttcagggcacaagatattgaactttatggatggaaatgcgggatacaatcaaatttttatggccgaagaagatatccataagactgcttttaggtgtcctggtgcaatcggcttttttgagtgggttgtaatgacttttggattgaaaagtgctggagctacatatcagagagccatgaattatatataccatgatctaatcggctggttggttgaagtctacattgatgatgtggttgttaagtctaaagaaatagaagaccacatagccgatttgaggaagatttttgagagaaccaggaaatatggcctgaagatgaatccgacaaagctgagtatgaagcggttctcaaagggttgcagttactcaagggaagttgaagccaatgctattgaaattatgggggattctttgctagtgatcagtcaattggtaggagaatatgagtgcaagaatgatacattaatggtttataatgagaagtgccaagagctaatgaaggaatttcggctgaatccatctcaatcggcttctcggaaattgcgttacaaagtgttgaagtatactttgttggatgatgagctctattatcggacgattgatggggtgttgtttaagtgcttgagtgccgatcaagctaaggttgcaatcggtgaggttcacgaaggaatttgtggtattcatcaatcggctcataagatgaagtggttgcttcgacgtgcggggtatttttggccgacaatgctggaagattgtttcaagtattacaagggatgtcaagattgtcagaaatttggagcgatacagagagcaccggcatcggctatgaatcctatcattaaaccatggtcatttagaggttggggaattgatataatcagtatgattaatccaccatcgagtaaagggcataagtttatattggtggcaaccgattactttaccaagtgggtagagacgattcctttgaagaaagttgattctggggatgctatacattttgttcaagagcatataatctatcgatatggtattcctcaaaccattacgaccgatcaaggttcaatcttcgtgtccgatgagtttgttcagtttgtcgatagcatgggtatcaaattgttgaattcttcaccatattatgcacaagctaatgggcaggctaaggcatctaacaagagtttgatcaaattgattaagaggaagatttctgattatcctcggcagtggcatactcgattggccgaagcattgtggtcttatcggatggcttgtcatgcatcgatccaagtccctccttataagcttgtttatggacataaggctgttttgccatgggaagttataatcggctcaaggagaacggagttgcaaaatgatttgacagccgatgagtattataatctcatggccgatgagggggaagacttggttcaatctagattaagagcccttgcaaaagttaccaaggataaggaacgagttgctcgacattacaacaagaaagtggtgcccaagactttttcggaagcacaagaagagggagagaaacaacagggaggggaggtagaatcaagggagggggacacaggcaccgactgcaacatcgtcatcggccacgacaccaccgtgaggggagaggaggaagggaacgctggcgccggttccgaagccgccaccgacccaaacgtagccacaggtgggagaaggggggagggggacacctacgctagtcacgtagccgctgcgcttttgcgccgccggagccagcttggccgcaggcccctttgccgccataggggggagaagaagggggaagaacacggctccgatgagcagcggtcatgcagctggctccgcccctgccactgccgcaacaaggaaagggagggggcacgtcggaggctcggccggaaccgaatgccggatctgtccttccccactgccaccgtctgctgcttctga

SEQ ID NO: 70680 - DNA, 2115 bp, Oryza sativa
  Clone ID: PAT_MRT4530_71228C.1
gatttctttgttcatgagagggggattgaggtaactcaaacgagtgttaatgcgatcaagaagattcagcctctagagaacaagacagagttacaggagatgatcggcaagataaattttattagaaggttaaggcattatctattctccaacgaatgcactatcatatgcaaagccgatgttgtcaagtacatgttgtcggctccaattttgaaaggaagggttggaaagtgcatattttccttaacggagtttgatcttcggtatgagtcaccgaaggcagtcaaaggacaagctatagccgattttattgttgaatatcgtgatgattcaatcggctcggttgaagtcgtgccatggactttgttctttgatggatcaatatgcactcatggttgtggcatcggcttggttataatttcccctcggggggcaagttttgagtttgcttacactattaaaccttatgcaactaataatcaggctgagtatgaagcggttctcaaagggttgcagttactcaaggaagttgaagccaatgctattgaaattatgggggattctttgctagtgatcagtcaattggtaggagaatatgagtgcaagaatgatacattaatggtttataatgagaagtgccaagagctaatgaaggaatttcggctgaatccatctcaatcggcttctcggaaattgcgttacaaagtgttgaagtatactttgttggatgatgagctctattatcggacgattgatggggtgttgtttaagtgcttgagtgccgatcaagctaaggttgcaatcggtgaggttcacgaaggaatttgtggtattcatcaatcggctcataagatgaagtggttgcttcgacgtgcggggtatttttggccgacaatgctggaagattgtttcaagtattacaagggatgtcaagattgtcagaaatttggagcgatacagagagcaccggcatcggctatgaatcctatcattaaaccatggtcatttagaggttggggaattgatataatcagtatgattaatccaccatcgagtaaagggcataagtttatattggtggcaaccgattactttaccaagtgggtagagacgattcctttgaagaaagttgattctggggatgctatacattttgttcaagagcatataatctatcgatatggtattcctcaaaccattacgaccgatcaaggttcaatcttcgtgtccgatgagtttgttcagtttgtcgatagcatgggtatcaaattgttgaattcttcaccatattatgcacaagctaatgggcaggctaaggcatctaacaagagtttgatcaaattgattaagaggaagatttctgattatcctcggcagtggcatactcgattggccgaagcattgtggtcttatcggatggcttgtcatgcatcgatccaagtccctccttataagcttgtttatggacataaggctgttttgccatgggaagttataatcggctcaaggagaacggagttgcaaaatgatttgacagccgatgagtattataatctcatggccgatgagggggaagacttggttcaatctagattaagagcccttgcaaaagttaccaaggataaggaacgagttgctcgacattacaacaagaaagtggtgcccaagactttttcggaagcacaagaagagggagagaaacaacagggaggggaggtagaatcaagggagggggacacaggcaccgactgcaacatcgtcatcggccacgacaccaccgtgaggggagaggaggaagggaacgctggcgccggttccgaagccgccaccgacccagacgtagccacaggtgggagaaggggggagggggacacctacgctagtcacgtagccgctgcgcttctgcgccgccggagccagcttggccgcaggcccctttgccgccataggggggagaagaagggggaagaacacggctccgatgagcagcggtcatgcagctggctccgcccctgccactgccgcaacaaggaaagggagggggcacgtcggaggctcggccggaaccgaatgccggatctgtccttccccactgccaccgtctgctgcttctga

SEQ ID NO: 70681 - DNA, 739 bp, Oryza sativa
  Clone ID: PAT_MRT4530_71229C.1
gtgcttatatttttcttgtacaaggttaaggcattatctattgtccaatgaatgcactgtcatatgcaaagccgatgtcgtcaagtgcatgttatcggctccaattttgaaaggaagggttggaaagtggatattttccttaacggtgatcgatcttcggatgagtcaccgaaggcggtcaaagggaaagctatagccgattttattgttgaacatcatgatgattcaatcggctcggttgaagttgtgccatggatttagttttttgatggatcagtatgcactcatggttgtggcatcggcttgattataatttcccctcggggggcaagttttgagtttgcttacactattaaaccttatgcaactaataatcaggctgagtatgaagcagttctcaaagggttgcagttactcaaggatgttgaagccgatgctattgagataatgggggattcttggctagtgatcagtcaattggcaggagaatatgagtgcaagaatgatacattaatggtttataatgagaaatgtcgagagctaatgaaggaatttcagctggttactttgaagcatgtatcgcgatagcagaatattgaagctaatgatttggcccaaggggcgtcgggatataagccgatgatcaaagatatcaaggttaaggttgctgcattaatagccgatgattggagatatgatgtatatcaatatttacagaatcaatctcaatcggcttctc

SEQ ID NO: 70682 - DNA, 399 bp, Oryza sativa
  Clone ID: PAT_MRT4530_7122C.1
agcatctttgatgcaaaggccggtattgctctcaatgacaactttgttaagcttgtgtctgggtgtgacaacgaatggggagacaggtaatcatttctatgtgcattagaaagctatacttgttttttagttcatggttgtttggttcatatcgcgtaggctagctctccattagaaagctatactggctgttttgttcatatccttggaattttaacatgttctatggtagttctctgaactacattaccttggtcaggttgaacccttgttttctaatgtattactggttagttgcagttcttaacacaaactggatcacactccagtgtgccctctttcttttgctagttggattcaatattaaaaaattcttgactagtatctttttgccatact

SEQ ID NO: 70683 - DNA, 548 bp, Oryza sativa
  Clone ID: PAT_MRT4530_71230C.1
agagatatgtttgggcaaaagtctgccgcaaagacttatggatcaaattaactggtacgctagcatacctaaagacaagtttttgacctgcactggagttaagcagatctcccggacctcgtgttttcacatcaacacgcttttggcacgcctggtgggactgatcagaagtcagaatcacaacaacgttttctcatggctgagaaaccgccggcatcaccgtcttcagctagtaaagatgattcttctaaatctaagacccagaagcctggtctatctgaagttaatgagagcaacatcatgcccatcactccggacaagttgaaacccgagcaacagaaggatcttgaggcaatgatgcagcaagcatgaaaccaattcttgaattcattcatggagacccaaggttcagaagtataaagtaaaagtaattgttgatgttcccgcaacaggttcttccaaggatggagaggtacaacaagttgcagatggtgcagctcaatcaagtgataaaggtgctgcagatggttttcaaggggttcaaggtg

SEQ ID NO: 70684 - DNA, 623 bp, Oryza sativa
  Clone ID: PAT_MRT4530_71231C.1
aaaatgttgaattctcaccttattatgcacaagctaatgggcaagccgaggcgtctaacaagagtttgatcaaattgattaagagagagatttccgattatcctcggcagtggcatactcgattggccgaagcattatggtcctattggatggcttgtcatggatcgattcaagtccctccttataaacttgtttatggacatgaagttgttttgccatgagaagttagaatcggctcaagaagaacggagttgcaaaatgatttgacagccgatgagtattataatcttatggccgatgagagggaagacttggttcaatctagattcagagcccttgcaaaagttgctaaggataaggaacgggttgctcgacattacaacaagaaagtggtagccaagtctttttcggaggtagaacttgtatggaaattgattttgccgattggcactcgggatagcaaattcggcaagtagtcgccgaattgggaaggaccgtttcaaatctataaagttgtgtctaaaggaggttatatgttgcaaggactcgatggagaagtttatggacgagcgctcaatggaaaatacttgaagaaatattacccaagtgtttgggttaatgca

SEQ ID NO: 70685 - DNA, 264 bp, Oryza sativa
  Clone ID: PAT_MRT4530_71232C.1
atagtttcttcatcaccgtcctcgtcatgatcaagcttgcaagttgcaacctagtggaaaagagaaggacttggttgttttttctagtttctttagaagtccatagcattttcatgagcttatgtcatttgacatcttcaaggggcctttatgcaaactgcttgtacttgcagttgactctccactagggataactcatgtgatatgtacttagttatctataatcaataaaatacatgagttttcaaacaaaaaaaaaaaaaa

SEQ ID NO: 70686 - DNA, 419 bp, Oryza sativa
  Clone ID: PAT_MRT4530_71233C.1
acgcgggggcaaaagcagatcggaatccggtggccagaccaagaaacccaagaaacgcaaggttttttctccttttgtggccgcaggcgatggcggcggcagcggtttaggaggacccaagattcatagcgagcttcggcccatcccttttgaagacccttttggcgacatatatggtgaaggtgtctggagaaaattcagcagaagagcttctatcctaaatcgcaatgttgtcgcactggcttcattcaatggagaaaaaaggttttttgcatgcacaggtttttttattgaatggagtggatctaaagaatgaattttgacatcagcgaagctttagagattctggtgaatgagaacaagaattgatgaaaacttgaggattaaagtgttttcttaacaaccaatgcaaagaaggg

SEQ ID NO: 70687 - DNA, 332 bp, Oryza sativa
  Clone ID: PAT_MRT4530_71234C.1
gcacgagggagagagagaactagtctcgagttttttttttttttttttttttttttttttttttaacgcggtaaatattttattgtacaagcgtacatcaatacgcgtataaatggttttttacaatttgtcatgccatcactgttacaaaacatgcatacactcgtggtccaaaaaatcacaatgcagagggcattagtcaccaagatttttccatcgtatgccaccggagacagtcataagtcgttgtgcgctctccctggatcgacgtctgtgcgtcacccctgcccttcgtgttggccgccggcaatgagcgtggatgatgctgtgtc

SEQ ID NO: 70688 - DNA, 255 bp, Oryza sativa
  Clone ID: PAT_MRT4530_71235C.1
atgctcttgaaccatgtgatccaacttttctcgggtcgagttttctcgagggatggccaggatttgaaggtgtttttccatgtactcgccgacggcgtggcagacgggctggcggaggacgacatcgccgcaggcgtagatctagccggagatgaagccgcctggggatcgctttagtgcgaaacttactcgaagtcgatacgcggcaaatccgaaacattaccaaatatcccggacttggggggcatgtgttaa

SEQ ID NO: 70689 - DNA, 568 bp, Oryza sativa
  Clone ID: PAT_MRT4530_71236C.1
cacgaggctgggattattgcgcaagggctttgagcatcataggcagttgtggcctaaatgcggtgagataaacgatttgttttcccttctgatggcaacttacttactagtaacttcaggaataaactgccttgctcagtacaaacgtagatgcagtgctatgtcggtaatttgcattcgttttatgctatatccataatgcatattgaggcagaggcagtaatgtttgccctacctttaattttaagaaaaagagtaatatttgttatgtttgacatccaatgttacttactagtactatcattagtagcactggaaacgtttattcaactagaccggctaagctcagtattgatctgataagaatggcataacagatgggcttgacttatgctagcatgctaaaaccaatagataccatacaccttagaatttggacagtttctgattctagaaatcaaattggacagtttctgattctagatcctttattcagcatcttgagcagtactgtaatgcagaactaaataaaaaattggccatatcagtagattataaagaattatac

SEQ ID NO: 70690 - DNA, 1203 bp, Oryza sativa
  Clone ID: PAT_MRT4530_71237C.1
atgcgcggtacattttcagattgggtaaagaaagtgataatgggtagtaaagttgatgtctaggtaaatgatcaagtggggccttactttaaaacacataaaggtttgaggcagggagatcctctatctcctcttttattcaatttggcagctgaagtactaactttactagtgtaaagagctgaggataatctgctgataggagtactgggggataatgataacaacaagatggtcattttacaatacgctgatgataccatatttcttctatttgataataagacatgcaaaaaaatctaaaatacatcttatgtttgtttgagcaattatctggtctcaaaatcaacttcaataaaagtgaggtgttctgcattggtgagactgctgataaggcagaggttttcagtcagatatttacttgcagtgtgggatcggggggtctaggtgttctggacctagacattatgaataaggccttgttggggaaatggatatggaatttggaaaacaaagaaggttggtggcaggagattcttaggggaaaatatttgaaaaataaaaccttgtgtaggatcgagattaaacagggtaattctcatttctggcatgggttgatggaagtaaaggatgattttttttaaattttgttcaaaaaagtgggaaatgggaaaagaactttgttttggaaagatagctggataggtggaaacccccttaacattcagttcccaaatctgtataacataactttgaccaaacatgtgacaattgcaaaggtgaaaatgaaaggcttgcaatgtatcaaattcagaagggatctggatggagataaaatgagagattgggtgagaatcaaaaatagtttggaaagtctgatcttataggatgactctgaagacaaaatttgttggaatttgacaagggatggtatcttttctgtgaaatcgttttataaagcccttaaaatgcatcagaagttggaagcaaactgaataacagttgggagctagactcataagacagatggcaagtgatatcttttgctcaagacatggatggagacctgggatcgaaccctactcatcgcaatgttaaggcttagggggtgtttagatccaggggcgtaaagttttggcgtgtcacatcgggtattatatagggtgtcatatggagtgttcagacactaataaaaaactaatt

SEQ ID NO: 70691 - DNA, 166 bp, Oryza sativa
  Clone ID: PAT_MRT4530_71238C.1
tggtggcggtctcccggcaaccgtggggagagcggatccgtcgtcggccaccacggggacgacggtggcaggccttgggcagggcgttgacgacgacggcggtggcggtagcgttttcccggcaatggcagtgccacgagaggagcattggatccacagccgctag

SEQ ID NO: 70692 - DNA, 447 bp, Oryza sativa
  unsure (1)..(447): unsure at all n locations
  Clone ID: PAT_MRT4530_71239C.1
ctggnccttagccacaataattttggtggcaaaatnccatcccagtctggcaaaccttcgtcaactcagtcgcttggaccttagttataacagtctcaaaggtttctatgcttaacatgccattagtgcgtgaccagtacgttcatatnccttttatgcccacttatcagttatcgctgtactatctctctttaggcccaagggtacgtgtcaacgtgtgtcttggtgtctcaagggcactctagtcttttacattctctctctttttttaatgtcttttcccattctcttgttctcaatttattgccctataggcttaaatcaactgattgatacccaacgttttgttgtagaataggtgggtaaatacatgttatacattatgnnnntnatagatatatatatatatatatatatatatgtttgaataaaaaaaaaaaaaaaaaa

SEQ ID NO: 70693 - DNA, 810 bp, Oryza sativa
  Clone ID: PAT_MRT4530_7123C.1
ggtccggaattccccggtcgacccacgcgtccgcaccagtcagctccctgcgctgcccctctcctgatgtgccttcttatctttgttggaaccaatggcgagacatacttcaacacagcttcacttgtgacatgcattcagaacttcccaaagagcaggggcccaacagtgggtatccttaaaggatttgctggcctaagcagtgctattctgactcaactgtttgcagtattgcacacacctgaccatgccacacttgtcttcatggttgcggttggaccgtcattggttgccattggcctgatgtttgtaattaggcctgttggaggtcaccgtcaggtgcgaccatccgacaataacagcttcatgttcatctacaccatttgtttgctccttgcttcatatctggtcggtgtcatgctcgttcaagattttgtgcagctgagtgacaatatgctagtttttatcacggcggttcttttcatcctgcttattttaccaattgcaattcctgtgaccttgacattttcgtcaaaaactgaacatccgatggaggaggctctcctggctgaaccatcaaaaggacaggcaagtacttcacaagaaaaagagccagatgtatttttaagtgaggtggaagacgagaagcctaaagaaattgattcattgcccccatctgaaagaaggaagaggattgcagaattgcaggccaggctagtgcaagctgcagcacgagggtggtgttagaatcaggaggcgaccgcaccgaggagagaacttcaccctgatgcaggcattggtcaaggctga

SEQ ID NO: 70694 - DNA, 2468 bp, Oryza sativa
  Clone ID: PAT_MRT4530_71240C.1
gtccatggtgcatgtgtcttttcaacctcatggcgtcataatattggtacagatcaagaaattttttttacagatataggaaaaatgaatacatatgtaaaatgcataaggactgtaaacatgcatcgagaaaacatctgtaggatttacagaagaacattttattgaactgtttaaggacttgtacaaacaaagaatgctaccgcatgcagatacatgtaaaatacaacccaatgtgagcatgaataaagtttaaccggctctacagtgtgcagagagaggcaacttccttagtacagggtgttgtatgtgcagaatgttgcaacgagggaggctatgcagatgacaagaggtggcagcagagtgatgttgagcaggaggtccgggcctagataacccgccgcggtaatcgtcgcgtctgcaactacacgggccagcgtcccggcctctgtcgacaggaggccgccgttgtaggttcctcgcgcgagcctcgacgacattactcgtgaaagcaacgacaggttcactccttcgaggacctcagcaaacacaaatgtgatgagagcggacaagacgtcctacgcgacggagtagtgaggggtgtaacggaagctcatgattataccaatgaggaccatgatttcagatgccaccaaaatttgcctgtcctcgaataaatttgtaatgtagcttccaacaatggcgttgacagggagaacagtacacccaagaatcgctaaaaagatagccacagcgcttgtagaccagttaaaatagtatgtggtgatgacacttgattcagagagcaagatttccatagcgtacttgagcataaagtatatcaatagctggaccttcacagatggtgtcaacaatttgtatgctgaactgattgaagttgctggcccgtgagaatttttagactcctcttcgttatcgtcattatcctcagcattttggtcttgtccctcttctgagcctgtaagcaatggttgcgctagaccttcctccagattagcattgacttgatggccagattcagcaggctgtgccgtgtctgaactcttagcaaagtgtcccggctctttgaatgatatccacagccacagcaagtaaacaagccaagcaatgcacatgacccacccaggcaacgtgctctgatcaaaagtgagtgagtatatcttaaatcttgtctggagtaaaccagcaagagcagggccacatgccatgccaagagcactagcactgacgaatcctgcagaggcctgtagcctgattttgagaggcacacaatcgctgatatatcgacggttcacagctcttgcagagcctaacccgcatagtagccggccaatcaggagaactgtcagagaattcaggtcatatgctaatgcatatagcagattcccagcgaataacatgatgctactgaatacaagaggtctgaagtatgacctatttgaccatgcactgaaataaactgaggagaacacttgagcaactgccattgatccgatgattacgccacaaactgtcgctgcagctccaaggcttacagcgtagtcatcagcagttggcacaatgatatatgtgttcaccatgtaaagaaaggtgttcactaggttgagtatcaaagacatgaaatggtaactttgatcatcgacaagatcctccgacccactttgcacgtcctcttggatgataagtgcatgttgacctaagaattgcagaaaactcgtcgcatgtgtaagtttttgtaccgcatgatttacttggtctatgatagggtcctttaaggtaactgatggatgatcatagatggacaaaacacttccttcatgatcttgcagatatgcaaggttgcgcgataaagctcctacaacagctacaatccccacttgcttaaagacttgttgaagctgagaataaggatggtttgcacgagtggtgacataatagtctgtaaacctatagccaaagcgcttatcgaatttctttagaatcttccttataccagtagcattcatatcaacaaaacggagaagctttataagatctcgcccaacttctctataagcctctcgtagttgaaaaacttgggatatatcatgctgttctagaagagcagcacgctgttctcccaattcctcaatcctattagcaaggtggccttgttgttgtagcagaaaaagtacaatcctttcaatctgttcatcaagaattcttgagaactctttaagtacttgctctcgatcttttccaccaagttgggtctgctgaacgtattgcttcaacattttcttcatcaatttgtagttaatatagtatcctttccattcttctacttgatcagccatcaacttctttccaaaattaaccatcttgtcgttcaatacctgtatctcgccttcgtttggcattagtttctttgaagatttgcgcacggtaacattacccacaattcccat

SEQ ID NO: 70695 - DNA, 389 bp, Oryza sativa
  unsure (1)..(389): unsure at all n locations
  Clone ID: PAT_MRT4530_71241C.1
angcggcgcgcttctcnctccccgcgtctcccccgacgcccgcgccatgttcgctaccctccccgcctcgccctccccccacctccgcctcgccgcncgcccncgcgctctctccgcttccgccccctccatcgcngnggtggnngccancaancatcggttcttggcgccgccccgcccggacccgcggcnccangaagntgcngcngtggcngngccatggangtngtcccnatggtggtgccnttcctgaaggggacncgtggcttcatccgncgccggaactggcctcgttcctgtanaanaacaagntcgtctacctcgggatgtacctcttgccgtccgtgacgganctcatgctcacganttcctctactccantacgacga

SEQ ID NO: 70696 - DNA, 469 bp, Oryza sativa
  Clone ID: PAT_MRT4530_71242C.1
ggaagggccttataaagccatctggcattgctgcagttgcacctacttgggctggaccccttgggatggtatttggccgaggttctgatatggagacaaggtatagactaagtgtatagctttgatattacaaatatttgtcagagaatgctaggaaaggtcctcctatcacctttgctctttgatttatgctcagcattatgcggagtggtttttttggtaagataatttcaaagacaacatcagtactactataaaaaaggaaggtcctcatcagttgcttacagcttattataaactgtaacagcttattaacaaccaaaaattaatttatgggtaaaacttttttatatgtgtccttagcgacttaaaagccaatgctgaaaaagaaactatgttgaaaaaacatcaaaatcaatttcgaaatcaagtttagaaatttaaatttcagcagcagcttataagccat

SEQ ID NO: 70697 - DNA, 225 bp, Oryza sativa
  Clone ID: PAT_MRT4530_71243C.1
atggcgagctccatgacggccaccacattagagaccaccttggcctactctattacggccacggtgctacagcggggctggaaaatgctgaggagggaggagagggaaacgatgataagcatgaaagggactggccgagaagtaattttcacaaacacaactccacacaaggacatagcattattcgcttatcctagctctcctatcattctctgcattacttag

SEQ ID NO: 70698 - DNA, 3420 bp, Oryza sativa
  Clone ID: PAT_MRT4530_71244C.1
cccaaaaagcaacttatatcatatttttcattttttgcgagtctataagtgaactaatcttaatgagtctatgaccgaactaatcttaagagtagccatgttttcttttcttctttttggttctcctctgatcagctcagctgctaggggaggtttgactagctatcggaagtaaactgagacaagaggaatatcgatgtcgtttccatcatcatcctcgcaggccgccacaagatccaaatgcttcctgtattcaggaacatccaccttggcgacttctctggccacgtctaccaccttcttgttcaatctctccttgtgtcttgcgaacatgttgttgtacagcagcgaagtgccacaggaaatgctgtaagcggtaaggcccttgtcgctgaaccattgcaggagctcagcaacagtcagattgcccttgatggaccatctgtcccatacagtccagctcatgtcttgatgcttcatcaccttgggtggaacaggttcagccattgagaatagtggcagtgccaggttcgcaaatgtattgcggtagtcttcaatggggtgctcgccagcaataaccttgtatagctcaagacagaccagtcctgtcgccatcgctgttgaagttgcaatagctgggatgattcttccagcaatgaacttagccttcaatttgtcaacctctggaatgctgtagttccttgcgcgcatatttgcaaatccagagatcagatccatgtgaaagttggtgtcatcatccttctcaaattggataggtttcatttggaatcctggaggtaacctcttggcacattcttccaacttagcaagaaggtcatcaataacactaacatcatcaactgaggcactggaaaggctagtagctttctcatctgtcacaatactgacccctttctttggctcaaattgaggaacggcaacttcacttactgcatcagccagcttacttgtgttctttgcccagtccggtatagcaattccaaatgactcagctctcagtattgaagcagacataataaagtgaatgtgggagggatcagagactgaaaattgcagtgggcgagggaagcgcttgggggcagaccagaaaggagcacccgtactagtggcagcatcttcaggaaaggtaaatgtgagctgcttcacacggtttgagaaatagtcctcaaatttcagtctggcccatcttatgcaatcctcaaacaaactgcaacgctctttgccaagacattcagaaacacgctcgagcaattctctagcttgggcatcacctgccttcctcatggcagcagcatattgagccggattagagagaaatgaatttacttcacctggtgtcttctctagcaaaccctcaaactcagagcgtgcccaagtcaagcaatgatcaatattgtgcggaaaagaatggactgtgcacattggtgcctgcttctctggaggatctcttgaagccccataattttcagtaaggtgaggaatcaccatttgcgtattgcactttgcacccaatgttcctgactccaacaatgccttctggaagtacaggcatctcatgtccatatacatcctggcattaacattatcaagcgcattgatgacaacatctaaaccctcccagaacgtgtcatggaacacattctctgtatctggacaagcacggttctggagagcatcaatacagaggttggggttgatagcactggcagctgcagcggccacagtagactttgcctgcctgatattccagtcacggaacagaaattggcggcttaaattacttttctcaatgacatcatcatctgttatagttagctttcccttagggctgcaagacactcccattaaagcaaggttcttcaaaaattcacatccaagggcaccagaccccacaacaaaagtatttgcctcttccagtttcttctgaagtttggaaccaaatacagagatctgagcatcatagcggctgtttgacggtttgatgtcttcagagtcaagtggatacgttggcagggattcgacagaatcaaagtagaagaactggtagagaggatggaattttcctgaacatgccttcacaacttcttgaccaacaataccaccaaacattgcagccatagggttcaaaacagctcgagaaccacttgcgaaatgtctgaataacttctcatcaattgtatccagcttgtgatcagttaaggcttcgttaatatcagcagcacacttaaggaaactttgagcatcctgctcacaaccaggagcagggtagcgtccatattctttcttaaacttatccagagcttgaaatgctaggtgaagcacgggggaacgttcaaacttagagaagtcactcagaaggaaatctccaggatctctcatagcatctcttagtgacttgaatcgtagtatctttggctccttgatctgtgtaacgattccaccttttatatacatgtcatatttagttgtatcttcctcaatgcaaaatgaaaatggccttgcatttttaaccttccttggttttccatcatttaactcagccataccatggacctcagagaaaaccacaaaatcaccgtcctgaaactcaagccgttcatcatctacacaggacaccaacgcagggttgtcattgctgatggatgcaattataccagtatgtgggtcttcaccatcaacatcaagaacggtaaactctggtccaaagtcacaaaagacagtaccaaagagaccacaaacttcagctttgatgaaggaaataggagggcagtggctgtgacagtagtcatcaaattcgtaggccttgtctaaacctatatcggtgaaaacaacagcctggaatttagacaggtggtctgtggtcagttcctctgttagagcagagacaagaacagcattgttgagctcttgcagcttggatacacaagcagcagccctgtttttgccaatatcattttcagataaaaagaaattggcagacaaatcccacatctcaacgtttttcacatcatgtagggtgacggacttgaccccagcaagagcaaggttcttggttgtgatgaggagacagttgaaagcaatctggaacagaaagaaacagaggacgaacagagtgagtggatagaaagacgaaccaatctctgcaccgaggccattgaggccagagacgaggacatgggaggcgaagaggcggcgcatggtctccctcccgtagacggcgagctgcctgctgtgcaggtcctcgtcaatctccggcaccaccactccattcgtgctcccgttttgggcgaccttgggtctcttggggtcggtggggcggtcgtcgtccgtgccggcggctctcttgttggtgggaagcatggagagcaagcccctgcgcagaaaccgtaagcacctcat

SEQ ID NO: 70699 - DNA, 452 bp, Oryza sativa
  unsure (1)..(452): unsure at all n locations
  Clone ID: PAT_MRT4530_71245C.1
tagccggtgttcgtgctcgaacgcggcggcgttcctcgccgacgaggactntcggtcgtggtcggattcaaagcgcgccatcttcgcgcccgtcccgatgagctcttcggcaagctgctaagcagcatccttcccctgcccaaacactacgatttttatatgtgctgtgagcggacaccggcgagccgagacgaagaaacaacacgagcttcttggggtccttctccatccgttcattggcggacgccgagacgaggcaggagcacgcattaactccagggcttttaaagtttcaattctttttagcaatagtggtgaataaatttgcccattgttgcttgtttttcccctacactttgccgggcgaaagaaagaaacctacaacacaattgtttttgcacattctgattactgagattttgtttcaaaaaaaaaaaaaaaaaaaaaaaaaa

SEQ ID NO: 70700 - DNA, 707 bp, Oryza sativa
  unsure (1)..(707): unsure at all n locations
  Clone ID: PAT_MRT4530_71246C.1
caaggatcaaattggtnttcaccntcaggttagccttaagataataatatggtagagtataaataaagtttagtttatccatgacctaacttnnggggtggctagcttgaggacaaccatgtaaaaattaggtccaaatntacgacatgctaaaggacgacntattctgcaataaaaaatngantaaaataaaaccttaacaagcagaaatgttatagcaantcaagtacaaattttagtaacatattataataattcatacagggctgattgcatggaataaattagtcagccctacgcctgcgtatcttctaattctccatgtctacttgacaacttcatcaagtcaaaaacatggcttcacatagtgataccatctaagtatatttgcctaatttacatacaaaccatttaagttctcttttaacaccacctatatgatacaagcttggctagcttagccagttttgctacgaggaactgcatgacaaaccaaaggtttcttcatctccatagaaagacggaggcactccgtaagtttaaccggctgagccgctgcccacttatactcttgcaacatccggccaaaccatagataggcagtggagagacccatcatccgtccagggcacacccgacgacctgatccaaacggggccaaccttaaatctgatcccaacacattgatatcctcttccataaacctt

SEQ ID NO: 70701 - DNA, 433 bp, Oryza sativa
  unsure (1)..(433): unsure at all n locations
  Clone ID: PAT_MRT4530_71247C.1
cggaggacaaaaanaannaaaaaaaaaaagagaagaaaaaagaaaaaagaaagagaaacacaaagaataaaaagagaaagaaaaaaacaacaaaataaaatacaaaacagacaaaggtgcgagagctacaaaaacaacagggcgcggcccgttcttatagtaatcacaatctttctttccccgtctcttccgccgaaattaccttcttttttactcccaccaaaactgttattagaggactactttttgccatcaagaggtagaaatcaccggacactatcatactttcatcagttatcgcggcctgcaccatcttttagattatttactggcttaaaaaatgatgcccgtctccagaaaatatcaccttgaaggctttctttctgttcagaatcgctcttaccagatgacactataagacttggtagtgtgt

SEQ ID NO: 70702 - DNA, 428 bp, Oryza sativa
  Clone ID: PAT_MRT4530_71248C.1
gttatcgcgacggccgcccttttatcttttgtggagcattgcagactatcaggggtatgtttaaccaggtgtccacatcaccgttgtacagtatttgagttactgaaacaaaaggtagcagatcaatggtttacagaagggggctttcaaattgatgcacagaagtcataaacaagtagattcttagaatgataacaccttgtctaattaatttattcaccctatctttccatttttaattccataacagaacgttttttagagcacttgccgtcttttgtcttgagttgtagatgtcatatgttttcaaaggtactaaatggcggcttataatttcacttggttgcactgttgcggtatacataaaagtctaggccacttcattgattcctgctggcgtatacttagatttgccactctttttaaac

SEQ ID NO: 70703 - DNA, 230 bp, Oryza sativa
  Clone ID: PAT_MRT4530_71249C.1
acgaatacccactactaggaaaagcattatcgcaagcggccgaaaagggtcttcgcaggcggggcggccgtccgcctgtaagccaacgactgtgaagatcgcgatcttcgcaggcggggcggccgtccgtctgcgaagataattttcgcaggtggacattggctagtccggtccgcctgcgaaaataggaatcgtccgcttgcaaaaaagaaaacttccgcctgcgaaga

SEQ ID NO: 70704 - DNA, 426 bp, Oryza sativa
  Clone ID: PAT_MRT4530_7124C.1
cgaccagccccctccccctccccttccctctccccctccctctcctttcctttgcctcaagccggtggcggcgacctgtcccgtgccatcgtcttccccgtcgctagcggcggggcgccaccaccggccgtctcctcctaccactctttccgctttgcccctgccggctacaccggcccgccacccgctcccgatcccgcggcttcggcgacgctgcgccgcctcgccgcccaccgccaggctgccacctcccatggccatccctctaaagccgaccctaattcgttggccctctgccggagtttgggttcgccaatgccagagaagaagaggtggtcgccggagttgaagaagaagagaacgaatcgtgaagcacatccaatgatccgaaatttacaagatttgaggttgtattttctgctgaca

SEQ ID NO: 70705 - DNA, 522 bp, Oryza sativa
  unsure (1)..(522): unsure at all n locations
  Clone ID: PAT_MRT4530_71250C.1
gcgaagcattgtaatccgatgtgggtgacgcaccttcagcgctaccaaaagagtaccagtctcaacagagtaatagccacgatccacataatcccccataaataaataattagtatctgggcacttcccaccgatccgaaaaagttctacaagatcatggaattgtccgtgaatatcaccacaaatcgttactgggcttttgacaggctgaacattgctttcctccatcaatatctccttggccttctcgcacagtgctttaacctcctgctcggcgagcgggcgacactgcatcagctgctcgatctgcgtgtccaggccgccgcatcccccgccgccgtccacgctcatgggctccatccccccgctccgccctccggaggtaggcgagcgcaccgccgcctcgagctcgtcgccggcggcgagggggggaaagcgcccgcgcgctcgggccgagcccgattgggagagtgagactgagagagagaagagtagatngagccgcgggcgcgaggatcaaaa

SEQ ID NO: 70706 - DNA, 1259 bp, Oryza sativa
  Clone ID: PAT_MRT4530_71251C.1
gatcaatgaggggcataagtttcacattttttttgggcatcggcattctcatgctatcgctggccagtttagttaccaaagggatccaacaaaattttactgaccagcactcactattgcggtcttagagaaacaaaagaaacaaaacaatacaaattacaacagataatttaaaggaaataatcaggtgttctccgtgtcacgtctggctcacctctcctaggagctggttcgaactgaataaatgtatgattcctgcagtcatcaacctccaaaatggatgccatgttcccacagcgataacaataatttggagcactgaatatagtaacaactttttgttcatgcgcccaattatatccttccataactagttgatgagcccgagctacaagtttgagattgttggtgtgattgaattgctcggatatatcctgcccaaaagtgtagccagcaccacgaggagatatgccccaaccacagcggtcatctggatcagaccatagaagatcacacattggtccctcatgcggaacctcttggacacgatctaagctacgcacactatcaaggttctcaattgatggagataaaccaccatgcaggcagaaaatttcagattccaccagtgctgtcagtggaaaatagtcaaataaatccgtgaatatcttccatacatttgcattgccatactttcgtaaacattcgtcgtagaatccataaacctgtgtgatcttcagcgctaccaaaagagtaacagtctcaacagagtaatagccacgatccacataatcccccataaataaataattagtatctgggcacttcccaccgatccgaaaaagttctacaagatcatggaattgtccgtgaatatcaccacaaatcgttactgggcttttgacaggcaaattaccatggaacagaacatgcaaatattttgagaacgtcttagcagaattgtatgtgcacatactatgagctatctgaacattgctttcctccatcaatatctccttggccttctcgcacagtgctttaacctcctgctcggcgagcgggcgacactgcatcagctgctcgatctgcgtgtccaggccgccgcatcccccgccgccgtccacgctcatgggctccatatccccccgctccgccctcaggaggtaggcgagcgcgccaccgcctcgagctcgtcgccgccggcgagggggggaaagcgcccgcgcgctcggaccgaggcggattggtagagaagcgac

SEQ ID NO: 70707 - DNA, 504 bp, Oryza sativa
  Clone ID: PAT_MRT4530_71252C.1
atggagttgctgccgcctcctagtagtcccaaggtgagggagaccggcggcgggcggagcggcgatgggcggagctccggcggagcctgctcgaggttgagtagcagcaaccgccgccgccgccgccctctgcgtccgggcccagtggggaggggacgggaagagcaaaggacgccgccaccatcgcgtcgtgtctgtgcctgccggggaggggacggggagagcaaggatgccgccgccatcgtgccgcgtccggacctggctgggaggggacaagacatgaacaagaaccctcgccccaagaaagacgttccttcttcactttgcctctacctcgcccacctccgccacgcctccgccttttcctcctccctgaccgctgttgacgggttcgatgacggtgtcgcgcacatcctccgtcgccagcacaccgcctggctgctctccacgtcggcgtcgacgcctcagctctaccggccgcctctctacccctctccgtcctag

SEQ ID NO: 70708 - DNA, 2308 bp, Oryza sativa
  Clone ID: PAT_MRT4530_71253C.1
ttttttttttttttttttttctgaattcttgctagcagtgaacttgctattatcttgcaccataccacaaaaacattattaattttcaggggctatttttgtttttttttttttttttaacataactgcaaggatagaagaaccatggtggtctattatgtataattgtatctctacaagaaattattatggtccaccttgtgatataaaacaaaagatacaaggcagtacattagagataaacggacgaacaagctggagtatgtaacattgtaactggctgtaaaagctttttacctaatcatgtgttttgttgccaaagaaatgattatttactctggccaatcctgaaaaattttatggtcgaaactttttggagtcagcctatctctttgccattgcggaaatttttatgaagtgcaatgggctgtacacctctcaaaacactaattacatttcacaatcactcacataaagtatgccagaatctttgtgaagagcaatgtgtagaagatagataacacagcaccaactggaattgtgactaaccaggaggccacaatttcacgcactgtctctgctctgaccctattgagccctcttgcaaatcccactcccatcactgcaccaacaagtgtatgtgtagcagatattggcaatccaagttttgatgcaaacaatactacagaagctgctgcaaactctgctgcaaaacctctagttggtgttagttcggtgattttcttgccaattgttgctatgaccctgtaaccccacattgtaagccctgcaacaattccaaaacctccccaagcaaggacttcagtaggtatgactatctcagcactgcttgctacaccttgaagaatggacaaagctgccgccagggggcctatggcattggagacatcattgcctccatgagcaaatgacatgaagcatgctgacaagacctgcatgtatccaaatacaccatatacaatctgcaattgagctcctgttggtccagctatgtccgaaagaaatccaacttgctgagcatttgccttatcagcagatgctatcttttctgcttctgaggacagtaggtcaccaagctgtttttggatcactctgttaacgattacggctcctattgcgccacatgctaatgcttgcaggatagcgattgaaaaagtcttgctgagaggaaaagcggcaaatgatattgcagtaacaccagtaaaaactgcaattggtgcagcagcagctgcagcctgacctggatttggtgcactatatacgaaccttcgtatacccttgtaaacaataaatgagactgcagcacccatcaatggtgaaatgacccatgatgaagatactcttgccaaggagctccagaacactgcatttacgcctccaaatactatcccaaaaccaaccatggccccgacaatacaatgtgtagttgaaacaggccagccgtaggaggaagcaacctgcaaccatgttccagcagcagcgagggatgacaacaatccagcgaagagcagagagtcctttccttggaagacagatgcgactaggatgcccttctgcatggtgctggtgacatgggtgcccataaggaatgcaccagagaactctagcaccgccgcagtaagcactgcttgccggagtgtcaaagcaccagaccctactgacgtccccatggcattggccacatcatttgccccaatgttccatgccatgtagaaccctgaaagcagtgtcagatatgccagtgccttcattttgttcgtcccatggaagaccactgactgcatcgccagtggcacagtgagcgctgcaaatgcaatcaccactgagattgacattgccatccggggcgatatatggaatgccttggccatctccgacagttcagattccccgttctgctcctcctcagactctgtggcatctgcttgcccgctggagccattatcagcattggcaaaggaggatattgtggcatggggaaggctcaggtgtgagttcagtgtcttggcaggtgacacaatggctgaagggtagtacctcaggccatgaatccgaggtggcagctgagcaacagggtgacggagcaggagagcggcagccgcagctcgccctcctgctccagcatgtgctcgggcaacggagaagaaaggggaagattgagacatggagtggcagaagcaaagtacaggtttgagcagagaagcaccgagaagaaaaagactgagattaagggggaggagaggaggaaggtgaatgagaagcggtggccataggtgttgcctcgtgc

SEQ ID NO: 70709 - DNA, 1263 bp, Oryza sativa
  Clone ID: PAT_MRT4530_71254C.1
atggaaaaccagccacatgcacacctcctcccgcaacgcaacgacacgcaggtcgagcgagccaccgccttcggcaaggaggccatcgggatcaccggctccgccatcgtcgccggcgtctccggctacaaggacatcggcaagggcgccgctaccaccctcctgttcaaggccggcgggttctcgctgctcgtcacgttcgtctccgccgtcgtgctgatgcacttccagatgcaccagccgcccgccgccccgcgcagccgctgcgccgacctctcgtcggcggtgctcgtctcgctcaccggcgtcctcctcgtcgcgaccaacgggatgttcgtcgcgctcatggacagggacaacgacaccatgctcgtgatccttgtcctccccgtcgtgctcgtgctcggcatgctcgccggcgccgacctgccgccgacggagggggcggtcacggcggccgcggtggcgcaggacgaggcctacgaggaggcgatgaagagcagcgccgagctcgcgacgttcggcgccacggcggcgttcgccatcgaaggggctctcatcctgggctacctcaagtacccctcgtcgctcgatggctgcggccgctcgccgccggcgcaggtggacctcgccgtggcgtccttcgcctcgacggtgtccgtgctcgccatggcggccaccgcgctgcccgtgcgcaccctgttcccgtcagccagggcgcgcgccgtcgcggtcgccggccacctcaaccgcgcgatgctcgccgcgctcgtctcgatggccacgatcctcgccgtcgagttcttgcagtggtggttcatgctctccctcctcccggaggccatcgccgtcgcgctcaacgtcgccatcatggcgtggacgaccgaaggcggcgcaaacgtcgtcgacggcagcgttgaggcggcggcggcagcggcatcggcgggggcgagagagaggagggcgaaggggttcagggccgtggcgaccacgagcttcacgctcatggcgggcacgtacgcggtgtacctagggcagaagaagtacgacgtgtacctgagggcggccatgctggtgatgctgaccgccgtggtgtcgagcctgaggcagatgctgcggccgttcgggcggtcgagggcgaggggttggtgggcggtggccgccggcgcggtgtcgctcgtcttccccggcctcgcgttggtgatcgccatccctttgtttgtcaaaatctttgtacatttctacttcgggcacgttaattaa

SEQ ID NO: 70710 - DNA, 464 bp, Oryza sativa
  Clone ID: PAT_MRT4530_71255C.1
ggggaagggccaacaacttaaaggacccgaaaattttggggccccaccaaaaataaaaaatgtaaacctttttaaaaaaattttgaacccccaatttttcccaggggttccccaaaaagggaaattttataaaacttctagggggcaaaaaggcgaaaaaaaaaaaagggttttcctactttagggtccccaatttttaggaaataaaaaaggggggggttcggcttaaccctgcttaaaaaagaagctttttgggacccttcaaaggaggggaaaaaaaaaatcatccccccctgaaaaaaacctatggggaaactttttttcctccccggaaaattaaacccacaaattttaaaaggggcaaaagtactttatcccccccacttggttaaaagatttttaaaccctgttaaagaaacatccgcacccggggggaattgcaagctggaaaaaccccaatttta

SEQ ID NO: 70711 - DNA, 329 bp, Oryza sativa
  Clone ID: PAT_MRT4530_71256C.1
ttcgaagctgacactaatcactgtatctcttcttctcttctaaaacaggtaaaatcgtctattctatcgtcgtcttctgtaaaaaaggtaaggacgaactgacgaaaggatttcgtcggatttgtcctagttatcttatagtgtgtacgcggtaatgatacggagtgcaagatcaagatttgcgttccttgaatgtatataatcatattcttgaatcctttcctggacctcgccatctaggcgagtaggaccgaagcttaggatcaagtcaacggtgcccttggaatcgcggcgcacacacaacacccttccaggaggttttttttttt

SEQ ID NO: 70712 - DNA, 430 bp, Oryza sativa
  unsure (1)..(430): unsure at all n locations
  Clone ID: PAT_MRT4530_71257C.1
gtccgtcgcctccccgcaccatctccgcccctcgccgctgggccggcatgccgtgctggcggcgtccccgcgcgcgccgggcggcgnaccggccatggtgcccgcgcgtccgccgggccgtcgccgcggcctcctccggcggcggcggcggcgaggcggtgacggcggtgagcgcggcggcggtgggggcgcccgcgagcgccgcgagggacacggtgcggcgccacacgatctctgtgttcgtcggcgacgagagcgggatgataaaccggatcgccggggtgttcgcaggagagggtacaacatcgagtngcttgccgttggcttaacaaggacaaaggcatgttaacattgttgttttcggancgacaagggtcttaaccaagtaattgagaanttaacaagttttaaacgtttttaatttggaaga

SEQ ID NO: 70713 - DNA, 616 bp, Oryza sativa
  Clone ID: PAT_MRT4530_71258C.1
tgtcccggtgaggacgttcaagaagtacgacgacctggcgtacccgcagagcaagccgatgaggctgcacgcgacgctgtgggacggcagctactgggcgacgaggcacggcgacgtcaagatcgactggagcggcgcgccgttcgtggtgtcgtaccgcgggtacagcgccaacgcgtgcgtcaacaacaaccccgccggcgggtggtcgtcgtcgtcgtgccccgagggcacgtcggcgtggatccaccgcgagctcgacggcgccgagctcggcaccgtcgcgtgggccgagcgcaactacatgtcctacaactactgcgccgacggctggcgcttcccccagggcttccccgccgagtgctaccgcaagtgatgatgaacaaatcctccattgatgagttcttgaatgatttgtaattgcttcttgttcttgttcgtcttcgtcttcgtcttcttcttcttcttgatccatgtacattttgccatccattcgttctccattcgttacagttacagagacaggttgatggtgaattactattggcactttttttttcttcttgtttattactcgatccaattattactatagatcatcttgcgcacaaaacaa

SEQ ID NO: 70714 - DNA, 1962 bp, Oryza sativa
  Clone ID: PAT_MRT4530_71259C.1
atgtcgtcaccatctgacattgttaaagacattgttatacctgccaaggttgaagatctgtctaaagagcacaaggcagagatggagcagaagatgcaacaactgaaggaagcatatcttaattctttttcagtgactcagcaaggaaaagtgattcaaaaatacaagttccaaatgctagaaggagaaggatcatctggacagccgattgagaatccatcaatcgaaccacaatattgcaaagtggaccctaatgttctacaatatcaacaaattccagggttcaactttaatcagtttcaacctccatcacctctacagtatcggcaggatacacctccttttgtccaagctccagcacaaccaatgtacaatcaatatgaacaacaaaatcaagggggagttcaacaacaacctttagccgatataattgcagatgtggtgagggaacagtttggaatcaaacctaaagacaatgggatcatgtatcggcatccgtatccagaatattttgatagagttccattgccaagccgatacaagaccccagatttctcaaagttctcaggacaagataatgttactacatatgagcatatcagccgatttcttgcacaaagtggtgaagcatcggctattgaagctttgagagttagcggtgctcaagagatgaagttatcatatttgacagcaattcggcaaaagtctgatgaatcggttccatattatattcagagatttagagatgtgatgaacagatacttcagtttaaatttgaccgattcacagaaggtatcggctcatgagcaatgtttccaagaggccaagaagttcaagaaagttaactatgtctacaattatgtttctgattctgaagaggaagactcggagatcagtttggctgagtggcccaagattaagaagaaaactatgtgtcgatgggtcaaggatataaacaaggaagagaaatatgactttgatatcaataaagccgacaagatctttgatttactgttgcaagaaaagcaaattcagttgccagtaggtcacgttctgccatcggctgaagagctgaagaagaggaagttttgcaagtggcacaatatagtatctcatcataccaatgagtgcaaagtgttcagcagaagattgatcaacaagtaccagaagaggcatgacatcaagttcagaggaattttcagaattgtagtcatcaccaagatgatatatattatcaagatgaccaagatgaagaatattatcaaggttttgttggaacgatggaatgaggttgccatcaatcaacaattgccctgggtgtggtggatcgaattcttacaatcagtcttcccaggaatttttacaaggagtcagaaaaggagagttcagagattgagaaatagagagcagatacaggaagttaatgagaaaatcgatcatcggctgaaacgtacaaggaaagagtggcgagttgaatcaaagattgtgatagccaatgaggttgaaaacgataaggaaaggaatagaatttcaacatctgccgagggaaaagcaattgcttcaacttcgatcaatatgccactttatatcaaaggttatgtcaatggcaagccgatgtctaagatgctagtcgatggaggtgttgatgtcaatttgatgccttatactactttcagaaagtttggccggtttgaaagagatttgatcaagacaaatattgtattgaagatctttgggggcaattcttctgaaaccatgggagttttaaacgttgagttgatagtaggtagcaagacaattcctaccacattctttgtaattgatggaaagggttctaatagtttgttgttgggaagagattggattcatgctaattgttgcatcccttcaccaatgcatcaatgtttgattcaatggcaaggagaccaggttgaaatcgtgcaagccgataagtcagtttaa

SEQ ID NO: 70715 - DNA, 456 bp, Oryza sativa
  Clone ID: PAT_MRT4530_7125C.1
cccacgcgtccgcgcagttccacgcatcccaccatcaccacaccacgacgacgacgacgatgccgcagcgcgcgtgagcgatcacaaaaacgcctccgtcttccggcctttttcccgtgagtgagagagctcgcgcgcgcgcgcgtgcgttcgcctactacattctttcccctccaaccttttcgaggaggaggaggaggcggtggcgattgatggaatctgatcgaatgccgcttcaggctgggtcaatcgagctggctgcaacgatcggaggtttcctatcccctcgtgaaggtgtcaaatcagtatccttgtgccggatggtttggggataattttcgtagtgagttcataatagcgtctcatttgggattcctctggttgattcagttccctttgcaagtttgcgggtttgttcacggatttggttggcttgagatcgatcttcattcattg

SEQ ID NO: 70716 - DNA, 290 bp, Oryza sativa
  Clone ID: PAT_MRT4530_71260C.1
cctctcattgagagggcctgaacctgtctaaatcctttgtctccacatccatccacttttaggtctcgtgcgctaccccgttttattattgccgaattcatgtttcgacagttggcgcgccaggtagggggtgcgtcgaattacctgtcgaaaagtgcgatggaatcaacttcagaagaaaccccgagatcaatctcatcaatttcgatggctcaaatctaaatcttcaatcgggtctaccgttccaatttaatctctattagattaatttttaatcattgtttgatttc

SEQ ID NO: 70717 - DNA, 1510 bp, Oryza sativa
  Clone ID: PAT_MRT4530_71261C.1
gcacgaggcaaagacaaagcaagcaagtacagtagccatggcgaagcatctcgcgctgtccgtggccgccgcggtggccgtgtcgtggctggcggcgtcgtcggcggcggcggcggggttctacgagaagttcgacgtggtgggcgccggcgaccacgtgagggtggtgagcgacgacgggaagacgcagcaggtggcgctgacgctggaccggagctccgggtccgggttcacctccaaggacacctacctgttcggcgagttcagcgtccagatgaagctcgtcggcggcaactccgccggcaccgtcacctccttctacctctcctccggcgagggcgacggccacgacgagatcgacatcgagttcatgggcaacctcagcggcaacccctacgtcatgaacaccaacgtctgggctaatggcgacggcaagaaggagcaccagttctacctctggttcgaccccaccgccgacttccacacctacaagatcatctggaatccccaaaacatcatattccaggtggacgacgtgccggtgaggacgttcaagaagtacgacgacctggcgtacccgcagagcaagccgatgaggctgcacgcgacgctgtgggacggcagctactgggcgacgaggcacggcgacgtcaagatcgactggagcggcgcgccgttcgtggtgtcgtaccgcgggtacagcaccaacgcgtgcgtcaacaacaatcccgccggcgggtggtcgtcgtcgtggtgccccgagggcacgtcggcgtggatccaccgcgagctcgacggcgccgagctcggcaccgtcgcgtgggccgagcgcaactacatgtcctacaactactgcgccgacggctggcgcttcccccagggcttccccgccgagtgctaccgcaaactgcagtgcagggaagcagacaagcgggtgacaactgtgtgcttcgctgttcttgggtatcagatttcagtcgtacacgctgaatttattgagcacaacagctcagcctcagctggcggcaataaggtttttgggaagcgctttgcgcgaccgctctctattcgaccacaacggctcgtcttcctctttgcacgcgtgctacgcgccgtcatcaatgtccgcaaccacgagtacttcctactgagcaaccggtcttctggtacccttgtacgatctaatcctagcttctcatgggataccaatcctcgctgcgtccatctttttctacccaacggcgccgtcgttctgaagctaggcaaaggtagagccaccactccgcaacgcggggcctactaccgctgccgcacgccgccgagcgcagcatcgtcgccatgccccgtggagccaccgccgcacgccgcacgccgcacgccccctagcttagcgcgcgcagcaccaccgctgctccgggtcagggattgcttcattcaagtgaggtctcgcgtattgatggttcagtgcatcctggatcttgatgttgtgattttggacaccgcaaagtag

SEQ ID NO: 70718 - DNA, 842 bp, Oryza sativa
  Clone ID: PAT_MRT4530_71262C.1
tttttttttttttttttttttttttttttttttttttttttttttttttttttttttttgcaacagaggggaaacaagaagaaatgcaggagatgtaatgttaatgatacaacagaatgcaggatatgctatgcttttatactttaaaacaaagattggttcctacaaaatggggggcagaaataaacaattcatatccaatgcccaaccctcttcttcttccttttttcttccctatacccctctcactcctgatggaggcaacaacaacaacaaggtgctggagggggaacagctagaccaatttttcatcaacaataagagttccagaaacctattatacatgaagaggaggcaagcagcaaaacaagattagttccactagtacaggaggtcaaataaaagaatcaccacacccaagggctgggggtcctatcgacgacgacgatttcaccgggcaccgtcagcagggtgcaactagttagcacagaacacagtagttaccacctattgtggtacacccctttcatccatttcatttctttcctttgaagaagaggaggcagaggcaggcttccaagccataggttaacaactggcggaagaatgcgcgacgtcttgcatctccaggacagtttcatgggacgaatccatctgagacaacttcttagctagatcctctaattcaaccatatcccaagcttctacttgggagtgggaatgagcgagggcagcgacactgcgcgctccctatcttctttccacagtatatagctgtacagatgccactactcgtttgcagcaacttctcgctctctgcctgcagcccggggatccactag

SEQ ID NO: 70719 - DNA, 373 bp, Oryza sativa
  unsure (1)..(373): unsure at all n locations
  Clone ID: PAT_MRT4530_71263C.1
actcngnagaaggcncccgannggggacngcggcncaanggcnccngggancgangaggactacnngggagcccgcccgccagccnccncttgttcnagccacggaaactcaagtcgttggtctttctacccgggccggggatcnccgaattcgtccccnccttcctcttcctctacatcnccatcctcaccgtcatgggggtctccaantcctcctccaagttgccccaccntccgcatccaagggcttcncctnntccttccgnangccttntcttccgcgccctctactgcaccgcccggcntctcccnganggacactctnccccnctgttactttngnggctnttcttggcccaggaancggtccttt

SEQ ID NO: 70720 - DNA, 685 bp, Oryza sativa
  Clone ID: PAT_MRT4530_71264C.1
cggttattctcaggctcgccgtccacgaggagggggagggatttggaggagatccgggatggcggcgagggagacgtcgcgccacgcgtcgctctgcctgtggctcgcgctcgtcgccgccaccctctctctcgcccaggcggtagaatcagaagccgaattgaccaaggtcaccaccaaggtcttcttcgacatcacaatcaatggcaagccggcaggtcggattgtcatggggctttttggaaacactgttcctaaaacagcagagaacttccgagcaatttgcacaggtgagaaaggacttggcaagagtggcaaacctctctcctacaaaggaacgccattccacaggatcatcccaggcttcatgatccaaggaggcgacaccgtgagcggcaatggaaccggctgtgattcgatctatggtggaatgttccctgatgagaacttcaagatcaaccactctgcaccagggttgctgtccatggccaactatgcgaaagatacaaacggatcccagttcttcatcaccaccgtaaagctaacccggttggatgggaagcatgttgtgtttggcaaggtgctttctggaatggacgtcgtctacaagattgaagctgaaggcagtcagagtggtactccacggtccaaagtcctcatatcagacagcggcgaactgaagtga

SEQ ID NO: 70721 - DNA, 767 bp, Oryza sativa
  Clone ID: PAT_MRT4530_71265C.1
ccgtaaaagttatttttctaccgaagtaaatgtaaatttcaatgatatggtataatttttacatattgccaataaattccaggagaaaaatcattgcatgcttccgtgttcaacagtgcatagcaggtagtacaacttgatcgctgatcacatgcagttagtgcatcacgtgtgcactacaatcattttttccactggggcagacgttggacgacaaccttgccggaattttctttgtttccaacaatagtctgacaagcaagcctccatgactccggtttcttcttcagataccggttctcagtgtttgttctttcattcaggagctccttgccatcaactatctcgacgatgcaagtgccgcagctgccgccgccgccgcagttcatcaccttcccatatgccgcgtagagctcgatcttgttctcgaccatgacgtcccggaggagcttctcgccgctgcccgccgccgcccggtccaccgggaacgacccatcggcatccgccttcggtccgacgaactcgaggtcgatttggggcttgggcggcggcgctgcctcctccgcggaggcggctccggcggacgcgttcggcgaggcggcgttggagcacctgatgcgggccgcccggaaggggccactgccagagctagccttgcggtggcctcgggtggagacgacgcgggaggaagggatggccagcgagaagagcgccgtggaggtggagctcgtggccgccatggctttcccggacgcgtgggctcgtgc

SEQ ID NO: 70722 - DNA, 209 bp, Oryza sativa
  Clone ID: PAT_MRT4530_71266C.1
ttgatcatcttgctccccaaaccagccaaccccctcgacggacggaacacatgggcgggacgcagccgtggtgctcgaggcgaccatgatctgcatagacaactccgagcggatgcggaacggggactactcgccgctgtaattccaggctcaggccgacgccgtcaacctcatctgtggagccgagacctattccaacccggagaaca

SEQ ID NO: 70723 - DNA, 771 bp, Oryza sativa
  unsure (1)..(771): unsure at all n locations
  Clone ID: PAT_MRT4530_71267C.1
atgccgatgacaccctccgtcacagtgcacaccacacaagccaaagccgccgccagggaggacaccgtcacgtcgccgctgcaaagaaatccactggcgcggcctggcaagcgtgttgaagctctggtcagccaccctggcttgggctccgccgncgccgccgccaccagcagtcgtcgccatcaccacctctcgaacgcaccgccgccaccgctcatcctcgccgccaggcgccacccccccagatccggccggacggcacggatctggacggaacgtcgctgccaacaccaccagacgccgccaccactactcagccccgccaccagctgccgccccacaagatcccgtcggcatggatctggacggccaccgccaccaccgacgccgacgccgacgttgccgctgcgtggccctccgcgtgggccacacgccgtcgccactgcctccgcgcggccctcgcgccgccacgcgtcccagcccagatccggccccccggatccaggctcgctggcgctggatcccggcgtcgacgctggcgccgtgctcccgtcgtccggtctcgcggtgccccaaccgctgcaccagggcgagggagaagaggagcctcgtagccgccatctttgcagccggccggctttgtcagcggctactctggcggcggtgaggcggggagagaaggggccgggagagaaggggcgacggcgttttcgccgcccgcgtcttccctggggcggagcgactgagcgcgttgtgggggccacctgctaa

SEQ ID NO: 70724 - DNA, 1261 bp, Oryza sativa
  Clone ID: PAT_MRT4530_71268C.1
atcgtcacgcgtccgcccacgcgtccgaccacacggtacgcttccacctccacctccacctcgctggcgatctcctcccgcttcgatccatccatccatcgccatggcggcggagcgcgtggtggtcgacgagtgccgcggtgtgctgttcgtgtacagcgacggcgccgtggagcgcagggccgcgcccgggttcgcgacgccggtgcgggacgacgggagcgtggagtggaaggacgcggtgttcgacgcggcgcgcgggctcggcgtccgcctgtaccggccgcgggagcgcggcggcgggcggctgccggtgttcttctactaccacggcggcgggttctgcatcgggtcgcgcacctggcccaactgccagaactactgcctccggttggcggccgagctgggcgccgtcgtcgtcgcgcccgactaccgcctcgctcccgagcaccgcctccccgcggcgttcgaggacgccgagaacgcgctcctctggctcgcctcgcaggcgcgccccggcggcgacacgtgggtcgccgaggcggccgacttcgggcgggtgttcgtctccggcgactcggccggcggcaccatcgcgcaccacctcgccgtgcggttcggctccgcctccgggcgcgccgagctggcgcccgcgcgcgtcgccggctacgtccagctcatgccgttcttcggcggcgtggagcggacgccgtcggaggcggcgtgccccgacgacgcgttcctcaaccgcgacctcaacgaccgctactggcggctctccctgccggcgggcggcgccacggcggaccacccgttctccaacccgttcgggccggcgagccccgacctcgccgcggcggagttcgcgccgacgctggtggtggtcggcgggcgcgacctcctccgcgaccgcgcgctggactacgcggcgaggctggcggcgatggggaagcccgtggaggcgctggagttcgaggggcagcagcatggcttcttcaccatcgacccctggtccgccgcctccggcgacctcatgcacgccgtcaagctcttcgttgacaccgacggcggcggcggcgcccgcctcgacggctgatcagccgccgcgtgctcctctctcgtgtgtgccttgtcggcaataataaatcgattcggatttcaaaatgctagaaaattcatttatcaaatgttcaaagttcagaagggggtatatgatccattgccagccatttgcgtaaaaaaaaaaaaaaaaaaaaaaaaa

SEQ ID NO: 70725 - DNA, 444 bp, Oryza sativa
  Clone ID: PAT_MRT4530_71269C.1
atgagcgagcatctgagaatcttcaacattgaggagggcgatagtattgcagaaaaagaaggaaagctcaaacaaggacaacgagttgaagacctaacggaagaagatagacatgtgttgaagcaactaaacaagcggaagctgcactggctggacggtgttcacgccttcttcacggcggtggtgttcctatatgtgacgttcagcgatgtggggatccagaaatgcctcttcccgataaccggccacgacaccatggagctgctcaagaatatgcccctgggtatgtccttcctctccagcttcgtcttcatgatcttcccgaccacatcccatgacattgggttttccgacaggacactggtagagaaaacgtttgtagtcccggttcgtaacacccctttagttccggttgtccaaccgggactacgaatccgggactaa

SEQ ID NO: 70726 - DNA, 362 bp, Oryza sativa
  Clone ID: PAT_MRT4530_7126C.1
cttcaaaaaatgggccatatgaaaatgggacgaaaaaactagggcatcgccaaaggggggggggaaaaggaaagaaccccccccaggaaattccgggaaaaaagggggggaacaaaccccaaaaaggaagaaacattacgatcctgacggcaaaagaaaggggccctgtcgaacttggcacaaaaagggagttaagagggaaaaaaaaaacttaaaaaaggccactggtcccctgggaaagggggaatgtaccctaggccagaaagggcacaggggggggtcacacacaagattgggaataggacccgaggaacttgaagggggactttttcccaagggaccggggggggggaacaacaaaa

SEQ ID NO: 70727 - DNA, 222 bp, Oryza sativa
  Clone ID: PAT_MRT4530_71270C.1
cctttcaatggccatcaatcacaattttcactttctacagttggcgctcaatacaaagccctctttacacaccagcagctagaattaaccatcagcagtgcacaatttattccgaagtgacacactttataacacggatcacagcatttagctcagctgcatgcagcatcatctcatacacgaggcatcccagcatttcagcctcagctgcatgcagacata

SEQ ID NO: 70728 - DNA, 5772 bp, Oryza sativa
  Clone ID: PAT_MRT4530_71271C.1
atggccgagcaagcaaaggcgcacgacctctccccgagtatgagcggtgacgacggggagccaaacccacgccgtcgagctcgtactccaccgccccctccacgccaaagtcctaggcgggagaaggcgctcgagagggccgaaggatccgcgacttcgatatccacaggaggtggagaagggcggcgagatggggagcgtcgcctcctcgtctacggcgacggcagcacgccccagggcgcgctccaagctgcgggcgcgctcctacgtcacccgcccgtcgcccatgacccggagtctccagcccaacgttggctggacgatgtggccaaattggtcatgactgcacggcagcgcctggatgctggtgggcggtcctccgccaccaaggcctctggtgctgctaccaccggctccgcgtcgtcaagacggagggcgcggcgagcggcagccgttgttcgccattcggccgccactccttcgtcaacgcctccgacccgggaagatctgcgtgggggaccggatgcccgcatcagtatcgagcgccggcgtaatggccgacgtgctccccacgcaacggagggcgcctccttgtccggagtgtcacctcaccacggacgcggggatcagccctccgtgcccccggttggtggtgtcggctgtagagcctttgtggcgagccttcggaatgtccgttggcccccaaggttccggcccaccatcgccgaaaaatatgacgggagcgtcaaccccgccgagtttctccaggtctacacgaccgggatcgaggccgccgggggtgacgacagggtcatggcgaatttctttcccatggccctgaaaggacaggcgcggggttggctaatgaacttgccacccgcgtctgtccactcttgggaggatttgtgccaacagttcaccatgaactttcaaggcatatatccgcgcccaggtgaggaagcggacttgcacgcagtacagcgaagggatgatgagtcacttcgctcgtacattcagcggttctgtcaagtccgcaacaccataccatgcatccctgcacacgcggtgatttacgcgttcagggggggtgtgcggcacaaccacatgctcgaaaagatcgcctccaaagagccccagactaccgcggagctttttcagctcgcggaccgagtggctcgtaaggaggaggcatggacctggaacccctccggttccggtgtggcagcttcggccgcccccggatccgccgctcagacagggcggcgtgacaggaggaggaagaagaggtcagcccacaccgacgacgagggtcatgtcctcgccgtcgagggcgcttcgcgggccactcgaaaggggaggcctgcgggcgacaaaaagaaggaggccggcgctcccagtagggagcgcccaaccgacaagtggtgcatcgtccacaacacttcccttcacgacctcgcggactgccgtgcagtcaaaagtttggctgagcggacgaggaagtgggaggaggagaggaggcaggagcgccgagagggcaagtccccggcggttccttccggcaatcggcgaagtgaggccaagcagaaggcccccgccgaggacatcgatgacggcgatgatgacctaggtttccaagagcctggggccaccattgccactgtcgatgggggagcgtgtgctcacgtttctcgccggagcctcaaggccatgaagcgagagcttctggccgcggcccctactcatgaggcgacgcgccgggcgcggtggtcggaggttgccctcaccttcgaccagaccgaccacccaccgtgcgttgcccgggaaggacagatcgcaatggtggtttcccccactgtttgcaacgtgaagctggggcgtgtcctcattgatggaggagcagccctcaacatcctttcccccgcagcctttgacgccatcaaggccccggggatggtgctccggccgtcccagccgattatcggtgtgacgccggggcacacttggccgctaggtcatatcgacctcccggtcaccttcggtggacccgccaacttccgcacggagcgggtgaactttgatgtggcggacctcagtctgccctacaacgcggtcttggggaggcccgcgttggtaaagttcatggcggcggtccactacgcctacctccagatgaagatgccgggccccgatggccccatctctgtccatggcgacctcaaagtcgcgcttgcttgtatggagcagcgcgcggaccgcctcgccgtcgcgtccaagcccgagggtggcgacgaaaggcttggcacatccgcccccgccaccccgaggcagcggatagtcacatgcgacgaggtcccggccggattcatccgcgaggtcatccatccggagtggctggcgaacccggtggtcgttcccaaggcgaacggcaagcttcggatgtgcatcgactacaccgaccttaacaaggcatgtcctaaggatccttaccccctgcctcgcatagatcagattgtcgactccacagcggggtgcgaccttttgtgttttctagatgcatactctggttaccatcagattcgcatggctagggaggatgaggaaaaaactgcgttcattacccccataggaacttattgttatacgacaatgcccttcgggttaaagaatgcaggtcctacttttcaacgtactactcgaatttctttgggtagccaaataggacgtaatgttgaggcttatgtcgatgacttggttgtaaagacgcgcaaccaagagaccttactctcagatctagcggaaacttttgagagtctccgctccgcccgcataaaactgaaccccgataagtgcgtgttcggtgtacctgcaggcaagcttctcgggtttttggtctctgcccgaggcatcgaggccaatcccgagaagatacgagctatagagcgcatgcgcccccccagcaagcttagggatacggaggaagctgaacatgccctcgcccagttgaaggcgtatgtcagctctcccccggttctggtcgccccggagccagatgaacccttactactttacttagcggcgaccccgcaagtggttagtgcagccttggttgtggagcacgatgaggataatcctcatttcgcgcatccccaccctgtgctggcttggcccgggagagagcagggaggagaggcccccgagccgaacggcggcccaaggcccccgacgaccggagttggccctctgcccgcttgtcagacggtgccaggtgcccccgaaccccaggatggcctgagggccactgggggaaggccgcacctatcaccctctgaccccgaggctaatcctgtgcccgctcgactcgggagagtgcagggagaagagacccccgagccgaacggtggcctaaggcccctgacgaccggagttggccctttgcccgcttgtccgacgacgccaggagcctccgacccccaggacggccccgaggccactgtgggaaggccgcccctgtcgtcctccgaccccgaggtcgtcggcacagaagacgagcgcgcctcgcgaggccgcttggacgaagagcgccccagggatgtggcccctagcgaaggggatcggccccgccgaaaggtgcagcggcccatctactttgttagtgaggccctccgggacgccaagacccgataccctcaggcccagaagatgctttacgctattctgatggcctcgaggaaactgcgccattatttccaggcgcatcgggtcacggtggttacgtcttaccccctcggccaaatcttgcataatcgagagggtactggacgggtggtgaaatgggcaatcgaactttctgagttcgatttgcactttgaaccacgccatgctatcaagagccaggccctcgccgattttgtggcagagtggaccccagctcccgagcccgtctcagtccccgaggccagctcgggcccctcacagctgcctcacaccgcccactgggtgatgcagttcgacggctccctgtctcttcagggcgccggtgcgggggtcacgttgacctcgccgagcggagacgtcctcagatatttggttcgccttgactttcgggcgaccaataatatggcagagtacgaaggactccttgcgggactcagggtggcagctggactggggatccgccgcctcctggtgttaggcgactcccagctggtcgttaaccaggtctgtaaggagtaccggagctctgacccgcagatggacgcttacgtgcgccaagtacggcgtatggagcaccattttgacgggatagagcttcggcacgtgcccagacgagataacacggttgccgacgaactctcacggctcgcttcctcgcgagcccagaccccaccgggcgcttttgaagaaaggcttgcccagccgtcggcgcgacccgaccccttaggggagacggacgcgcctgacaggcccccgatgcccgtcggagtccaggcctcgggacccgaggggagcgctcctagctcccttagattgattgcttggatcgctgagatccaagcatacctcacagataagactctacccgaggaccgcgaagggagtgaacgcgtccggcgcatctccaaacgctatgtgctggtagaagggaccctctatcggcgcgcggctaacggaatcctcctgaagtgcattcctcgggaacaaggcgtcgagcttcttgccgatatccatgaaggcgaatgcggagcccactccgcctcgcgtaccttggttggcaaagcttttcgacaaggtttctattggccgacagctctcaatgatgcggttgacctagtccggcgatgtagagcgtgtcaattccacgccaagcaaatccatcagccggcccaggccctgcagatcataccgctttcatggccatttgctgtctgggggctcgatatcttgggaccgtttaggcgggccccgggcgggtttgagtatctgtatgtcgcgatcgacaagttcactaagtggcccgaggcttatccggttgtcaagatcgataagcactctgcacttaaattcattaagggcatcacagcccggtttggagtgcctaaccgtattattacggataacggcacccaattcactagtgaacttttcggcgattactgcgaagacatgggcatcaagctctgcttcgcctcacctgcccaccccagaagcaacggccaagtggagcgagccaatgcggaaatcctcagaggccttaaaaccaagaccttcaacatcctcaagaagcacggcgattcgtggatcgaggagttgccagcggtgctctgggcgaaccgaaccacgccaagccgagcaaccggggaaacgcctttcttcctcgtctacggcgcggaagcggttctcccatccgagctcaccctgaggtcccctcgggccaccatgtactgcgaagctgatcaagatcagcttcgtagagatgacctcgactacctggaggagcgaaggcggcgcgcggccctccgagccgcgcgctaccagcagagcctgcggcgctaccatcagcgccacgtccgggcccgatcactctgcgtcgacgacctcatcctacgccgcgtccaaacgcgtgctggattgagcaagctctcaccaatgtgggagggtccgtatcgagtgattggtgtcccccggccgggctccgttcggctggccacgagcgacggcgcagaactgcctaacccgtggaacatagaacaccttcgtcgcttctacccctaa

SEQ ID NO: 70729 - DNA, 415 bp, Oryza sativa
  unsure (1)..(415): unsure at all n locations
  Clone ID: PAT_MRT4530_71272C.1
atgagaaatgctaaaatgacttatattgtgaaacggagaaagtacattttatttttattacacgatataattcaaaatatctactgtgtatatgattttccatgcatctgattaaagatatggngatgtgttcggaaaggccacacttggttgtttttattcttgccgcctttgcggcacttgttgccgtttgtgctgnccgccaaagtcgccagaacccgcaggttcttgttcctcttatttagaacaccgttttggcttttggcctttcacttttgcaagcctggccaaccgttggaccgttgtgtttgcccccgatttttttttttttaagaanaaaaaaacaagggttaaccgtcaaatgttcaaaagaatctcaattttcagttcctttggctgcaaagcgccgccacca

SEQ ID NO: 70730 - DNA, 5484 bp, Oryza sativa
  Clone ID: PAT_MRT4530_71273C.1
atggccgagcaagcaaaggcgcacgacctctccccgagtatgagcggtgacgacggggagctaaacccacgccgtcgagctcgtactccaccgccccctccacgccaaagtcctaggcgggagaaggcgctcgagagggccgaaggatccgcgacttcgacatccacaggaggtggagaagggcggcgagatggggagcgtcgcctcctcgtctacggcgacggcagcacgccccagggcgcgctccaagctgcgggcgcgctcctacgtcacccgcccgtcgcccatgacccggagtctccagcccaacgttggctggacgatgtggccaaattggtcatgactgcacggcagcgcctggatgctggtgggcggtcctccgccaccaaggcctctggtgctgctaccaccggctccgcgtcgtcaagacggagggcgcggcgagcggcagccgctgttcgccattcggccgccactccttcgtcaacgcctctgacccgggaagatctgcgtgggggaccggatgcccgcatcagtatcgagcgccggcgtaatggccgacgtgctccccacgcaacggagggcgcctcctcgtccggagtgtcacctcaccacagacgcggggatcagccctccgtgcccccggttggtggtgtcggctgtagagcctttgtggcgagccttcggaacgtccgttggcccccaaggttccggcccaccatcgccgaaaaatatgacgggagcgtcaaccccgccgagtttctccaggtctacacgaccgggatcgaggccgccgggggtgacgacagggtcatggcgaatttctttcccatggccctgaaaggacaggcgcggggttggctaatgaacttgccacccgcgtctgtccactcttgggaggatttgtgccaacagttcaccatgaactttcaaggcacatatccgcgcccaggtgaggaagcggacttgcacgcagtacagcgaagggatgatgagtcacttcactcgtacattcagcggttctgtcaagtccgcaacaccataccatgcatccctgcacacacggtgatttacgcgttcagggggggtgtgcggcacaatcgcatgctcgaaaagatcgcctccaaagagccccagactaccgcggagctttttcagctcgcggaccgagtggctcgtaaggaggaggcatggacctggaacccctccggttccggtgtggcagcttcggccgcccccggatccgccgctcagacagggcggcgtgacaggaggaggaagaagaggtcagcccacaccgacgacgagggtcatgtcctcgctgtcgaggacgcttcgcgggccactcgaaaggggaggcctgcgggcgacaaaaagaaggaggccggcgctcctagtagggagcgcccaaccgacaagtggtgcatcgtccacaacacttcccttcacgacctcgcggactgccgtgcagtcaaaagtttggctgagcggacgaggaagtgggaggaggagaggaggcaggagcgccgagagggcaagtccccggcggttccttccagcaatcggcgaagtgaggccaagcagaaggcccccgccgaggacatcgatgacggcgatgatgacctaggtttccaagagcctggggccaccattgccactgtcgatgggggagagtgtgctcacgtttctcgccggagcctcaaggccatgaagcgagagcttctggccgcggcccctactcatgaggcgacgcgccgggcgcggtggtcggaggttgccctcaccttcgaccagaccgaccacccaccgtgcgttgcccggggaggacagatcgcaatggtggtttcccccactgtttgcaacgtgaagctggggcgtgtcctcattgatggaggagcagccctcaacatcctttcccccgcagcctttgacgccatcaaggccccggggatggtgctccggccgtcccagccgattatcggtgtgacgccggggcacacttggccgctaggtcatatcgacctcccggtcaccttcggtggacccgccaacttccgcacggagcaggtgaactttgatgtggcggacctcagtctgccctacaacgcggtcttggggaggcccgcgttggtaaagttcatggcggcggtccactacgcctacctccagatgaagatgccgggccccgatggccccatctctgtccatggcgacctcaaagtcgcgcttgcttgtatggagcagcgcgcggaccgcctcgccgtcgcgtccaagcccgagggtggcgacgagaggcttggcacatccgcccccgccgccccgaggcagcggatagtcacatgcgacgaggtcccggaagacgcgctcgtctctttcctgcgggcaaacgctgacgtcttcgcatggaggccggcggatatgcccggggtccccagggaggtgattgagcaccgtctcgccgtgcggccgggcgtaaggccggtccggcagaaagtgcggcgccaggccccggaacgtcaagccttcatccgcgaggaggtggcgcgacttctggaggccggattcatccgcgaggtcatccatccggagtggctggcgaacccggtggtcgttcccaaggcgaacggcaagcttcggatgtgcatcgactacaccgaccttaacaaggcatgtcctaaggatccttaccccctgcctcgcatagatcagattgtcgactccacagcggggtgcgaccttttgtgttttctagatgcatactctggttaccaacagattcgcatggctagggaggatgaggaaaaaactgcgttcattacccccataggaacttattgttatacgacaatgcccttcgggttaaagaatgcaggtcctacttttcaacgtactactcgaatttctttgggtagccaaataggacgtaatgttgaggcttatgtcgatgacttggttgtaaagacgcgcaaccaagagaccttactctcagatctagcggaaacttttgagagtctccgctccgcccgcataaaactgaaccccgataagtgcgtgttcggtgtacctgcgggcaagcttctcgggtttttagtctctgcccgaggcatcgaggccaatcccgagaagatacgagctatagagcgcatgcgccccccagcaagcttagggatgtgcaatgcgtcaccgatggtgccaggtgcccccgaaccccaggatggcctgagggccactgcgggaaggccgcacctatcaccctctgaccccgaggctaatcctgtgcccgctcgactcgggagagagcagggagaagagacccccgagccgaacggtggcctaaggcccctgacgaccggagttggccctttgcccgcttgtccgacgacgccaggagcctccgacccccaggacggccccggggccactgtgggaaggccgcccctgtcgtcctctgaccccgaggtcgtcggcacagaagacgagcgcgcctcgcgaggccgcttggacgaagagcgccccagggatgtggcccctagcgaaggggatcggccccaccgaaaggtgcagcggcctgtctactttgttagtgaggccctccgggacgccaagacccgataccctcaggcccagaagatgctttacgctattctgatggcctcgaggaaactgcgccattatttccaggcgcatcgggtcatggtggttacgtcttaccccctcggccaaatcttgcataatcgagagggtactagacgggtggtgaaatgggcaatcgaactttctgagttcgatttgcactttgaaccacgccacgctatcaagagccaggccctcgccgattttgtggcagagtggaccccagctcccgagcccgtctcagtccccgaggccagctcgggcccctcacagctgcctcacaccgcccactgggtgatgcagttcgacggctccctgtctcttcagggcgctagtgcgggggtcacgttgacctcgccgagcggagacgtcctcagatatttggttcgccttgactttcgggcgaccaataatatggcagagtacgaaggactccttgcgggactcagggtggcagctggactggggatctgccgcctcctggtgttaggcgactcccagctggtcgttaaccaggtctgggagacggacgcgcctgacaggcccccgatgcccgtcggagtccaggcctcgggacccgaggggagcgctcctagctcccttagattgattgcttggatcgctgagatccaagcatacctcacagataagactctacccgaggaccgcgaagggagtgaacgcgtccggcgcatttccaaacgctatgtgctggtagaagggaccctctatcggcgcgcggctaacggaatcctcctgaagtgcattcctcgggaacaaggcgtcgagcttctcgccgatatccatgaaggcgaatgcggagcccactccgcctcgcgtaccttggttggcaaagcttttcgacaaggtttctattggccgacagctctcaatgatgcggtcgacctagtccggcgatgcagagcgtgtcaattccacgccaagcaaatccatcagccggcccaggccctgcagatcataccgctttcatggccatttgctgtctgggggctcgatatcttgggaccgtttaggcgggccccgggcgggtttgagtatctgtatgtcgcgatcgacaagttcactaagtggcccgaggcttatccggttgtcaagatcgataagcactccgcacttaaattcattaagggcatcacagctcggtttggagtgcctaaccgtattattacggataacggcacccaattcactagtgaacttttcggcgattactgcgaagatatgggcatcaagctctgcttcgcctcacctgcccaccccagaagcaacggccaagtggagcgagccaatgcggaaatcctcagaggccttaaaaccaagaccttcaacatcctcaagaagcacggcgattcgtggatcgaggagttgccagcggtgctctgggcgagccgaaccacgccaagccgagcaaccggggaaacgcctttcttcctcgtctacggcgcggaagcggttctcccatccgagctcaccctgaggtcccctcgggccaccatgtactgcgaagctgatcaagatcagcttcgtagagatgacctcgactacctagaggagcgaaggcggcgcgcggccctccgagccgcgcgctaccagcagagcctgcggcgctaccatcagcgccacgtccgggcccgatcactctgcgtcgacgacctcgtcctacgccgcgtccaaacgcgtgctggattgagcaagctctcaccgatgtgggagggtccgtatcgagtgattggtgtcccccggccgggctccgttcggctggccacgagcgacggcgcagaactgcctaacccgtggaacatagaacaccttcgtcgcttctacccctaa

SEQ ID NO: 70731 - DNA, 4188 bp, Oryza sativa
  Clone ID: PAT_MRT4530_71274C.1
atggccgagcaagcaaaggcgcacgacctctccccgagtatgagcggtgacgacggggagctaaacccacgccgtcgagctcgtactccaccgccccctccacgccaaagtcctaggcgggagaaggcgctcgagagggccgaaggatccgcgacttcgacatccacaggaggtggagaagggcggcgagatggggagcgtcgcctcctcgtctacggcgacggcagcacgccccagggcgcgctccaagctgcgggcgcgctcctacgtcacccgcccgtcgcccatgacccggagtctccagcccaacgttggctggacgatgtggccaaattggtcatgactgcacggcagcgcctggatgctggtgggcggtcctccgccaccaaggcctctggtgctgctaccaccggctccgcgtcgtcaagacggagggcgcggcgagcggcagccgctgttcgccattcggccgccactccttcgtcaacgcctctgacccgggaagatctgcgtgggggaccggatgcccgcatcagtatcgagcgccggcgtaatggccgacgtgctccccacgcaacggagggcgcctcctcgtccggagtgtcacctcaccacagacgcggggatcagccctccgtgcccccggttggtggtgtcggctgtagagcctttgtggcgagccttcggaacgtccgttggcccccaaggttccggcccaccatcgccgaaaaatatgacgggagcgtcaaccccgccgagtttctccaggtctacacgaccgggatcgaggccgccgggggtgacgacagggtcatggcgaatttctttcccatggccctgaaaggacaggcgcggggttggctaatgaacttgccacccgcgtctgtccactcttgggaggatttgtgccaacagttcaccatgaactttcaaggcacatatccgcgcccaggtgaggaagcggacttgcacgcagtacagcgaagggatgatgagtcacttcactcgtacattcagcggttctgtcaagtccgcaacaccataccatgcatccctgcacacacggtgatttacgcgttcagggggggtgtgcggcacaatcgcatgctcgaaaagatcgcctccaaagagccccagactaccgcggagctttttcagctcgcggaccgagtggctcgtaaggaggaggcatggacctggaacccctccggttccggtgtggcagcttcggccgcccccggatccgccgctcagacagggcggcgtgacaggaggaggaagaagaggtcagcccacaccgacgacgagggtcatgtcctcgctgtcgaggacgcttcgcgggccactcgaaaggggaggcctgcgggcgacaaaaagaaggaggccggcgctcctagtagggagcgcccaaccgacaagtggtgcatcgtccacaacacttcccttcacgacctcgcggactgccgtgcagtcaaaagtttggctgagcggacgaggaagtgggaggaggagaggaggcaggagcgccgagagggcaagtccccggcggttccttccagcaatcggcgaagtgaggccaagcagaaggcccccgccgaggacatcgatgacggcgatgatgacctaggtttccaagagcctggggccaccattgccactgtcgatgggggagagtgtgctcacgtttctcgccggagcctcaaggccatgaagcgagagcttctggccgcggcccctactcatgaggcgacgcgccgggcgcggtggtcggaggttgccctcaccttcgaccagaccgaccacccaccgtgcgttgcccggggaggacagatcgcaatggtggtttcccccactgtttgcaacgtgaagctggggcgtgtcctcattgatggaggagcagccctcaacatcctttcccccgcagcctttgacgccatcaaggccccggggatggtgctccggccgtcccagccgattatcggtgtgacgccggggcacacttggccgctaggtcatatcgacctcccggtcaccttcggtggacccgccaacttccgcacggagcaggtgaactttgatgtggcggacctcagtctgccctacaacgcggtcttggggaggcccgcgttggtaaagttcatggcggcggtccactacgcctacctccagatgaagatgccgggccccgatggccccatctctgtccatggcgacctcaaagtcgcgcttgcttgtatggagcagcgcgcggaccgcctcgccgtcgcgtccaagcccgagggtggcgacgagaggcttggcacatccgccccccgccgccccgaggcagcggatagtcacatgcgacgaggtgcccccgaaccccaggatggcctgagggccactgcgggaaggccgcacctatcaccctctgaccccgaggctaatcctgtgcccgctcgactcgggagagagcagggagaagagacccccgagccgaacggtggcctaaggcccctgacgaccggagttggccctttgcccgcttgtccgacgacgccaggagcctccgacccccaggacggccccggggccactgtgggaaggccgcccctgtcgtcctctgaccccgaggtcgtcggcacagaagacgagcgcgcctcgcgaggccgcttggacgaagagcgccccagggatgtggcccctagcgaaggggatcggccccaccgaaaggtgcagcggcctgtctactttgttagtgaggccctccgggacgccaagacccgataccctcaggcccagaagatgctttacgctattctgatggcctcgaggaaactgcgccattatttccaggcgcatcgggtcatggtggttacgtcttaccccctcggccaaatcttgcataatcgagagggtactagacgggtggtgaaatgggcaatcgaactttctgagttcgatttgcactttgaaccacgccacgctatcaagagccaggccctcgccgattttgtggcagagtggaccccagctcccgagcccgtctcagtccccgaggccagctcgggcccctcacagctgcctcacaccgcccactgggtgatgcagttcgacggctccctgtctcttcagggcgctagtgcgggggtcacgttgacctcgccgagcggagacgtcctcagatatttggttcgccttgactttcgggcgaccaataatatggcagagtacgaaggactccttgcgggactcagggtggcagctggactggggatctgccgcctcctggtgttaggcgactcccagctggtcgttaaccagataagactctacccgaggaccgcgaagggagtgaacgcgtccggcgcatttccaaacgctatgtgctggcgggccccgggcgggtttgagtatctgtatgtcgcgatcgacaagttcactaagtggcccgaggcttatccggttgtcaagatcgataagcactccgcacttaaattcattaagggcatcacagctcggtttggagtgcctaaccgtattattacggataacggcacccaattcactagtgaacttttcggcgattactgcgaagatatgggcatcaagctctgcttcgcctcacctgcccaccccagaagcaacggccaagtggagcgagccaatgcggaaatcctcagaggccttaaaaccaagaccttcaacatcctcaagaagcacggcgattcgtggatcgaggagttgccagcggtgctctgggcgagccgaaccacgccaagccgagcaaccggggaaacgcctttcttcctcgtctacggcgcggaagcggttctcccatccgagctcaccctgaggtcccctcgggccaccatgtactgcgaagctgatcaagatcagcttcgtagagatgacctcgactacctagaggagcgaaggcggcgcgcggccctccgagccgcgcgctaccagcagagcctgcggcgctaccatcagcgccacgtccgggcccgatcactctgcgtcgacgacctcgtcctacgccgcgtccaaacgcgtgctggattgagcaagctctcaccgatgtgggagggtccgtatcgagtgattggtgtcccccggccgggctccgttcggctggccacgagcgacggcgcagaactgcctaacccgtggaacatagaacaccttcgtcgcttctacccctaa

SEQ ID NO: 70732 - DNA, 1029 bp, Oryza sativa
  Clone ID: PAT_MRT4530_71275C.1
atgatccgtacgccggcagtgagccgggacaagccgcctccgccaccggaggaggttacagaaggcccattagcacaagctgaggcaattcttctccggcgagccgtccgagcagcggcggcagctggtgacttccgattcaacgctcgagggcctgaagatcttcagatgcatgtctggacggggttggccggagagggtgggagaggcggccggcatggcgatggtagcgggctccagcgggcggtgagccaaattaaagaagccgcctccatcgcgacacagacgccggcgagctgccatcgatcactggcaccgtcctaccggcacacagtggcgttggccaccggaggaggttacggacgacgccttggggattatggaagtggtcgcggctgccgtgcgtatacactcatctctatgaacgttcacacgcatatcccctatccatatgagtctcttcggaagattggaccaacaaatcttgagattgacgaagtcaccaacgtctcgctgtcgacggggtgtataaacgttccaaacatcatacccatgggtacgttaacgggcaaaaccttcacccatcgggtacacgggtgtgggtacgttctgctgtcacccgaacccattaacccgtgggttgaaaatacccgtaggcctagcccaatatgcagatggcgcaaggcccacaaccatcaaaaccctagcggccaagccacggtcgcaccgcacggcacatgccacacgccggcacaccaccgcgtaggcgcgcacagccgcagcaccagccgccagccggtctcggtcgcgccgatggagggcagggacgccgcgcgccggtcagctgtcggcaggagcgccgccgcagtgcttatcggtaacagcaaggacggcgaagtaagtcaacgggacaacagattaaggcccccgttaattcaaaggaaattcataggatttcaagaactaagggtgccaactgaaacttcaaatactaaatcactgtcaatacttagaccttttcgaaatacc

SEQ ID NO: 70733 - DNA, 5802 bp, Oryza sativa
  Clone ID: PAT_MRT4530_71276C.1
atggccgaacaagcaaaggcgcacaacctctctccgagtgttagcggtgacgacggggagccgaacccacgccgtcgagcccgtactccaccgtcccctccacgccaaagtcctaggcgggaggaggcgctcgagagggtcgaaggatccgcgacttcgacatccacgggtgatggggaagggcggcgagatggggagcgtcgcctcctcgtctacggcgacggcagcacgccccagggcgcgctccaagctgcgggcgcgctcctacgtcacccgcccgttgtccctgacccggagtctccagcccaacgttggctggacgacgtggccaacttggtcatgacggcacggcatcgcctaggtgctggtgggcggtcctccgccaccaagacctctggcgctgctaccaccggctccgtgtcgtcaaggtggagggcgcggcgagcggcggctgttgctcgccattcggccgccactccttcgtcagcgcctccgacccaggaagatctgcgtggggggccggatgcccgcatcagtatcgagcgccggcgtaatggccgacgtgctccccacgcaacggagggcgcctcctcgtccggagtgtcacatcaacacggacgcggggatcagccctccgtgcccccggttggtggtgtcggctgtagagcctttgtggcgagccttcggaacgtccgttggcccccaaggtttcggcccaccatcgccgaaaaatatgacgggagcgtcaaccccgccgagtttctccaggtctacacgaccgggatcgaggccgccgggggtgacgacagggtcatggcgaatttctttcccatggccctgaagggacaggcacggggttggctaatgaacttgccacccgcgtccgtccactcttgggaggatttgtgccaacagttcaccatgaactttcaaggcacatatccgcgcccaggtgaagaagcggacctgcacgcagtacagcgaagggatgatgagtcacttcgctcgtacattcagcggttctgtcaagtccgcaacaccataccatgcatccctgcacacgcggtgatctacgcgttcagggggggtgtgcggcacaaccgcatgctcgaaaagatcgcctccaaagagccccagactaccgcggagctttttcagctcgcggaccgagtggctcgtaaggaggaggcatggacctggaacccctccggttccggtgtggcagcttcggccgcccccggatccactactcagacagggcggcgtgacaggatgaggaagaagaggtcagcccataccgacgacgagggtcatgtcctcgccgtcgagggcgcttcgcgggccacccgaaaggggaggcctgcaggcgacaaaaagaaggaggccggcgctcccagcagggagcgcccaaccggcaagtggtgcatcgtccacaacacttcccttcacgacctcgcggactgccgcgcagtcaaaagtttggctgagcggacgaggaagtgggaggaggagaggaggcaggagcgccgagagggcaagtccccggcggttccttccggcaatcggcgaagtgaggccaaacagaaggcccccgccgaggacatcgatgacggcgatgatgacctaggtttccaagagcctggggccaccattgccactgtcgatgggggagcgtgtgctcacgtttctcgccggagcctcaaggccatgaagcgagagcttctggccgcggcccctactcatgaggcgacgcgccgggcgcggtggtcggaggttgccctcaccttcgaccagaccgaccacccaccgtgcgttgcccggggaggacagatcgcaatggtggtttcccccactgtttgcaacgtgaagctggggcgtgtcctcattgatggaggagcagccctcaacatcctttcccccgcagcctttgacgccatcaaggccccggggatggtgctccggccgtcccagccgattatcggtgtgacgtcggggcacacttggccgctaggtcatatcgacctcccggtcaccttcggtggatccgccaacttccgcacggagcgggtgaactttgatgtggcggacctcagtctgccctacaacgcggtcttagggaggcctgcgttggtgaagttcatggcggcggtccactacgcctacctccagatgaagatgccgggccccggtggccccatctctgtccatggcgacctcaaagtcgcgcttgcttgtatggagcagcgcgcggaccacctcgccgccgcgtccaagcccgagggtggcgacgagaggcttggcacctccgtccccgctgccccgaggcagcggatgatcacatgcgacgaggtcccggccggattcatccgcgaggtcatccatccggagtggctggcgaacccggtggtcgttcccaaggcgaacggcaagcttcggatgtgcatcgactacaccgaccttaacaaggcatgtcctaaggacccttaccccctgcctcgcatagatcagattgtcgactccacagcggggtgcgaccttttgtgttttctagatgcatactctggttaccatcagattcgcatggctagggaggataaggaaaaaactacgttcattacccccataggaacttattgttatacgacaatgcccttcgggttaaagaatgcaggtcctacttttcaacgtactactcgaatttctttgggtagccaaataggacgtaatgttgaggcttatgtcgatgacttggttgtaaagacgcgcaaccaagagaccttactctcggatctagcggaaacttttgagagtctccgctccgcccgcataaaactgaaccccgataagtgcgtgttcggtgtacctgcaggcaagcttctcgggtttttggtctctgcccgaggcatcgaggccaaccccgagaagatacgagctatagagcggatgcgcccccccagcaagcttagggatgtgcaatgcgtcaccggttgcatggccgccctaagtcggttcatatcgaggctgggagagaaggcgctacccttatttaagctcctcaaacgctccgggccgtttacttggacggaggaagctgaacgtgtcctcactcagttgaaggcgtatctcagctctcccccagttctggtcgccccggagccaaatgaacccttgctactctacttagcggcgacctcgcaagtggttagtgcggcgttggttgtggagtgcgatgaggacaatcctcattccgcgcacccccaccctgtgctggcttggcccgggagagagcaggaaggagaggcccccgagtcgaacggtggcccaaggcccccgacgaccgaagcaggccctctgcccgcttgtcagacggtgccaggtgcccccgacccccaggatggcccgagggccactgcgggaaggcagcacctatcgccctctgaccccgaggctaaccctgtgccgactcgacccgggagagagcagggagaagaggcccccgagccgaacggtggcctaaggcccctgacgaccggagttggccctttgcccgcttgtccgacgacgccaggagcccccgacccccaggacggccccgaggccactgtgggaaggccgcccctgtcgtcctccgaccccgaggtcgttggcacagaagacgagtgcaccccgcgaggccgcttggacaaagagcgccccagggatgtggcccctagcgaagaggatcggccccaccgaaaggtgcagcggcccgtctactttgttagtgaggccctccgggacgccaagacccgataccctcaggcccagaagatgctttacgctattctgatggcttcgaggaaactgcgccattatttccaggcgcatcgggtcacggtggttacgtcttaccccctcggccaaatcttgcataatcgagagggtactggacgggtggtgaaatgggcaatcgaactttctgagtttgatttgcactttgaaccacgccacgctatcaagagccaggccctcgccgattttgtggcagaatggaccccagctcccgagcccgtctcagtccccgaggccagctcgagcccctcgcagctgcctcacaccgcccactgggtgatgcagttcgacggctccctgtctcttcagggcgtcggtgcgggggtcacgttgacctcgccgagcggagacgtcctcagatatttggttcgccttgactttcgggcgaccaataatatggcagagtacgagggactccttgcgggactcagggtggcagctggactggggatccgccgcctcctggtgttaggcgactcccagctggtcgttaaccagatggacgcttacgtgcaccaagtacggcgtatggagccccattttgacgggatagagcttcggcacgtgcccagacgggataacacggttgccgacgaactctcacggctcgcttcctcgcgagcccagaccccaccgggcgcctttgaagaaaggcttgcccagccgtcggcgcgacccgaccccttaggggagacggacgcgcctgataggcccccgatgcccgtcggagtccaggcctcgggacccgaggggagcgctcccagctcccttagatcgattgcttggatcgctgagatccaagcatacctcacagataagactctacccgaggaccgcgaagggagtgaacgcgtccagcgcatctccaaacgctacgtgctggtagaagggaccctctatcggcgcgcggctaacggaatcctcctgaagtgcattcctcgggaacaaggcgtcgagcttcttgccgatatccatgaaggcgaatgcggagcccactccgcctcgcgcaccttggttggcaaagcctttcgacaaggtttctattggccgacagctctcaatgatgcggtcgacctgccggcccaggccctgcagatcataccactttcatggccatttgctgtctgggggctcgatatcctgggaccgtttaggcgggccccgggcgggtttgagtatctgtatgtcgcgatcgacaagttcactaagtggcccgaggcttatccggtcgtcaagatcgataagcactccgcacttaaattcattaagagcatcacagcccggtttggagtgcctaaccgtattattacggataacggcacccaattcactagtgaacttttcggcgattactgcgaagacatgggcatcaagctcagcttcgcctcacctgcccaccccagaagcaacggccaagtggagcgcgccaatgcggaaatcctcagaggccttaaaaccaagaccttcaacatcctcaagaagcacgacgattcgtggatcgaggagttgccagcggtgctctgggcgaaccgaaccacgccaagccgagcaaccggggaaacgcctttcttcctcgtttacggcgcggaagcggttctcccatccgagctcaccctgaggtcccctcgggccaccatgtactgcgaggctgatcttgatcagcctcgcggagatgaccttgactacttggaagagcgaaggcggcgcgtggccctccgagccgcgcgctaccagcagagcctgcggcgctaccatcagcgccacgtccgggcccgatcactctgcgtcgacgacctcgtcctacgccgcgtccaaacgcgtgctggattgagcaagctctcaccaatgtgggagggtccgtatcgagtgatcggcgtcccccggctgggctccgttcggttggccatgggcgacggcacagagctgcctaacccgtggaacatcgaacaccttcgtcgcttctacccctaa

SEQ ID NO: 70734 - DNA, 2547 bp, Oryza sativa
  unsure (1)..(2547): unsure at all n locations
  Clone ID: PAT_MRT4530_71277C.1
ttcccggngtcgacccactggatccgcaaaaatacttcaccaaaccaccctcctcctcctccccctttaccatttccaagttccaacccccaaaaaaaatccaaccaaaaagcggagattttccaactcttatcatctcctcctcctcctcctcgtcatcgtcatcaccagcacacacccgagagaaaaaaatcctataaagaaatggattgagccatcacccaacgccgccaagatcctgtcctcttgtgtgcgcaacctgtagctccacctccacgcaggatcaacacccaaatccccccatcttcttttctttttcgtttcgtttctgcaagatttgcatcttcttcttcttcctccgaggagtgagtgacacctgagatagcgagagcgagattttcttcggtttttttgttcctctttttggccataaacctcccataaagctcggtttcttggttcgttttttctttctttcttcctctccttcgagaatcgcccgagtgtgaaatccaagatcccgaattccgtgtcttcttcttcttccgtagaaatcccggggtgggcaaagcggtgggatttctggagagggggagagcgctacaaggcaagaagcttgggtgtccgtagtccgtacggttcttgatctggggtcgccgccaatgcagccggacccgagcgggagcggcggcgacggcaacgccaatgcgaaggcgaagctggcgccgccgccggtgacggcggcgggaggtcggccggtgtcggtgctgccgcacaagacggcgaacgtgcgcgaccactaccgcatcgggaagaagctcgggcaggggcagttcgggacgacgtacctgtgcgtggacaaggcgagcggcggcgagttcgcgtgcaagtccatccccaagcggaagctgctgtgccgggaggactacgaggacgtgtggcgcgagatccagatcatgcaccacctctccgagcaccccaacgtcgtccgcatccgcggcgcctacgaggacgcgctgttcgtccacatcgtcatggagctctgcgccggcggcgagctcttcgaccgcatcgtcgccaagggccactacaccgagcgcgccgccgcgcagctcatccgcaccatcgtcgccgtcgtcgagggatgccactcgctcggcgtcatgcaccgggacctcaagcccgagaacttcctcttcgccagcgccgccgaggacgcccccctcaaggccactgatttcggcctctccatgttctacaagcctggtgataagttctctgatgttgttgggagcccctattatgttgcacctgaggtacttcagaaatgctatggtccagaatctgatgtctggagtgctggggtaattctttacattttgctatgtggtgttccaccattttgggcagaaactgaagctggaattttcaggcagattctacgaggcaaacttgattttgaatctgaaccctggcctagcatctctgacagtgctaaagatctagtccgtaatatgctttgccgggatcctacaaagagacttacagcccatgaggttctctgtcatccatggattgttgatgatgctgtggcacctgacaagcctattgattctgctgttttgtcaagactgaagcacttttcggcaatgaacaagctcaagaagatggcattgagggttattgctgaaagcctgtctgaggaagagattggaggactaaaggagctattcaaaatgattgatactgacgatagtggaactataacttttgatgagctgaaagagggcttgaaaagggtgggttcagaattaacagaacatgaaatccaggctttaatggaagcggctgatatcgacaacagtggaaccatcgactatggtgaattcattgctgctactctccacatgaataagctagagagggaggaaaacttagtatcagcattctcatttttcgacaaagatggaagtggtttcataactattgatgagctgtcacaagcatgccgcgaatttggccttgatgatcttcaccttgaggatatgattaaagatgttgatcaaaacaatgacggacaaattgactacagcgagttcacggcgatgatgagaaagggcaatgctggtggagctggaaggagaaccatgaggaacagcttgcagttgaatcttggtgagatcttgaaccccagcaacagctaaactcctacaggaaggccatggctgttacatgccatcattgtctgaatctctgcacgcctcatcagctggactaatctctaagagggcaaagccgttgagtgaattgtgctttggcgttacatgagacgctgaagaattttcgtagcagtaatagctacagctactagagtgtaagagaaattggcgttatgtgatcgtaatatcctatcagtgtaactgatcttagatgatgctggagatgatagtacaatgaacagcttatatgtattcctgtccttgtagactgaacattgttgatagttggggaatgctcttggcatcaaaaaaaaaacaaaaatctatt

SEQ ID NO: 70735 - DNA, 177 bp, Oryza sativa
  Clone ID: PAT_MRT4530_71278C.1
tcgagacgacatacaacaattataacagcgatgttgtgtgatgagctagtggacctcgatacacctgaaatgaatgtcggcaggttagatgatcatgttgcgatagatctcaacagtgcttatgacttggaatactccatgtaccagaagttcatgacgcccgacccctttttcttt

SEQ ID NO: 70736 - DNA, 135 bp, Oryza sativa
  Clone ID: PAT_MRT4530_71279C.1
tgctggcgcagacaccgccaaggcccacccacgggctagcccaggtacgatgccgcaaggcccacccacgggctagcccagggaaaagtgaaaagtggtcagtggtaaaatgcatcacgccgatcgacattcacg

SEQ ID NO: 70737 - DNA, 2970 bp, Oryza sativa
  Clone ID: PAT_MRT4530_7127C.1
gtgccgcagcgcgcgtgagcgatcacaaaaacgcctccgtcttccggcctttttcccgtgagtgagagagctcgcgcgcgcgcgcgtgcgtcgcctactacattctttcccctccaaccttttcgagaatagacatcacatcaggggtatggaggttggcgtgagcgaagctttgaatcccgggtagccgccggagagattgcgtcctctcgccttccctcccttcgcttcctgcgcgcccgccgctcatgtttgcgctctcgccgagacacggtgttcggcggccgcgcctgtttggtcgctgcctttttatgccaaacccatccgctttgagagattggcctgtcgttttcctgctgtttggtgaggaggaggaggcggtggcaattgatggaatctgatcgaatgccgcttcaggctgggtcaatcgagctggctgcaacgatcggaggtttcctatcccctcgtgaaggtgtcaaatcagtatccttgtgccggatggtttggggataattttcgtagtgagttcataatagcgtctcatttgggattcctctggttgattcagttccctttgcaagtttgcgggtttgttcacggatttggttggcttgagatcgatcttcattcattgggagatggatgatgatgactactcctgggtgcggcgcaccaagttctcgcactccattgttaaatccaactctggcagggagcagtttggtgcattccttgatccgtttgacagttccactgcatggaggcagaaaggattcagtggagagctcatgattcatggacataatttacagccgagggcaaaaggagcagtctcaaagtcacctaggccttcaatcccgttggcgaaatcaccagtttcacaggcagagcggaagctgaaagctaagttttcagatggtgaattgaaacaacgggggaaaattagtgatggctcgttgcgagaagcatcgaaagagaaggatcgcaaggttgggcataaaggagaaggccttagcctggatatttcttgtccaattctggatcggacagttcaggatgacagttcagacacgcttgacttctctttccactcagaagagcaaagtttaaggttgctgagagtatgctcgagtccagctcctttctattcgaaggatacaactacgtttggtgattccaaaatacatagtacgtctgttaagattgttggagagggatcgaagccgaggaggagagcgaaatccccaatgccgacccgtgtcatctctgaagtttttaaggaggccaaagctgccactaagaggttctctagcccacagcggcaaaggaaatctagttctccacattcaccacgttcacccgatgatagtccccggtttggctttccttcaatgagaacaccgggtaacttgaaagctaggagggcctcgtcctggccaaggaactatgacaatggagtggccaaggctgttgcattggatatacttgagagatggacaattgaccgctcacagttactcattggtcaaagatttgcatcaggggcatatagtcgtttgttccatggaatttacaaggagcagccagttgctgtcaaatttatcaggcagcctgatgaagaagaagatgcagaattggctgctaaacttgagaagcaattcactgctgaagtaaccattctggctcggctccatcatcgcaatgtcattaagctgattggggcatgtaatgctccaccggtcttttgtgtcatcactgagttcctgtgcggggggtctttgagagcttttttgcgcaagctccagcgccaaaagcttcctttggagaagatcatttgcattgctttggatattgcacatggtttggagtacattcactcgcaaagagtaatccatcgtgatgtgaaacctgagaacatcttgtttgatggagaatgttgtgcaaaggttgttgattttggagtggcttgtgaagaagtatactgcaactcattggaagatgacccaggtacttacagatggatggcaccagagatgtataagcgcaaaccatatggtcggaaggttgacgtctacagttttggcctcgtattgtgggaattgtttagtggctcgatcccttatgaagagatgactccattgcaggcagcttttgcagttgttaataagaacttaagaccagttgttccttcaagctgtccggcgcaacttcgacttttgatcgagcaatgttggtcttgtcaaccagagaagagacctgagttttcccaagtagttcagatcctcaaaaatctcaaggaggccctggatagagatggaacgcttgacaagatcccaagcaccaactgccaggaacctcctgatcagaacaagaagagactgtccaattggatccaaagactctcgtacagtcaggccgatttctccggacctccaccgccaaagttattgtaattatatgcattcctctcttccataaatatcgtagcatctgctagatgtctctgtaaatcataaggttcttcttggtgtataaactccgcacatttttttagtggacagttcattcttgtttggcttagtaattttgcctgcaaccaaccaatggagtcttagttcccggcgggtggggatgaatcattttgtgcattgaggtagcaatcttgtagcatctggttgaaggctatttattgctcatgcttttttaggccgaggggctaatattgacgtgttattcatccaaagacttgcataaaagtgtaaatggtccaaagactaatattcatgcattttttccaaagttacgactaacgaaattttggaccaaggggtaatgtttatgtgttttgggccaactggtaaatgttaaatgttttcaccaatgtatgtatgtaactcatgaaattttctctcaaaacaagtatatcgtgtaattttggccccaaaggggtttaaaaggcccctttttttg

SEQ ID NO: 70738 - DNA, 1245 bp, Oryza sativa
  Clone ID: PAT_MRT4530_71280C.1
cccacgcgtccgcccacgcgtccgctcctcctccaccaccacctcgccgtcgccgtcaccgcgccaccgtctcctcgatctctcactctcacagctcgctggttgcttcggcttccgctgctcggtcgcggttgattttgggggatgacgaaccacgccggcttcgccgcggacgacgcggtcaccgcggccgtgccggtgcaggcggcgcagggcgggcggcatttcccgccgttcctggcgccgtcgtccaggctcaccgactgcaagaaggcggcggcgcacgtggacctcgccggcgcgggcggggtggcgacggtgcccggatcttggccgcgccacgccaagcccgtctccggcgccgagctcgacgactggatggagaagcacccgtcggcattggcatggttcgagtccgtcgccgccgcggcgaagggcaaggagatcgtcgtgttcctcgactacgacggcaccctctcccccatcgtcgccgaccccgaccgcgccttcatgtccgacgaaatgagagaggcggtgagaggcgtggcgaagcacttcccgacggcgatcgtgagcgggaggtgcatcgacaaggtgttcgactttgtgaagctggaggagctgtactacgccgggagccatggaatggacatcaggggccccaccgcggcagcgtcggagtacaaccacaacatgaaggcaaagcagggtgatgctgttactttccagccggccgccgatttcctgcccgtcatcgaggaggtgtatcatgtgctgaaggagaggatggcgagtataaggggttcgctggtggagaacaacaagttttgcctttccgtgcactaccgctgcgtcgacgaggcggaatggggcgtgctggacggcaaggtgagggcggtgatagagggctacccggatctccgtctcagcaaggggagaaaggtgctggagatccgccctgtcatcgactgggacaaaggctccgcactccagttcctgctcaaatctctcggttatgaggggcgcaacaatgttttcccgatatacattggagatgaccgcaccgacgaggatgctttcaaggtgttgcgcaacatgggacagggcataggaatccttgtgaccaaggtcccaaaggagacagctgcatcctacactctgcgagagccatccgaggtgaaggagttcctgcgcaagttggtgaagattaagatcaacggggacaaagggctgattggcaagtag

SEQ ID NO: 70739 - DNA, 242 bp, Oryza sativa
  Clone ID: PAT_MRT4530_71281C.1
gacccaggcgcagaggcaccaggccagcaagtccgcctcctccttaccgtgcatgtcacgcttccttcacctgcctggtactctttacactgctcctggatacctacctgtagactcgacagatcaagggtctctctagcagatgcgtctcatcccttctcgcctctcattatacagactcttcttatctatatactgtggaaggcgatcttgggtggggagagagcaagaaccgaagctga

SEQ ID NO: 70740 - DNA, 1728 bp, Oryza sativa
  Clone ID: PAT_MRT4530_71282C.1
atggaggtgaccatggaggacgtggccggggacttcgagttctccggctgcggctccaccaccaccacctcctccgcgtcctccctcgacgacggcacggggatgtgctacgcgtggggcgagctgtccccggtcgccgactgggccaacttctgctgctccgacgacgacggcggccacgacctgcacggcctcatcgagtccatgctctgcgacgacacgctcgtcggcgtcgacgacgacggccaagctggcctccaccacgcggatatgttccgcgacgacctttactgctacggcaatggctccaacccgagcagcaccaccaccacgaaccctggctcgccggtgttcgacgacccgacgcagggctgccccgagaagggcctccggctgctccacctgctcatggcggccgccgaggcgctctccggcccgcacaagagccgggagctggcccgggtgatattggttcggctcaaggagatggtctcacacaccgccagcgccaacgccgccgcgtccaacatggagcgcctcgccgcgcacttcaccgacgcgctccaggggctcctcgacggctcccaccccgtcggagggtccggccggcaggcggccgccgcggcgtcgcaccaccacgccggcgacgtgctgacggcgttccagatgctgcaggacatgtcgccgtacatgaagttcggccacttcaccgcgaaccaggcgatcctcgaggcggtgtccggcgaccggcgcgtgcacattgtcgactacgacatcgccgaggggatccagtgggcgtcgctgatgcaggccatgacctcccgcgccgacggcgtgccggcgccgcacctgcgcatcaccgccgtctcccgcagcggaggcggcggcgcccgggccgtccaggaggccggccgccgcctgtcagcgttcgcggcgtccatcgggcaacccttctctttcggacagtgccgcctggactccgacgagaggttccggccggcgacggtccggatggtcaagggggaggcgctcgtcgccaactgcgtcctccaccaagccgcggccaccaccaccatcagacgccccaccggctcggtggcgtcattcctgtccggcatggccgcgctcggtgccaagctggtcacggtggtcgaggaggaaggcgaagccgagaaggacgacgacggcgactcggccggcgacgccgcggcgggcggcttcgtgcggcagttcatggaggagctgcaccgctactccgcggtgtgggactctctcgaggccgggttcccgacgcagagccgggtgcgcggcctcgtggagcgcgtcatcctcgcccccaacatcgccggcgccgtgagccgcgcgtaccgcggcgtcgacggcgaggggaggtgcgggtgggggcagtggatgcgcgggagcgggttcaccgccgtgccgctcagctgcttcaaccacagccaggcgaggctgctgctcggcctgttcaacgacgggtacacggtggaggagacgggtcccaacaagatcgtgctcgggtggaaggcccggcggctgatgtcggcgtccgtgtgggcgccgccgccgctgccggtgccgtcgtcgccgccggagggggtgtgccagcccgtcgtcgggatggcgccggtggccaccggtggcttcgcgcggacggagtttgactatattgattcgttccttgtcgagccagcttacgcgctagtttga

SEQ ID NO: 70741 - DNA, 243 bp, Oryza sativa
  Clone ID: PAT_MRT4530_71283C.1
cttaagcttggttcctctttttttccgcccttttttttttttttggggtttttaaggagaaatcatgattcctcgccgcttccactctcgcaagtcacaggaccataaaaagaggcaacaaaagggccttaggtaaagaaaaattataccgaaccattactgccactcctccataattttaaacatactggtttcatatttaccatgcctgaattgacttttctgttcgggacgctatcctgc

SEQ ID NO: 70742 - DNA, 243 bp, Oryza sativa
  Clone ID: PAT_MRT4530_71284C.1
atgggagacaaaggtcgaacagctcaaatccgctcgacgagcttgggtggaagggcgggtaggccatgggaggtggtggctaccgccgagctaggaaggagggcagctacgaaagtggaggttgccgacgagcttagtggtggtggcatatgtgaggaggggtgctgcattgcccttgtggtggatgagaacaggagcgggcttgctgactcaacacaacacaaacagagggcggtgcaataa

SEQ ID NO: 70743 - DNA, 2626 bp, Oryza sativa
  Clone ID: PAT_MRT4530_71285C.1
gcccacgtcgtcgttgtcacccccgcttctgctctcctcgtccgaggcgagcccgaaggcgaaccggggggccgacccatcgaagttcgagacaatcgcgtcggccgcctcccggacttgctcccgggcccttgcctcggtccccgggggaaaatcttcgagcgcgcgccatgggacgaagtcaggctcgcgcgcttgatggctcgcgaggaccagctccactgcagcccgtgccaaagaagctgacgacaactttatggtctcgccgacctcctcctctagcctctccagatctgccgccagctcgtccagccggagcatgagtgctggctgtgtgggcggaagtttgctatcccggcgcacagaaatgccgactcggcgccccgcgcgctccagccggtcgacggcgtcggagagctgcccgggtccgatctcgttggtgaggcggagggccgcgatctccccagcctgatcttgcaccaggcgctccaggtcggcgagggtattttgagccatggcgagctggctcgccaaccccacgccgccgagcggcccgcccgctgccaagtccttctcccgggcctccagctcggaagccttcgccgctattgccgcacgctcggcgggggatcctctagagtccgggccacgcgcccggcaacagcctcctcgcgtttcgcgagttgctcgcccagccggcgcaaggctacctcacggcggttcacctcggcttcgcgctcggcgagtgtggcgtcccattcccggcatgcctcttcccgcagccgtagctcttccgcgcggcggtccgcggaagctttcccagcgagggtgatccggtcacacttggctgcggcctcttcacgaaggcgaagggaggcctccacctccgccgccgttctcttgtgggcggccaaggtggactcccactgatctaacaggcgcgctcgctcctccaactcctgggcccgctgcgcctgttcctagccgcgcgcgttttgttcgcgctggccccggtcgaggaccacgatccgccgacggatcgtggcttcaaactcctgtgcggagcgggcacgatcatccaaagccctgcattcagcctcgagtgccgccgtccgggcaaggcggatgtcgcccagctcttcatccaggacgctcgaggcaatcagcgccgcatgctgctcctcctccgtctcccgcatgacggagtccagcgcctggatttcggctagttgggtctggcgcattttgcgccctaacctcaccatatcgtccacggcgcggcacccctcgtcaactcgcgcgtggttcgcagcgagttgtgcccactctgcgtccacagccgttcgctctttcgctagggcttggacttggacgttgagcccctcccgaacagtggagtcggcggcggcgagcaccgcgaggctgcgaagaccccgcggccttggattggccgggcccggaccactccgatcgttcggatttcgtcccccgcgaagggtccgaccctgagactccctgtggggagggcggttgaaagtccacttcgggggctcgatgaagctccctcggcacggctctgtttgccctatcttccggagccgtttcttcttccgtccgacctcgggcccggcaggtcgcttgtggcccgctggcggacgatctatcgcgcgctcggcgcccccgccgccaccacccgcgccgacggtgctaccactggcgctgcctcggctgggctggctcctaccggcaccgacaaccgacatcacagccaagatgctctcccagtcgcggtcgcagcagagggggaggatcccatctgggattagcgtttgctcggcggagtccaggcccagcacccgccggatcaccatcttcgcgtcctcctcccccctgtcccagcgctcgcccacatgcatgcgcatggggtcgttgggaccagtgtattcccacgcgccacgggatcgttcctggagaggtgcgatgcggcggcgaaagtaaacgccaaagaccattgcccccgtgaggcccaggcttcgtaggcccctgaggcgatcccacaccgtgtcgtattcctcgcccagctccgaaaccgccagccatgcggcggatctttcaggaggaccagcaggaactcgaagtcgcgggtggtctggcaatgcggtgtagaaccagtccttcttccaatcctcccatttcttgcggagatgactctcgatgtactgccccgccgtgcctggtcgcggctggaagtagcatccccccaccaccgcaccttgcagcagctgcgggatgaagaaggcttggaacagctgcatcgtcggccgtaccccgatgaacatctcgcacagatgcgcaaagatggccagcgtcatcactgcgttgggtgcgagatgcaaggcatggatttcgtagaaatccagaacctcatggaagaatctggagaacggcggaatcaagccgccatggcgaaggacaacaggtgcacggatcgctccggatatcgcggccacgattcccccgccctcacaacggcgccatccggcatgatcttgcgggggaggctaaggtgcctatctaccgtaatgcgggaagaagggagcactgtgtcgccagcatcttgagccat

SEQ ID NO: 70744 - DNA, 253 bp, Oryza sativa
  Clone ID: PAT_MRT4530_71286C.1
tttgttttttttttttttttgggtttttttttttttttaaaatttttttgttttttttttgaagacaattaacttgttaaaaacccgatattctggtggaaactactaggtaaaaaacctaggccttccgcgattacaagagaagatcctacaaagcactaatttaagaacggtcctagggttcagggttattggggggggaaaaggaaaaggggaaggcaacgggacctgggtcaaggaacagatttcttag

SEQ ID NO: 70745 - DNA, 3033 bp, Oryza sativa
  Clone ID: PAT_MRT4530_71287C.1
atggctcaagatgctggcgacacagtactcccttcttcccgcattacggcagacaggcaccttagtctcccccgcaagatcatgccggatggcgctgttgtgagggcgggggaatcgcggccacggcggcgatatccggagcaatccgtgcacctcttgtccttcgccatggcgggcttgattccgccgttctccagattcttccatgaggctctggatttctatgaaatccatgccttgcatcttgcacccaacgccatgatgacgctggccatctttgcgcatctgtgcgagatgttcatcggggtgcggccgacgatgcggctattccaagccttcttcatcccgcagctgctgcaaggtgcggtggtggggggatgctacttccagccccggccaggcacggtggggcagtacatcgagagtcatctccgcaagaaatgggaggactggaagaaagactggttctacaccgcgttgccggaccatccgcgacttcgagttcccactggtcctcctgaaagatccgccgcatggctggcggtttcggagcaaggcgaggaatacgacgcggaacgatcccgtggcgcgtgggaatacactggtcccaacgaccccatgcgcacgcatgtggacgagcgctgggactggggggaggaggacgcgaagatggtgatccggcgggtgctgggcctggactccgccgagcaaacactaatcccagatgggatcctccccctctgctgcgaccgcaaccgagagagcatcttggccgtgatgtcggttgtcggtgccggtaggagccggcccagccgaggcggcgccagtagtagcaccgtcggcgcaggtggcggtgacgcgaccgtgggcgggagccggacaagcggtccaggcggtggtggtggctcaagggcgcccggcctgagccgcggacccggagacgactcagccagcgacccaaaggggaagcggaagggagtctcagggtcggacccctcgcgggggacaaaatctgaacgatcggagcagtccgggcccggcaaatccagggccgcggggtcttcgcagcctcgcggtgggacccataggacacataccgggcccgatcccgagcgaccctcagccgggactcgacctgctgcgggcgacgatagcggcgacgtccctcccagaggcggctccgagaccagggtccatgtggagcgccacccgggatcagggggtgagggaggtcacagctcgagagtcgaaaccagaggtggtcctgagcccgaggttgaggtcgaggctgggggcggtcccgagctcgaggtcgaggtcgaggctaggggcggtcccgagcccgaggccgaggccgaatctactcgaggacccaaagcggggggcgagagggacagctgctcccccttgcgcttggggcgcctttggggctggtctcgcagaaggggggctgagagcagcccccagtctcacgggggatccagcagtaccccgtcgtcccggggccggaccgtggctttttcttccccgactccggcgagtatggagccacttctgcaggggcgccgcgccgtggacgacatagtgaggatagggcgcaaaatgcgccagacccaactagccaaaatccagccgcgcgaggaggcactggactccatcatgcgggagacggaggaggaacggcaggcggcgttgatcgcctcgagcgtcctggatgaagcgctgggcgacatccgcctccagtacgaggcttatgctgaggacttggcgaggaggatcagggacgctcgcggcattctcgacgcagccgctgcccacgagcggcgggcatcggaggccgacgcctcgctgcgggcccggacggcggcactcgaggctgaacgcagggccttggatgatcgtgcccgctccgcacaggagtttgaagccacgatccatcggcggatcgaggtcctcgaccggagccagtgcgaacaaaacgcgcgcggccaggaacaggcgcagcgggccaaggatctggaggagcgagcgtgcctgttagatcagcgggagtccaccttggccgtccatgagagaacggcggcggaggtggaggcctcccttcgccttcgcgaagaggccgcagctgagcgtgaccggatcacccttactgcgaaagcttccgcggaccaccgcgcggaagagctacggctgcgggaagaggcatgccgggagcgggacgccgcactcgccgagcgcgaagccgaggtgaaccgccgcgaggtagccttgcgccggctgggtgagcaactcacgaaacgtgaggaggctgttgccgggcgcgaggcccagcatctggagagcgctcgcgccgagcgtgcggcaatagtggtgaaggcttccgagttggaggcctgggagaaggacttggcagcaggcgggccgcccggcggcgcggggttggtgagccagctcgccatggctcagaataccctcgccgacctggagcgcctggtgcaagatcaggctggggagatcgcggccctctgcctcaccaacgagatcgggcccgggcaactctccgacgccgtcgaccggctggagagcgcggggcgccgagtcggcgtctctgtgtgtcgggatagcaaacttccgcccacacagccagcactcgcgcttcggctggacgggctggcggcggatctggagaggctagaggaggaggtcggcgagaccataaagtcgtcgtcagcttctttgtcccgggctgtggtggagctggtcctcgcaagccaccaagcgcgtgaccccgacttcgtcccatggcgcgcgctcgaagatttccccccgagaactgaggcaaaggcccgggagcaagtccgggaggcggccgacacgattgtctcgaacttcgagaggtcggccccccggttcaccttcgggcttgcctcggacgaggagagcggaagtgggggtgacgacaatgacgtgggcaacgaagactgggacgacgtcatcagcggcgccggcctcgggggcccgggcactccgtga

SEQ ID NO: 70746 - DNA, 2604 bp, Oryza sativa
  Clone ID: PAT_MRT4530_71288C.1
atggcgggcttgatcccgccgttctccagattcttacatgaagttctggatttgtacgaaattcacgccttgcatctcgcacctaatgccgtgatgacgctggccatcttcgcgcatttgtgcgagatgttcattggggtgcgaccgacgatgcggttgttccaggccttcttcatcccgcagctgctgcaaggcgcagttggtgggggatgctacttccagccccgaccgggcacagcgggccagggcttgtggagcctgggcctcatgggggcgatggtctttggcgattacttccgccgccacatcgcacctctccaggaacgatcccgtggagtgtgggaatacactggtcccaacgaccccatgtggacgcatgtgggcgagccctgggactggggtgaggaggacgcgaagagggtgattcggtgggtgttgggcctagactccgccgagccaacactaatccccgatgggattcttcccctctgctgcgaccgcgaccgggagagcatcctggccgtgatgttagccgtcggcgccggcaggagccggtccagccgaggcggcgccagcggtagcgccgtcggcgggggcggcggtggtgcgactgctggcggaagccgtgccggcggtccaggcggcggcggctcaagggcgcccggatcgagccgcggacccggaggcgattccgccggtgacccaaaggggaaacggaaggtgacctattcccgaccaccctctcccccgcgtgtagggggtgccgagcgcgcaacagatcgttcgctagtgggccacaaacgaccagccgagcccgagactaggcggaaaaggaagcggctccggaagatagggcaaacggagccatgccgggggagcttcatcgagcccccgaagtggaccttcaaccgccctccccgtagccaatccaaggccgcggggttttcgcagcctcgcggcggggcccagaggtcacacaccgggcccgatcccgagcgacccttaggaggaatccgacccaccgcgggcgacaggagtggcgacgctcgtctcgagggcagctccaggaccagggcccacgcggagcaccacccaggatcggggggtgaaggaagacgcggcccgggagccgaagccagaggtggccccgagcccgaggcaaaggctgaggccgagggcggtcccgagcccgaggcggaggttgaggccgaggccggtcccgagcctgaggtcgaggccgaggctgagggcggtcccgagcccgaggttgaggccgaggctgaatccacccgaggacccgaagtgggggccgaaatccaggcgcgcgaggaggcgctggactccgtcatgcgggagacagaggaggagctgcaggcagcgctgattgcctcaagcgccctggacgaagcgctgggcgacatccgcctccagtatgaggctcacgtcgaggacttggcgaagagggtcagggatgcacgcggcatcctcgacgcagccgctgcccatgagcggcgggcatcggaggccaacgcctctctgcgggctcggatgacggcactcgaggctgagcgcaaggccttggatgaccgtgctcgctccgcacaggagtttgaagccacgatccgtcggcggatcgaagtcctcgatcggaaccagcgcgagcaaaacgcgcgcagtgaagaacaggcgcggcgggcccaggagctggaggagcgagcgcgcctgctagatcagcgggagtccaccttggccactcacgagagaacggcggcggaggtggaggcttcccttcgcctccgtgaagaggccgcggccgagcgtgaccggatcaccgcgcggaagagctacggctgcgggaagaggcatgcagggaacgggatgctgcacttgccaagcgcgaagccgaggtgggccgccgcgagcacccgcgctgagcgcgcggcgatagcggtgaaggcctccgagctggaggcccgggagaaggacttgacagtgagcgggccgtccggcggcgcggagttggcgagccagcttgccacggctcagagtaccctcgccgacctggagcgcctggtgcaggatgaggatggggagattgcggccctccgcctcaccaacaagctcgggcccgggcagctctccaacgcagtcaaccggctggagcgcgcggggcgtcgagtcggcatctccgcgcgccgggatagcaagcttccgcccacacagccggcactcgcgcttcggctggacgggctggcggcggacctggagaggctggaggaggaggtcggcaaaaccataaagtgttcgtcggcttctttggcgcgggctgcggtggagctggtccttacgagccaccaagcgcgcgaccccgacttcgagccgtggcgtgcgcttgaagattttcccccatggaccgaagcaagggcccgggtgcaagtccgggaggcggccgacgcgatcgtctcgagcttcgaggggtcggccccccggttcacctccgggcttacctcagacgaggagagcggaagcgggggcgacgacggcgacgacgactgggacgacatcgttagtggcgccggtctcggggggccgggcactccgtga

SEQ ID NO: 70747 - DNA, 431 bp, Oryza sativa
  Clone ID: PAT_MRT4530_71289C.1
tttaatataaaaaaaaatatcattcaatggaacactaactgaaacccctactccccagccatactccccgacacataaaatacgtgatgaggacatcactccattggatatacacaacaatcctccaccggtcattaaaaaaccaattacaagagctcgcgcacgataattgaatttagagaggacaaagcgacgcttagagaaagacttagaggcgtggaaatcatcaagggcacccaaatcaatatggaggctcaaccaagtcgacttcgagtattattcggagtccaagactagtctgcactaaaacggacgcccagatcgcatacatgctcggattagggtgttctttatatggatggaaagctaagaagataacatttccaatggttctagtcccacgtccaaattcttttcaagtcaataggaat

SEQ ID NO: 70748 - DNA, 382 bp, Oryza sativa
  unsure (1)..(382): unsure at all n locations
  Clone ID: PAT_MRT4530_7128C.1
ttcaactgtagttcgatccttccaacctcctgcgtcatctgactagcttactgtgcgccatacagccagcggtccctacacacaggtaccacgtgtcttaggagactatcaccatgttcctttctgtgatcctacgatagatacacatgtacacgtcgaggctgctgtcaccacttgtagaagctgacagcaaagcaaatgtagcccgatcctgcctcctagctccagctttgaagtggtaatcaaggaatgtcttctgtactccttgatcacgtatggcttactctgtcattcactgtnaaattcggtcaactaaaaattggacagatcagaataaataataattgctatatcagagttcaatgaaaaaaaaaaaaaaaaa

SEQ ID NO: 70749 - DNA, 2676 bp, Oryza sativa
  Clone ID: PAT_MRT4530_71290C.1
atgcttgtccatagaagcattgagaaagatgtatttgagccacttgtgatgcgtatttctgaaattgcgcaacactattttgggacagtgggctcatctgaaactggtgagaagggtcctacagtgcctgaatttccagagaagatcaaatgggaagtgcaacatctcgaagaattgtttgagggcattaaagaagacaaggaggaggtctatgagggttttaagtctgttagccttgcaatctccgagtggcagagaagattggctatagcataccaaaatgcagctagagatcctcgaccttttgagggaatgaaatgggcaatggagtatcatgagatatatgtcaagactgcacaaggtggttcagaagctcatctcctggaaagtatcaagagtgggatgcagtgcataaagaatgtgttagccaccattcgatcaagaaaggaagcagacaacaggagctggtgcattgtggaacaggtcttctccccgctactgaaacttttgaaaactatcaatcatctagtatcagaagcggctgcccgcaacaacaagtctgagaactataagatccttgtcaagatcgatgctgaagtcaactgcttacaggatgcactagatttgattgatagaaataagaatgaggtttatgagaacttcagattaatagaagatctcatactaccattattaacattccttaaggccacatacaatgatcaatcagaatctttgagcttcctagatgcagtcaaacacggagtgaattacttggaaggtgtacttgacaagattgagcagaagcagcgggatggaaatgataatttccacattgtcaaagcagccttctcaccattgttgacatgcatgtacaccttcaggcgcatctcgttggaaaccttagcccatgaagataaatcagatgcttttattctgttggacaggatcagagatgatttgtcacagctcaaagatgtacttcagatggttcaagagaaagagaacggaatatacagtaactttgatgcaattgaagaacatattgatgagatttatgacggacatatgaatgttgaaggttccttaaaacttaaccagatgggtggtctgcgagacaagctccagttgattcatgaagagataacaaatatacggggaaaggtggatgactctttcaaggtccaggaggtctcatgccatgtcatgcgcatggctgcagcacatgaagcttcatcttctcatcagttgtcagcatcaaataccttctgcattaccatggaaagtgcgcagatgtggcagctcaaagttataattgatgaactagagacaagattgagacactgccttctatgccttgctgtgttcccagtggatgccatcatcaagaagagactgttaattcactggtggattggagaatgttttgtaacttcggtttctgaaggcaagagcttctttaataaattgctgctgtccaatgggttcattacgccagtaaagaaataccactgtgacaaagtccactcgtgcaaggtgcaaccttggatccgtgggctactgattgaagctgcaaagagcaaagcatttgttgagctcagttcagatggcagctccaggaatgactttaccaggacccgccgtgcatgcttgcatgctggaaagatccttacaaacttccatcctgatgttttgacgatttacaatatcaagcaacagtatgtagagttaaacaagacatggttttctgaaaagaaccgtttgaccactttgcagttaggacaatggcacgatgcaagttatgaccctcgggcacatcacgttgagattaacaatgccaagttcctaaagcaggtcaaatcctgcaagcagttgaagtacctgagtttgagaggcatatcaagaattgaggcccttccgaactcaattggaaagctctcaagacttgtcattcttgatctcaaagcgtgccataatctagaggatcttcctaaagaaatagtaaaactagtgaagctggagtacttggacgtttctgattgttacctgctctcaggtatgcctaaaggactaggcaagctttttcaacttgaagttctgaagggatttgttctatcaaacgccaagagcaaagatctatgccatctcaatgaacttgtcatgctaaaaaagttacgaaagctgagcattagaattggttatagcatagatagcggtcagtttgcgaattttggtgagctctgtgctctccggtcgcttacacttatttggggggcacacccaatatctacacacgggagttctccaagtcatgctgctcctcatgcaatgccttgtgttctccccttaggtcttgagaagctggagctccgttgttttccccttgtagaattgcctcactgggttagtcctgaaaagctgagaaaattgaagaagctctacatcagcggaggtaacatcagtgacctgggtgatttgaagtcctgggaggtgactgtacttcggctaaggttcctcaaacatatgaactattcatggactgccctgcatgattcattcaggaaactcgatgttttggaggcacatgaatgtgaaaatctacagccctggccttcctgcggaaaagggttatggcggaaagaaccgaatggaacgattgcacctgtgttgacctga

SEQ ID NO: 70750 - DNA, 2415 bp, Oryza sativa
  Clone ID: PAT_MRT4530_71291C.1
atggctcaagacgccagcgacacagtgctcccttcctcccgcatcacggcagacaggcaccttatccttccccacaagatcatgccggatggtgccgtcgtgcgggcgggagagtcgcggccgcggccacgatatccggagcgatccgtgcacctcttgtccttcgctatggcgggcttgattccgccgttctccagattcttccatgaggttctggatttctacgaaatccatgccttgcatctcgcacccaatgccgtgatgacgctggccatctttgcgtatctgtgcgagatgttcatcggggtgcgaccgacgatgcggttgttccaggccttcttcatcccacagctgctgcaaggcgcggtggtggggggatgctacttccagccccagccaggcacagtgggtcaatacatcgagagccatcttcacaagaaatgggaggactggaagaaagactggttctacactgcgttgccggaccatccgcgacttcgagttcccgctggtcctcctgaaagatccaccgcatggctggtggcttcggagctgggcgaggaatacgacgtggtttgggatcgcctcaggggcctgcgaagcctgggcctcatgggggcgatggtctttggcgattacttccaccgccgcatcgcacctctccaagagcgatcccgtggcacgtgggaatacactggtgaggaggacgcgaagagggtgattcggcgggtgctgggcctagactccgccgagccaacactaatcccagatgggattcttcccctctgctgcgaccgcgaccgggagagcatcctagccatgatgtcagctgtcggtgccagctggagtcggtccagccgaggcggcgccagcgatagcgccgtcggcgcgggtggcggtggtgcgaccgcgggcgggagccggaccagcggtccaggcggcggtggctcaagggcgcccggcccgagccgcggacccggagacgactcggccggtggcccaaaagggaagcggaaggtggccgagtcctggccaccctctcccccgcgtggaggaggttccgagcgcgcgacagatcatccgccagcgggccacaagcgacctgccaggcccaaggccagacagaaaaagaagcggctccggaagatagggcaaacggagccgtgccgagggagcttcattgagcccctgaagtggatcttcaaccgccctccctgcagcctcgcggtgggacccaaaggacacataccggacacataccggacacgtactcgacctgccggggacgacggtggcggcgacgtccctcccgagggcggctctaagaccagggtccatgcggagcgccacccaggatcggggggtgagggaggtcgtagctcgggagccgaaaccggaggtggtcctgagcccgaggttgaggtcaaggctgagggcggtcccgagcccgaggtcgaggccgaggctgggggcggccccgagcccgaggcccaggctgaatccactcgaggaccccaagcggggggcgagagggacagccgctcccccttgcgcttggggcgccctcggggctggtctcgtagaaggggagccgagagcagcccccagtctcgcgggggatctagcagtaccccgtcgccccgggggcggaccgcggccttttcttccccgactgcggagagtatggagccacttctgcaggtgctcgccgccgccgactccactgtacaagaggggctcaacgcccaagttcaagcccgggcggaagagcgaacggccctggatgcagagtgggcacagctcgctgcggaccgcgcgcgagtcgatgaggggcgtcgcgccgtggacgacatggtgagggtggggcgcaaaatgcgccaaacccaactagccgaaatccaggcgtgcaaggaggcgctggattccgttatacgagagacggaggaggagcggcaggcggcgctaatcgcctcgagtgccctggatgaagcactaggcgacatccgccttcagtatgaggcccacgccgaggacttggcaaagaggatcagggacgcgcgcggcatcctcgacgcagccgctgcccacgagcggcgggcatcggaggccgacgcctcgctgcgggcccggacagtggcactcgaggctgaacgcagggccttggatgattgtgcccgctccgcacaggagtttgaagccacgatccgttggcggatcgaggtcctcgaggtcatcatgccatggtgcgcgctcgaagattttcccccgaggaccgaggcaagggcccgggagcaagtccgggaggcggccgacgcgattgtctcgaacttcgaggggtcggccccccggttcacctttgggctcacctcggacgaagaaagcggaagtggaggtgatgacggcgacgatgactag

SEQ ID NO: 70751 - DNA, 2757 bp, Oryza sativa
  Clone ID: PAT_MRT4530_71292C.1
atgcttgtccatagaagcattgagaaagatgtatttgagccacttgtgatgcgtatttctgaaattgcgcaacactattttgggacagtgggctcatctgaaactggtgagaagggtcctacagtgcctgaatttccagagaagatcaaatgggaagtgcaacatctcgaagaattgtttgagggcattaaagaagacaaggaggaggtctatgagggttttaagtctgttagccttgcaatctccgagtggcagagaagattggctatagcataccaaaatgcagctagagatcctcgaccttttgagggaatgaaatgggcaatggagtatcatgagatgtgggttgaagacaataatataataggagctggtgatgagatattggattttgatgaacatgagctttttgaatcacttagatatgtcaagactgcacaaggtggttcagaagctcatctcctggaaagtatcaagagtgggatgcagtgcataaagaatgtgttagccaccattcgatcaagaaaggaagcagacaacaggagctggtgcattgtggaacaggtcttctccccgctactgaaacttttgaaaactatcaatcatctagtatcagaagcggctgcccgcaacaacaagtctgagaactataagatccttgtcaagatcgatgctgaagtcaactgcttacaggatgcactagatttgattgatagaaataagaatgaggtttatgagaacttcagattaatagaagatctcatactaccattattaacattccttaaggccacatacaatgatcaatcagaatctttgagcttcctagatgcagtcaaacacggagtgaattacttggaaggtgtacttgacaagattgagcagaagcagcgggatggaaatgataatttccacattgtcaaagcagccttctcaccattgttgacatgcatgtacaccttcaggcgcatctcgttggaaaccttagcccatgaagataaatcagatgcttttattctgttggacaggatcagagatgatttgtcacagctcaaagatgtacttcagatggttcaagagaaagagaacggaatatacagtaactttgatgcaattgaagaacatattgatgagatttatgacggacatatgaatgttgaaggttccttaaaacttaaccagatgggtggtctgcgagacaagctccagttgattcatgaagagataacaaatatacggggaaaggtggatgactctttcaaggtccaggaggtctcatgccatgtcatgcgcatggctgcagcacatgaagcttcatcttctcatcagttgtcagcatcaaataccttctgcattaccatggaaagtgcgcagatgtggcagctcaaagttataattgatgaactagagacaagattgagacactgccttctatgccttgctgtgttcccagtggatgccatcatcaagaagagactgttaattcactggtggattggagaatgttttgtaacttcggtttctgaaggcaagagcttctttaataaattgctgctgtccaatgggttcattacgccagtaaagaaataccactgtgacaaagtccactcgtgcaaggtgcaaccttggatccgtgggctactgattgaagctgcaaagagcaaagcatttgttgagctcagttcagatggcagctccaggaatgactttaccaggacccgccgtgcatgcttgcatgctggaaagatccttacaaacttccatcctgatgttttgacgatttacaatatcaagcaacagtatgtagagttaaacaagacatggttttctgaaaagaaccgtttgaccactttgcagttaggacaatggcacgatgcaagttatgaccctcgggcacatcacgttgagattaacaatgccaagttcctaaagcaggtcaaatcctgcaagcagttgaagtacctgagtttgagaggcatatcaagaattgaggcccttccgaactcaattggaaagctctcaagacttgtcattcttgatctcaaagcgtgccataatctagaggatcttcctaaagaaatagtaaaactagtgaagctggagtacttggacgtttctgattgttacctgctctcaggtatgcctaaaggactaggcaagctttttcaacttgaagttctgaagggatttgttctatcaaacgccaagagcaaagatctatgccatctcaatgaacttgtcatgctaaaaaagttacgaaagctgagcattagaattggttatagcatagatagcggtcagtttgcgaattttggtgagctctgtgctctccggtcgcttacacttatttggggggcacacccaatatctacacacgggagttctccaagtcatgctgctcctcatgcaatgccttgtgttctccccttaggtcttgagaagctggagctccgttgttttccccttgtagaattgcctcactgggttagtcctgaaaagctgagaaaattgaagaagctctacatcagcggaggtaacatcagtgacctgggtgatttgaagtcctgggaggtgactgtacttcggctaaggttcctcaaacatatgaactattcatggactgccctgcatgattcattcaggaaactcgatgttttggaggcacatgaatgtgaaaatctacagccctggccttcctgcggaaaagggttatggcggaaagaaccgaatggaacgattgcacctgtgttgacctga

SEQ ID NO: 70752 - DNA, 843 bp, Oryza sativa
  Clone ID: PAT_MRT4530_71293C.1
tcatccgaggtatgtccggaggtgaaccggggggccgacccctcgaagctcgaaacaatcatgtcggccgcctcccggagttgctcccgggcccttgctctcccggtcgcgatcgcagcagaggggaagaatcccgtcggggattagtgttggctcggcagagtccaggcccagcacccgccgaatcaccctcttcgcgtcttcctcaccccagtcccagcgctcgcccacatgagtccgcatggggtcattgggaccggtgtattcccacgctccacgggatcgttcctgaagaggtgcgatgcagcggcggaagtaatcgccaaagaccatcgccccagtgaggcccaggctccgcaggcccttgaggcgatcccacaccgcgtcatattcctcgcccagctcccacgtcgccagccatgcggcagactggcccgctgtgcccggtcggggctggaagtagcattcccccaccactacgccttgcagcagctgcgggatgaagaaggcctggaaaagccgcatcgtcggtcgcaccccaatgaacatctcgcacaaatgcgcgaagatggccagcgtcatcacggcattaggtgcgagatgcaaggcgtgaatctcgtagaaatccagaacttcatggaagaatctggagagcggcgggatcaagcccgccatggcgaaggataagaggtgtacgaaccgctccggatatcgcggccgtggccgcgactctcccgcccgcacgacgacaccttccggcatgatcttgcgaggaaggctaaggtgcctgtctgccgtgatgcgggaggaagggagcactgcgtccccggcgtcttgggccat

SEQ ID NO: 70753 - DNA, 383 bp, Oryza sativa
  Clone ID: PAT_MRT4530_71294C.1
gtggggaatagagaggatggacatactgggtctgccgttggagttcgccggagtggaggccctgccgtccgcgtcgcccccatcaggactgcgctcgcgccgctgctccttgctcgcattgcctgccaccgtcacgatgcgcgcggccgccgcgggcctcctccgcccttcgcccacctgccgccggctgcctcctccccgaccatctgcgcccctcgcccgcccggctgctcgcctccaccgccgcctcgtgccagctcggccgccctgctgccgccgtcgcccacgccgagaggagaggagaggagagctgcggcagtcggcagaagagagaaggggaaagaatggagaagagtgtagaaaggagcagagagaaaagaatg

SEQ ID NO: 70754 - DNA, 1755 bp, Oryza sativa
  Clone ID: PAT_MRT4530_71295C.1
atggcccaagacgccggcgacgcagtgctcccttcctcccgcatcacggcagacaggcaccttagcctccctcgcaagatcatgccggaaggtgccgtcgtgcgggcgggagagtcgcggccgcggccgcgatacccggggcggtctgtgcacctcttgtccttcgccatggcgggcttgatcccgccgttctccagattcttccatgaagttctggatttctacgagattcatgccttgcatctcgcacctaatgccgtgatgacgctagccatcttcgcgcatttgtgcgagatgttcattggggtgcgaccgacgatgcggttgttccaggccttcttcatcccgcagctgctccaaggcgcagtggtggggggatgctacttccagcctagcccgagcacagcgggccagtacattgagagccacctccgcaagaaatgggaggactggaagaaggactggttctacaccgtgttgccaggaccatccgggacttcaagttcccgctggccctcccgaaaggaacgatcccgtggagcttggaaatacactggtcccaacgaccctatgcggacgcatgtgggcgagcgctgggactggggtgaggaggacgtgaagagggtgattcggccggtgctgggcctagactccgtcgagccaacactaattcccgatgggattctttccctctgctgcgaccgcgaccgggagagcatcctggccgtgatgtcagccatcggcgccgacaggagccggtccagccgaggtggcgccagtggtagcgccgtcggcgggggaagtagtggcgcgaccgcgggccggagccgtgccggcggttcaggcggcggtggctcaagggcgcccggatcgagccacgaatctggagacgattccgccggcgacccaaaggggaaacggaatctgcacgggatgaaagcagaaggggctgcagagaagacatgtcaggcgcgttttgatcagctctcgcccaatctttcaaagaagaggatccattctttgcaggaggacctgcctgccggtcagtttgcttcaggtgaacaactcacagatgaagaggttgtagagtctgcacatacagagcaagtgcatcttgctcagctctcgcccagtccttcaaggaagagggcccgtctcagtcagtttgctccaggtgctcttccactcactgcactagaggaagaagactctcctaatattgactttctggatggtttgccccaacatgctgaggctgtagccatgacgcctgtgaggtacgaaaaatcaaaaaggaagaagtcttcgaaattggttaaatgtttatatgaacaggacagatctgcaagtgatgagcgtttttggtccattgagcatatggttttatacaacaatatttttagcaagaagcaatgtgctgataacaaatggattgattggaaaaatatcagagatttaccggcgatgccatatgttgaggaagcatgtcgtgacgttggtcttcatgaattgatggctataaaacagaactggcatgaagagctgatcaaacagttctactccacattgtccataaatgaaagtaggacctcgctgacatggatgacaggcagaaataagaagattactgtcactaagagattttgtcagaaggttctacttgttccgtctgagcacgttactaagattaagcatttgactgatgcacaagaagaagagttgaagagtgcagatggcaatcaagtaatagtataa

SEQ ID NO: 70755 - DNA, 123 bp, Oryza sativa
  Clone ID: PAT_MRT4530_71296C.1
acctcccacgcgaccggctgggcatttatcaactgcataagaacggacagagctgacagccctcaaatgcacatctacttttgatgatgtcagacgcatctagtattgccagtttgggtgatt

SEQ ID NO: 70756 - DNA, 3459 bp, Oryza sativa
  Clone ID: PAT_MRT4530_71297C.1
atggcccaagacaccagcgacgcagtgctcccttcctcccgcatcacaacagacaggcaccttagccttccccgcaagatcatgccagacggtgccatcgtccgggcgggagagtcgcggtcgcggccgcgatattcggagcgatccgtgcacctcttgtccttcgccatgacgggcttgattccgccgttctccagattcttccatgaggttctggatttctacgaaattcatgccttgcatctcgcacccaatgccgtgatgacgctggccatctttgcgcatttgtgcgagatgttcattggggtgcgaccgacgatgcggcacggtggtgggggatgctacttccaaccccggccaggcacagcgggtcagtacatcgagagccatctccgcaagaaatgggaggactggaagaaggattggttctacaccgcgttgccggaccatccgcgacttcgagttcccgctggccctcctgaaaggtccgccgcatggctggcgacttcggagctgggcgaggaatacgacgcggtgtgggatcgccttaggggcctgcggagcctgggcctcacgggggcgatggtctttggcgattacttctgccgccgcatcgcacctcttcaggaacgatcccgtcgagcgtgggaatacattggtccaaacgaccccatgcggacgcatgtgggcgagcgctgggactggggtgcggaggacgcgaagatggtgattcggcgggtgctgggcctagactccgccgagccaacactaatcctagatgggattcttcccctctgctgcgaccgcgaccgggagagcattctggccatgatgtctgtcgtcggcgccggtaggagccggtccagccgaggcggcgccagcggtagcgtcattggcacgggtggcggtggtgcgatcacgggcgggagccgggccggcggtctaggcgacggtggttcaagggcgcctggattgagccgcggacccggagacgattccaccggcgacccaaagggaaaacggaaggtggcctattcccggccgccctctcccccgcatagaggaggtgccgagcgtgcagcggatcgttccccaacaggccacaagcgacctgccgggcccgaggctggtcagaaaaagaagcggctccggaagatagggcaaacggagccataccgggggggcttcatcgagcccccaaagtggaccttcaaccgccctccccgtagcgagattccttctcagggaatctcagggtcaaaccccccgcaagggacacgcaccgggcccgatcccgagcgaccctcaggcgggacccatcctgctgggggcggcagaggtggcgatgctcctcccgggggcggctccgggaccagggtccacgcggagcaccacccaggatcagggggtgaaggaggtcgcggactgggagtcgaagccggaggtggtcccgagcccgaggttgaggtcgaggctgggggcggtcccgggcccgagatcgaggccgaggccgggggcggtcccgagcccgaggttgaggtcgaggctgagggcggtgccgggctcgaggccgaggccgaggctggggacggtcctgggcccgatgccgaggccgaagccgggggcggtcccgagcccgaggttgaggtcgaggctaggggcggtcccgagcccgagcccgaggccgaggctgaatccactcgaggacccgaagcggggggtgagagggatagccgttcccccttgcgcttggggcgccctcgaggctggcctctcaaaagggggggccgagagcagcccccagtctcgcgggggatccagcagtaccccgtcgtcccgggggcggaccgcggccttttcctccccgactccggcaagtatggagccacttctgcagaggggctgaacacccaagttcaagccctggcggaagagcgggcggccctggatgcagagtgggcacaactcgccgcggaccgcgcgcgagtcgacgaggggcgtcgcgccgtggacgacatggtgagggtggggcgcaaaatgtgtcaaacccaactagccaaaatccaagtgcgcgaggaggcactggactccgtcatgcgggaggcggaagaggagcggcaggcggcgctgatcgcctcgagcgtcctggatgaagcgctaggcgatatccgccttcagtacgaggctcacgccgaggacttggcaaagaggatcagggacgcgcgcggcatcctcgacgcagccgctgcccatgagcgacgggcatcggaggccgacgcctcgctgcgggcccggacgacggcactcaaggctgaacgcagggccttggatgatcgtgtccactccacacaggagtttgaagccacaatccgttgccggatcgaggtcctcgatcgaaaccagcgcgagcaaaacgcgcgcggtgaagaacaggcgcagcgggcccgggagctggaagagcgagcgcgcctgctagatcagcgggagtccaccttggccgcccatgaaagaacggcggcagaggtggaggcttcccttcgcctccgtgaagaggccgcggccgagcgtgatcggaccaccctcgccgcgaaagcttccactgaccgccgcgcggaagagctgcggctgcgggaagaggcatgccgggaacgggatgccgcactcgccgagcgcgaagccgaggtgaatcgccgcgaggtagccttgcgccggctaggcgagcaactcgcgaaacgcgaggaggccattgccgggcgcgaggctcatcatctggagagcgcccgcgccgagcgtgcgacaatatcagcgaaggcctccgagctggaggcccgggagaagatcttggcagcgggcgggccgcccggcggcgcgggtttggcgagccagctcgccatggctcagagtaccctcgccgacctggaacgcctggtgcaggatcaggctggggaaattgcggccctccgcctcaccaacgagctcgggcccgggcaactctccgacgccgtcgaccggctggagcgcgcggggcgccgagtcggcatctccgtgcgtcgggacagcaaactcccgcccacacagctagcactcgcgcttcggctggacgggctggcggtggacctggagaggctagaggaggaggtcggcgagaccataaagtcttcgtcagtttccttggcacgggctgcggtggagctggtcctcgcgagccaccaagcgcgcgaccccgaattcatgccgtggcgtgcgctcgaagattttcccccgggtaccgaggcaagggcccgggagcaagtccgggaggcggctgacgcgattgtcttgagtttcgagggggcggccccccggttcacctctgggcttacctcggacgaggaaaacggaagcggggatgacaacggcgacgacgactgggacgacatcgtcagtggcgccggcctcagggggccgggcactccgtga

SEQ ID NO: 70757 - DNA, 942 bp, Oryza sativa
  Clone ID: PAT_MRT4530_71298C.1
atggcccaagacaccgatgacgcagtgcttccttcctcctgcatcacagcagacaggcaccttagccttcccttcaagatcatgccggacggtgccatcatgcgggcgggagagtcgcggccgcggccgcgatatccggagcgatccgtgcacctcttgtccttcgccatgacgggcttgattccgccgttctccagattcttccatgaggttctggatttctacgaaattcatgccttgcatctcgcacccaatgccgtgatgacgctggccatcttcgcgcatttgtacgagatgttcattggggtgcgaccgacgatgcggttgttccaggccttcttcattccacagctgttgcaaggcgcggtggtggggggatgctacttccaaccccggccaggcacagcgggtcagtacatcgagagccatctccgcaagaaatgggaggactggaagaaggattggttctacaccgcgttgctggaccatccgcgacttcgagttcccgctggccctcctgaaaggtccgctgcatggctggcgacttcggagctgggcgaggaatacgacgcggtgtgggatcgccttaggggcctgcggagcctgggtctcacgggggcgatggactggggtgcggaggacgcgaagatggtgattcggcgagtgctgggcctagactctgccgagccaacactaatcccagatgggattcttcccctctgctacgaccgcgaccgggagagcattctggccgtgatgtctgccgtcggcgccggtaggagccggtccagccgaggcggcgccagcagtagcgtcgtcggcacgggtggcggtggtgcgaccacgggcgggagccgggccggcggcaagaccatcgccctgctggagccgcccagcgggactggccagaccgaggctgcgacgaccgggggtcggggatga

SEQ ID NO: 70758 - DNA, 291 bp, Oryza sativa
  unsure (1)..(291): unsure at all n locations
  Clone ID: PAT_MRT4530_71299C.1
tcgtccacgcgttcgtccacgcgttcgtccacgcgttcgtagatcgcgagcggccgcggtttttttttttttttttttttttttttttttttngaagataaaatgtggagatatgcctgtctattttaatataataaaaaaagaagctttccatgttaactattctagataaaaacttttcgcatttacatgccatatggccagcttattggcatgcatgtgtgcacatttgttttgtgaggacagagaagagaaacattttccaaaatttttttttgcacagtttccatt

SEQ ID NO: 70759 - DNA, 813 bp, Oryza sativa
  Clone ID: PAT_MRT4530_7129C.1
atggagcacctcctgctccctctcctcccccaccgcccctcccaacccctcctcctcctcctccgccatcgccgccgcccatccatcccccgggcatcatccggcgacccctcccccaccgcggccgatgctccgacggacgctcagtccgccacgcctccctcctccggcgccaagcccaccggcgtcaagaaccgcctccgcgcgaggaaccaagctcgccgcgtccaggagttcactccgccggcgccgttggggatcaccatgaaatccaagtcgtcgtcgtcgtcgaggccggctgcgtcgaagtcgtcggcgtcggcttcggcttcggcggcgacgcgcagggagaagcagacgaggaggaaggagtgggaggagatgagcatggcggagaaggccggcgagctgtacgtcggggagaaggggctcctcttctggctcaacaagttcgcctacgcctccatcttcatcatggtcggcgcctggatcctcttccgcttcgtcggcccctccattggcctctaccagctcgacgcgccgccgctcgcgcccaccgatgtcttcgccggctcgccgtgagcgcgtcgccgggggcgtgttcttgattaccatcgagatcgagtactctactagattctaggtacctagtgtatagcagatgattaaggaaaatgtggatcatttggtcgaggaagccgaggatgtaaactagtgttgctgtgttggcgaagattggtcgaggaatcagaatgtataaattgcctgcacattttgaagttaaaatgtttgagataaaaaaaaaaaaaaaaa

SEQ ID NO: 70760 - DNA, 1050 bp, Oryza sativa
  Clone ID: PAT_MRT4530_712C.1
atttgctcctcgcctagctagcttgtctctcttccccggaggagaaaaaggaggagacgaagagagaattaattatctcggagatgagcggcggcggcgaaggggcggcggcggcggagaggcaggagctgcagctgccgccggggttcaggttccacccgacggacgaggagctggtgatgcactacctctgccggcggtgcgccggcctccccatcgccgtccccatcatcgccgaggtcgacctctacaagttcgatccatggcatctcccaagaatggcgctgtacggcgagaaggagtggtacttcttctcccctcgggaccgcaagtacccgaacgggtcgcggccgaaccgcgccgccgggtccgggtactggaaggccaccggcgccgacaagccggtgggcacgccgaggccggtggccatcaagaaggcgctcgtcttctacgccggcaaggcgcccaagggcgacaagaccaactggatcatgcacgagtaccgcctcgccgacgtcgaccgctccgcccgcaagaagaacaccctccggctagatgattgggtcctgtgccgaatctacaacaagaaaggcggcgtggagaagccgagcggcggcggcggcggcgaacgttcgaatatgatgagccacggggagaccgcgtcggcgggctcgccgccggagcagaagccggccgtgctgccgccgccgccaccgccgtacgcggcggcggcgccgttctcggagctggcggcgttctacgacgtgcggccgtcggactcggtgccgcgggcgcacggcgcggactcgagctgctcggagcacgtgctgacgacgtcggcgtcgtccggcggcgtcgtcgagcggccggaggtgcagagccagcccaagatcgccgagtgggagcgcacgttcgccggcgccgccgccccggctggcgccgtcagcacggccggaccgattctgggccagctcgaccccgccgccgccgtcgccggcggcggcgacccgctcctccaggacatcctcatgtactggggcaagccgttct

SEQ ID NO: 70761 - DNA, 2661 bp, Oryza sativa
  Clone ID: PAT_MRT4530_71300C.1
tcatcgagtgcccggccccccgaggtcggcaccacagacgatgtcgtcccagtcgtcgtcaccgtcattacccccgcttccgttttcctcgtctgaggtaagcccggaggtgaaccggggggccgacccctcaaagctcgagaccatcgtgtcagccgcctcccggacttgctcccgggcccttgcctcggtacccgggggaaaatcttcgagcgcatgccatggcatgaattcggggtcacgcgcttggtggctcgcgaggaccagctccaccgtagcccgtgccaaagaaactgacggagactttatggtctcgccgacctcctcctccagcctctccaggtccaccgccagcccgtccagccgaagcgcgagtgctggctgtgtgggcaggagtttgctgtcccgacgcaaagagatgccgactcggcaccccgcgcgctccagctggtcgacggcgtcggagagttgcccgggcccgagctcgttggtgaggtggagggccgcaattttcctagcctgatcctgcaccaggcattccaggtcggcaagggtactctgagccatggtgagctggctcgccaaccccgcgccgccgggcggcccgcccgctgccaagtccttctcccgggcctccagctcggaggccttcgctgatattgccgcacgctcggcgcgggcgctctccagatgacgagcctcgcgcccgacaacggcctcctcgcgtttcgcgagttgctcgcctaactggcgcgaggctacctcgcggcgattcaccttggcttcgcgctcggcgagtgcggcatccagttcccggcatgcctcttcccgcagccgtagctcttccgcgcggcggtccgcggaagctttcgcggcgagggtgatccgatcacgctcggccgcggcctcttcacggagccgaagggaagcctccacctctgccgccgttctctcatgggtggccaaggtggactcccgctgatcttgcaggcgcactcgctcctccagctcccgggcccgctgcgcctgttcttcaccgcgcgcattttgctcgcgctggtttcgatcgaggaccatgtcgtctacggcgcgacgcccctcgtcgactcgcgcgcggtccgcggcgagctgtgcccactctgcatccaaggccgtccgctcttccgccagggcttgaacttgggtgttcagcccctctcgtacagtggagtcggcggcggcgagcacctgcagaagtggctccatactcgtcggagtcggggaggaaaaggccgtggtccgtccccgggacgacggggtactgctggatccctcgcgagactgggagctgctctcggccccccttccccccgcttcgggtcctcgagtggattcagcctcggcctcggcctcgggctcgggaccgtccccggcctcggcctcggcctcaggctcgggaccacctccggcttcggctcccaggccgcgacctccctcaccccccgatccagggtggtgctccgcgtggaccctggtcccggagccgcccccgggaggagcgtcgccacccctgtcgcccgcagcaagacgggtcccgcctgagggtcgctcgggatcaggcccggtgcgtgtcctctgggtcccgccgcgaggctgcgaaaaccccacggccttggactggccgggcccacactgccccgaccgttcggatttcgtcccttgcaaggggtctgaccggggagggtggttgaaggtccactttgggggctcgatgaaacccccccggcatggctccgtttgccctatcttccggagccgcttctttttctgaccagcctcgggcccggcaggtcgcttgtggcccgctggcgaatgatccgttgcgcgctcggcacctcctccatgcgggggagagggcggccggggataggccacctttcgcttcccctttgggtcgccggcggaatcgtctctgggtccgctgctcgatccaggcgcccttgagccaccgccgcctggactgccggcccggctcccgctcaaggtcgcaccaccgccacccgtgccgacggcgctacagctggcgccgcctccgctggaccggctcctaccggcgccaacggctgacatcacggccaggatgctctcccggtcgcggtcgcagcagaggggaagaatcccatctgggattagtgttggcttggcagagtctaggccaagcacccggcgaatcaccctcttcgcgtcctcctcaccccagtcccagcgctcgcccacatgcgtctgcatggggtcgttgggaccggtgtattcccacgctctacgggatcgttcctgaagaggtgcgatgcggcggcggaagtaatcgccaaagaccatcgcccccgtgaggccaaggctccgcaggcccctgaggcgatcccacaccgcgtcgtattcctcgcccagctccgaagtcgccagccatgcggcagacctttcaggagggccagcgggaactcgaagtcgcgaatggtccggcaacgcaatgtagaaccagtccttcttccagtcctcccatttcttgcggagatggctctcgatgtactgacccgctgtgcctggccggggctggaagtagcatccccccaccaccgcgctttgtagcagctgtgggatgaagaaggcctggaacaaccacat

SEQ ID NO: 70762 - DNA, 117 bp, Oryza sativa
  Clone ID: PAT_MRT4530_71301C.1
atggatgtatcaagagggtttgcaataccgctggctggttacctcaattaccgtgggggtccgttaagggtaaccggcggaaaatgtaaaaagctcaggaaaaaatcatggaaatag

SEQ ID NO: 70763 - DNA, 437 bp, Oryza sativa
  Clone ID: PAT_MRT4530_71302C.1
tttttggtttttttttttttttttttttttttttttttttttttttttttttttggaacaagccaaaccaaactggaattaattaatatccggccaaatatccataaaatagtcgctcaagtttggagggggggggatatagggtttgataatcattatttttagcaaggagttctgcgctccgggagactcccccagtttatggttcacacaaacccacaggcagttagtcattgtcgtaaaggaccctccggcgcctttgaaaggtaactttcgtctgtttgctagggggggtattgatttgccccaaaagggagataagccttttttaaaacccctttttagatatttccaccggactgggcagtttttaaaagaacatcctccaccccttttggtttatagggttggaccaaagttttgcgggagagcctttt

SEQ ID NO: 70764 - DNA, 1473 bp, Oryza sativa
  Clone ID: PAT_MRT4530_71303C.1
atgggcacggcgccggcgccggcgcacgtcctcgtgttcccgtggccgattcagggccacctcaacgtcatgctccacctcgccgtggcgctcgccggcgccggcgtccacgtcaccttcctccacaccgactacaacctccgccgccttggcgccgccgccgccgccgcggtggcctcgccatggctccggttcatgtccgtcacggacggcctccccgacgaccacccccgcacggtggccaacctcggggagatcagccgctccctccatacggctggccgcgccgcgtaccgtgctctgctcgcctcgtcgtcgcagctggtccccgcggacgcagctggcggcggcgccttcccgccggtgaccaccgtcgtggcggacgccctcctgccgttcgccatcgacgtcgccgaggagctcggcgtgcccgcgctggccttccgcacggcgagcgcgtgtagcttcttggcgtacatgtccgtgccgaggcttgtcgagctcggcgagctgccgttccctccgggcggcgacctcgacgagccggtgcgtggcgttccgggcatggagggattcctacgccggcgagatctcccgagtccttgccgccatcacggtgccaacaacaacgacgacgccgcggccctgctgggacgtctggccgacgccgccgtgcactgcagcaaggcacgtgcgttgatactcaacaccgccgcgtcgctggaggcgccagcgctggcgcacatcgcgccgcgcatgcgcgacgtcttcgccgtcggtcctctccacgccatgtcgcccgccccggcggcggccaccagcctgtggcgcgcggacgatggctgcatggcgtggctcgactgccaagccgaccggtccgtcgtgtacgtcagcctggggagcctcaccgtcatctcgccggagcagttcacggagttcctgtccgggctcgtcgccgccggcaacccgttcctctgggtgctccggccggacatggtcacggcgaggcggcggcacgccgacctccaagaatctgtcacggcggcggcgggagacagcaaggcgcgcgtcgtggggtgggcgccgcagcgggacgtgctgcgccaccgcgccgtggggtgcttcctgacgcacgccggctggaactcgacgctggaggccgccgtcgagggcgtgccgacggtgtgctggccgttcttcaccgaccagcagatcaacagccggttcgtgggcggcgtgtggaggacggggctggacatgaaggacgtgtgcgacgccgccgtcgtggcgaggatggtgagggaggcgatggagtccggcgagatcagggcgtcggctcagtcggtggcgcggcagttgaggagggacgtcgccgagggtggctcgtcggcgatggagctgaagaggctcgtcggcttcatcggggagctcgccacgccaatccaacacgccaaatccgaatccgaagtgtag

SEQ ID NO: 70765 - DNA, 500 bp, Oryza sativa
  Clone ID: PAT_MRT4530_71304C.1
ggctagcaattcatgcagtattgttcactaagcatgcttaaatttattcaatcaaataataatacaaaaaaaactgaagagcactaactaaactgcctatcaaccaaagattctacatttgaaaatgaacaagggctacaaaatgtagaaacaggtcttaaaaaatacaaaagatttatcttggtgtaagtttctccagccatgacaagataatcccagctcctttatcccacgagcaatcaagcatcatatcatgggctatcccttcgatgcagactggttgcacattataaaatcttgcagtttctgaaagcccttcagcatcaacaatgaagtcactgctggcgcccacaacgaggatgtttactgtattatttggcacagaagctacaggcaatgatgcattgagcttccttaggtcaaatagtggtaactttgagctgtccttcattagcccttggtacctttggaccaggtcattatccatctctggcgagaaa

SEQ ID NO: 70766 - DNA, 951 bp, Oryza sativa
  Clone ID: PAT_MRT4530_71305C.1
atgctaaacactggtataccgtctcgacgggataggatagacaccaaccaatccactcttcttctacctagctattctttctacaacatctctctcacgtgtgctgctgcaactaagtcaacgacgagctccggtgtggcatgggtgtggatgacggaggtcgcggtcgccggcgacgagctccgacgcggccacccccgacgatcccccggcatcgcggacttcggcgacgagcttcagcgtggcgtgaggcacggacggcggaggacgtggctgcggcgacgagcccggcgtagggagcgacggcggaggacgtggctgccagcgatgtggtcgccggattgccgcctggagctccagcaccgccgtccgccatccacggcgccgccgttaacgcccacctccggctccatccgcgtggccggccggtatcatctgatacctcttaagtatcacctgatatgtggtagaatcgcatggatacctggtaggtatcaggacctgatacatcgcaagcatcatccacaacgtggtaagaatcgcatgatacctgataggatatcatttgtgaaacctgatgataccagacatgatacagatgaggatcatgatacctcccaggtatcatgcgattctaccacgtatcagatatcggacgattcctatcacgtatcagacgatactcgtgaggattctccgccgttcatgcgaccatgccccacgtcggagctcgccggcggccgcgtcctccacgctggagctcgtcgcaggcagccgcgtccttcacgccggagctcggcggcggccgccgcgtctgcgccaccggcgtcagcctcgtctgcgctgctcccatgggggcctgcgctctcgcatctgagggaggtggactgggagcgatcccgttgggacagtatcccaacgggataccggtatatagcagcccccaaataa

SEQ ID NO: 70767 - DNA, 1180 bp, Oryza sativa
  Clone ID: PAT_MRT4530_71306C.1
atggcctccgaggacggctgcggcggcggcaacccgccgggggacgcagcggccgcgccgccggtgtggaacgccgcacctgcggcgggagctggctgcggcgatctggaggaggacctccggttccagtgctgcgtctgcctggagcttctgtacaaaccagttgttattgaggatgagaagcgtgtggatacatattctccacaaatcattgagtttttaaactccaagagcaacaattgtgaaattgatggggagaatagacctgaagaaagtaatagtcgacctccacaagaagttacatctgatggcaacactatcaatgggcatccgaagaaagttaagctggaggacgtgtcatgtgctctttgtaaggagctgttgtatcaacctgctgttcttaattgtggtcatgtgtactgcatgtcctgtttgtcgtccttggatgatggtgcactcaaatgccaagtttgtggaggtcttcatccaggagattttcctaatgtttgcttggatttggaccattttatcgaagactattttccagcagaatatgacttaagacgagagaagattaagcttttgaagggtgaatgcaatcaaggatcatcttcaggtacttcatgcataaaagaaggcaggggtagaccaacaaataaggaaaaccgtgcacatcaggatgatgacttgtcagatgttcatattggggttggatgcgattcatgcgggatgtatccaatacgagggaagaggtacaaatgtaaggactgcactgaattaattggatttgacctctgcgaagaatgctacaatacaaaatcgaaacttccaggccggtttaatcagcatcatacccctgaccacaggatggaacttgatcattcagcactcttcaataggttgatgaggctacaagggatacacgaggagggcccaggagagataatcatagaaggtgcatttgttgctcctgacgctgtggtgcatataatagcagatgatcatgaggaaatcgaggataacggtgaggatgatcacttgctctagaaacgaatcagtggtattaaccctgaatttcggcattgtcctttctttaatgtggaggaggctacatgaatcatgaatggtactgtatgaaatggagggattgaacaaagcttgtaggcgtgtaacgcccata

SEQ ID NO: 70768 - DNA, 1215 bp, Oryza sativa
  Clone ID: PAT_MRT4530_71307C.1
atgcggccacccccgacaagcccccggcattgcggactcaggcgacgagcttcagcgtggtgtgaggcacggacggcggaggacgtggccgcggcgacgagcccggcatggggagcgacggtggaggacgcggccgccagcgacgtggtcgtcggattgccacctggagctccagcactgccgtccgccatccacggcgccgccgttaacgcccacctccggctccatccgcgtggccggccggggagcaaagagacaagatgggatgcaaagaacttgctaacttggttatggctggctgtggagtgtggtagaatcatcttctacgtggtgtcacatgatcctcccaaagtatcacctatgaaacctggtgaaaccggacatgatactaaggaggatcatcatacctcccaggtatcatgcgattctaccacgtatcagatatcggacgattcctatcacgtatcaggcgatactcgtgaggtatcatgtgatagctatcaggtatcatgtaatttctacgacgtatcgggggtgatacttgtgaggtatcatattcatatgatacctactagataccagaagttgggcatcaaggtgttgaggcatcgtcgccggcggccgcgtcctcccccgtcgacgctccacactgaacccgaacctcgtcaccggcagctgcatccgctcccgtccacggtccacatcggagctcgtcgccaacgaccgcgtcctttgtcgggagctcgtcaccggcggccgtgtccatcgtccacgcctcagccggtgtctgcgtcctccacaccggagctcgtcgccggtgccgccgccaccaccacgcaggatcctccgccgtccactccccacgccggagctcgtcgatggcgccgtctctgtcaccacgcaggattatctgccgtccatgtgaccatgctccacgccggagcttgccggcggccgcgtccttcacgctggagctcgtcgccggcagctgcgtcctctacgccagagctcggcggcggcggctgcgtccgcgccaccggcgtcagcctcgtctgcgctgctcccatggtggcctacgctctcgtgtctgagggaggtggactgggagcgataccgttgggacagtatcccaacgggataccagtggaccatggatcatcagagcctgggggcagcaggccagcagcatcggcgccatgccgccatggcaatgga

SEQ ID NO: 70769 - DNA, 2576 bp, Oryza sativa
  Clone ID: PAT_MRT4530_71308C.1
gcgcggaggcccgcggcgggggtcctctccgaacccgctcaaagctgaccgccacatagatagatgagactcctgagctgcccgcatggcgccaccattgcgcccccaccggcggccggagtcgtctcccaatccgacccaaggtgcggcgaccaccctcctgctcgcgtgggcccgagcagcccggccaagtggccgccgaaacccgctataaatcccccacgctccaccagcctccgattccacagcctacctagcttctccttctcgctcgcttcgcccgcataagtctagccacaaacccgccgccgccgccgccgccgccgccgctagcttccgcggagcggggcgagatgttcatcgagagcttccgcgtggagagcccgcacgtgcggtacggcgcggcggagatcgagtcggactaccagtacgacacgacggagctggtgcacgagagccacgacggcgcctcccgctggatcgtccgccccaagtccgtccgctacaacttccggaccaccaccaccgtccccaagctcggggtgatgctcgtggggtggggcggcaacaacggctcaacgctgacggctggggtcatcgccaacagggagggaatctcatgggcgaccaaggacaaggtgcagcaagccaactactatggctcactcacccaggcgtccaccatcagggtcgggagctacaacggggaggagatctacgcgcccttcaagagcctcctgcccatggtgaaccctgatgaccttgtgttcgggggctgggacattagcaacatgaacctggctgatgctatgaccagggcaaaggtacttgacattgatctgcagaagcagctcagaccttacatggagtccatggtgcctctccccggcatctatgaccccgacttcatcgccgccaaccagggatcccgcgcgaacaatgtcatcaagggcaccaagaaggagcagatggagcagatcatcaaggacatcagggagttcaaggaaaagagcaaagtggacaaggtggtggtgttgtggactgcaaacactgaaaggtacagcaatgtctgtgttgggctcaatgacacaatggagaacctcctggcgtctgtggacaagaacgaggcggagatatcaccatcgacactgtatgccattgcctgcgtcatggagggtataccgttcattaacgggagtcctcagaacacctttgtgcctgggctgatcgatcttgctattaagaacaactgcctgattggtggtgatgatttcaagagtggacagacaaagatgaagtctgtcttggttgatttcctagttggtgctggaataaagcccacctcaattgtcagctacaaccacttggggaataatgatggcatgaacctttccgcacctcaaacattccgatccaaggagatctccaagagcaatgtggtcgatgacatggtctcaagcaatgccatcctctatgagcttggcgagcatcctgatcatgttgttgtgatcaagtatgtgccgtatgttggagacagcaagagggcaatggacgagtacacctcagagatcttcatggggggtaagagcaccatcgttctgcacaacacctgtgaggactcactccttgccgcgccgatcattcttgatctggtgctccttgccgagctcagcaccaggattcagctgaaagccgagggggaggagaagttccattccttccatccagtggctaccatcctgagctacctcaccaaggcaccccttgttcctcctggcacaccagtggtgaacgccctggcaaagcagagggcaatgcttgagaacatcatgagggcctgcgttgggctggcccccgagaacaacatgatcctggagtacaagtgagggaggctgccgaggccgagcagccgtggcatgtggcaaagaggcgaatgggatggagcaagaaagacgtgattagctagctctaagaattgttttagcttctcttgtgatttttcggtctttcccattcttaaccttctgtgctttgtgtgagactcttatcgggctatgcaactagcagcagccttactatggtactggatgatgttatggagaatgttagctagttcccctctatttataacttattagtatcggagatttcagttcaaaaaaaaaaaaaaactgagcgttttattattttctcgccttgtaacataaccagttccccggcaaatcctgcgggggactggagctgtgcaggctgaataagaggcagaagatggccctcgcccaggtgttcggagcctcactgccggagcagttgaggagcaagctcgggtgatgattttgcctgccatttgtacctctgtgtaacactagttactagtagtagcgaccggcatggttaagctggttcctgatgtaacttgtcctgatccatttgtgttgtgagaactagataaattcgttgtgaagaggatggtaggagttttgcctgcctgctttcccatttcacgcataattcctttcgtctcaaaataactttatttattcataattttatttgtctctaaaaaaaaaaaaaaa

SEQ ID NO: 70770 - DNA, 545 bp, Oryza sativa
  Clone ID: PAT_MRT4530_71309C.1
atgctgaacaccggtataccgtcccgacgggataggatagacaccaaccaatccactcttcttctacctagctattctttctacaacatctctctcacgcgtgctgctgcaactaagtcaacgacgagctccggcgtggcatgggtgtggatgacggacgacgcggtcaccggcgacgagctccgacgcggccgcccccgacgagcccccggcatcgcggactccggcgacgagcttcagcgtggcgcacggacggcggaggacgtggccgcggcgacgagcccggcgtggggagcgacgacggaggatgcggccgacagcgacgcggtcgccggattgctgcctggagctccagcaccgccacccgccatccacggcgccgccgttaacgcccacctccggctccatccgcgtggccagccggtgcgccctccgccagcgccccaactctgtcgcgggccctctccagtcgtcgccttcgtcgctggccgctggccgtcgatcccgctgcgacaaagagacaagacggggtgcaaagagcttgt

SEQ ID NO: 70771 - DNA, 536 bp, Oryza sativa
  Clone ID: PAT_MRT4530_7130C.1
attataaatcaacctacagactccaatttctcggggtagtgagaactgctttcaaccaaatgatctggaagtcatgggcatcttctcccaagtgcaaattcttctcctggctcctggctagttatccaaaatagtgtatgaacagcgggcatattggaaaaagaagaatggcaaaactaaaaggtttgctagttatgttgtacggttgatgaatctacggttcatctgctggctaaatgctaaatgtagggttacaaagagagtgtggtcgaagatttagagatggactagcaaggaccttcagatagccaagtggaatgattgtcactcagtcgagcacctcacaaccctcgccaacccctcaaccctagtgatcctagtttcccgagaaatctggtgtgagcgaatgcaagaacttttcgccacaaatgtagcaatgctggcctcgatactagccaagatcaaggaagaagtagcagcatgggtgaaagagagccggtaggctccgggagttcggaattttggaagatattgcc

SEQ ID NO: 70772 - DNA, 308 bp, Oryza sativa
  Clone ID: PAT_MRT4530_71310C.1
gtccaagatattgatgactgacatggataggcttgatttgttttgttcacattcatattggtggtgtcgatcgctttctgatgttagatgcagcagctcagaggtgcggcacatttgattttgtttttttattgagccagcaagctaatatgactaatgtgacagtgtcaacttagaaattaggcaggtaaatacaccctcaacttctgtatgtaaaagatgtggtgtaccctacccccctcttttctatttccttgttatgttgtatattgggatgtaaaacaactaaaccccagcttatatcagag

SEQ ID NO: 70773 - DNA, 526 bp, Oryza sativa
  Clone ID: PAT_MRT4530_71311C.1
atgggggatgaatgggagacccggatggctgcagacaagccagaggtaaacaaacaggccatttggtcggacatctccatggatgttgttgagggatttccccgcgtcgccggcaagtcagtcatcctcaccgtcgttgaccgtttctccaagtacgcccacttcatcacgctggctcatccgtacttggccgaatcggtggcacgcgccttctacaccgatattgtcaggctgcacgacgtgcccgcgtcgatcgtctccgaccgcgacccggtgtttacctccacattttggcaagccctgttcgccgccaccggcacaaagctgcacatgtcgtcagtgttccacccgcagacggacggacaatcggaggctgtcaacaaggcaatcgccatgtcgccgtgcccgtccggtcgccttcctccaggcctccacgcgcgcaggccgtccagccgtaggcctcccggactcctggcgcgcaagccgcctcgtccgctgccgtctgactattggctttccgtcccca

SEQ ID NO: 70774 - DNA, 384 bp, Oryza sativa
  Clone ID: PAT_MRT4530_71312C.1
atggaggactcacatgaggtcggccgggggggctcagtggtggcggcggcgggctcggtggagggcgtcgccggcgacgacgatgaggaaggacgtcgccggccttggtgggggctgctgttcgtgtcggtgaagaggcaggcggcgacaacgaggaaggccgacgccggtcggtgtagaggctcagtggcggcggcggcgggctcgatggcggtggcggtgggctcggtggaggcggcgggctcggcggcagtggcggcgggctcggtggcggtggtggcgagggaggacgacggtggcgaaggagaagttggcggcggcgctagggttctaaggaggcgggaaattgtagcgggacttagaaaaattttcgatccgatctga

SEQ ID NO: 70775 - DNA, 290 bp, Oryza sativa
  Clone ID: PAT_MRT4530_71313C.1
agaacgcatctactaaagagagcccgtgtacctatttctactccaatttttatcccgattttatgtttagtcatgctattaatattacatgacatgacaaaacaagcactataaatgattttttcatacacggctctccctctatacatcaatccacctttctatcatgcaataaaaagaccgcattcctttattttcggttggagctgctttcccccaccatatataaaattcccccgatcagaattgttttttttgtttcttctacttgattccgatatttttttttt

SEQ ID NO: 70776 - DNA, 456 bp, Oryza sativa
  Clone ID: PAT_MRT4530_71314C.1
atgacgacgatggtggcggcgcagcgagacgacgagccggcgaggaggaacgaccgaccggaggagtcgtcgacgaggacgaatagagatgacgataacgaacaccggcggggttcgggtggaggggaggcgaggccgagggcgaccttgccgctgcgatgccggggaagacggcgacgtcggccggcgcacgggcacggcggaaggggttgccgaaggaactccggcgaggcagagggcgagaccggcgcgggcgacggcgttccggcgaaaccgagggcaggccggggaaggggaggtgactgcgacgccgggggaggtgacggcacggccggacggcgtgccgacgcggcggcaggggcggctagagggtggccggcaccgaggaaagagaaggaggaggcggggagaggtggtgtggtcgcgggggaacgcgggagggggctaaaacgatag

SEQ ID NO: 70777 - DNA, 1499 bp, Oryza sativa
  Clone ID: PAT_MRT4530_71315C.1
gaattcggcacgaggcccccccccctccctccagtgagaagatcttctcttcttcgccgtcgtccgccggagcgccgccgcagaacgaccgccatctctccccggcgacctcgccgttgcgtgagaggcggccgcgctacgtcttgcccggagcagggagcgctacgagtcacgacgacgtgggggaatatcgcacgtcgccggctggtttgtcagtcgcgatgcaggtggagctcgctgaccgcgcggcagcccggcccagcgagacgggggaggctccgccgtcatctccagccgccgccgccgctgcatcagcagcagcggaggacgcgccgctcttgccaggtggaggtgggggtgtgcggcggcgggtggtggtgagcgagcggttccggcagcgcagcggatccttccggcgggaggtccgccgcgcggccgaggagacctacctactcacgcgcctcacgctcatcctcctccgctacctcgggataggctacagatggatcaggcagttcctagccctctgttgttacaccttcttgctcatgccaggtttcattcaagttgtatattattatttcttctcgagccaagtttgtagaagtgttgtatatggagaacaaccaagaaacaggctggatttatacatacctaccgatagaactgggttgaagccagttgtggcatttgtcacgggtggagcttggatcatagggtacaaagggtggggggcccttttgggcaggcgcttggcagagaggggcatcttagttgcatgcattgattacagaaactttcctcaagggactattggtgacatggtagaagatgcatctcaagggattgcctttgtctgcaataatatagctagttatggaggtgatcctgaaaggatttatcttgttggacaatctgctggtgctcatattgctgcttgtactctcttacaccaagctattaaagaatctggtgaaggagatgcttccacttggagcattgcacagctaaaagcttattttggtatttctggcggctataatcttcttaacttggtcgatcatttccataaacgtggcctgtaccgatcgatctttctcagcataatggaaggcgaggagtcgttgcaaaaattttctccactggtgatggttaaggacccagctgctaggtctgcagtatctctattacctcgaatattcctttttcatggaacaagtgactattcaataccatcggctgagagcgaggctttctttgatgctttacaacagaatggcgctaaagcagatctgttcttgtatgatggaaagacgcatactgacttgttccttcaggatcctctccggggtggtagggataagctgctcgaagagattgttactgtgatacacaatgacaatccagatacatctgcccagcatcttgctgtacctgttgcacgccgccttgttcctgaattcatgcttatgcttgctggaagagttagtcctttctga

SEQ ID NO: 70778 - DNA, 284 bp, Oryza sativa
  Clone ID: PAT_MRT4530_71316C.1
acagaataaatgttgtgaatcttttttgggaaataacggggtgaaaggggcaaatgacgccgtgtctgattccaacagcaatttctctagaatcttctaccccacttctgtgactgttagcctatgcaagtatagatggcctgctgcttttgatgtacaatgtccacatttgattgctgtcacaatccttttgcaaaagagaagaaaaagattctatcctacagaagcagtgatgtaatcttgcccgatgccatttcgttggttgcacgatggagtgatcaccc

SEQ ID NO: 70779 - DNA, 442 bp, Oryza sativa
  unsure (1)..(442): unsure at all n locations
  Clone ID: PAT_MRT4530_71317C.1
gcctgccctactgcagacctaggaagaagaagggaagaagaagaaagggaaagaaggaagcggagggaattgaggtgaagaaggaaatgaggcgttttggttgccgttgccccatggaggcttaggtgatgccacttcggaatgcaactagagttcatctcatcatcggtgaagtcttttcaggtacttgctgtgacatgtttgcatgaagggatgggattagctacacagtcgcacgacatgatctcacttagtcatgattattgtaatatcttgataagaatatttgtgtttagacataatgggttaattaaatactagagttgttggccattgattagccactttttcaagcctatccctacatgtcagtcatttgttgtatcataaccttaatctatatgttgatgctnccgcgaaaaaaaaaaaaaaaaaaaaaaaa

SEQ ID NO: 70780 - DNA, 267 bp, Oryza sativa
  Clone ID: PAT_MRT4530_71318C.1
atggaccagacggaattggggcagcccggggctggggcggcggggggcggagcttccgtagttgtcaccaagaccatgcgagatcagttcgcgccggtgcgccgcctcctcgctgccctagacgattgcccgatgcggcagcctcagccgccgccgtccactggcactacggcggcggattcagttgccaccgtggccaaatcaaaggatggctactcatcagggcgcctccgccgccggccatggcaccctgccctgttgccctga

SEQ ID NO: 70781 - DNA, 567 bp, Oryza sativa
  Clone ID: PAT_MRT4530_71319C.1
atgaacactattccccttcctctcaggctactcgtcgccgtctccctcgccgtcgccggcgtcgccggagatgacgagaagacgtgccccggcgcgccgacgatgacggtggagtcggcgtgccgcaacgtgagcggcacgcaggcgatgtacgacacgtgcagggacgcgctcgccggcgtggcggacccgttgagcgaccacgacgtgaccgtctacgcgctcgcggcggcgcacggcgcggcggcgtcggcggaggccaccatgggcgccgccatcgacgaggtcaggaacaacaggtctctccccggcgacgagagggacgcgtacatggagtgcgcggtggactactcgacggcgctgcacgccatgggcagcgtcgtggacaagctcgacggctgcagcttcgacggcctcgccggcgactatttgaacgggctcatcgacgtcgagaactgcagggaccgcgtgctcaagctgccggcgtcgccgctgtacgccatggtgctcgtcgaccggaacaaggccgggatggctctcttcctggggaaactcttggggatatga

SEQ ID NO: 70782 - DNA, 492 bp, Oryza sativa
  Clone ID: PAT_MRT4530_7131C.1
atgcggtatgctgtggacgtcgagagaatggcgaagcttcgacagttgtacgcatcgaagcagaccaccgacgggctgcgccgcctcgtccgccggtccatgcaccgcccgccgccatggatgcccgacttcgtgctcgatgatttcatcaagccagggtaccgagaggagagagaggacgatcggggcggcggcgctccggtggccgggaggttgcgacgccggcggaaaaatatgttcccgagtgacgcgcttccggggagggtggtagctgaggagaagatcgaggagaacttcgcgacggcgccgtggaaaagaagacagcgccggctctgtgctccgattggatgtcgacagcggcgcgagcacgtggcagctgcggctgtgttggccgaagaagaagaaccagcacggcacggcgccgacgtcggcgtggtcagcaaggcgacgacggcggtgctcgaagcaactgggcggcggtggcgcccatag

SEQ ID NO: 70783 - DNA, 393 bp, Oryza sativa
  Clone ID: PAT_MRT4530_71320C.1
atggggaagcacagcatgccgtccaccctattggtaggagtttcaaaaaggcagtgccagatcttctggatagcagagacatcctcatcgctgctaatgccaccgccatctaatctgcacaacagcccatgttcacattggtcaagtggtggcggagtggtgcaggcctgccaacaatgcgcaggaggcaagatgacaggagttaagcagatcagggaaccagagaacatggtgggcaggtgcatcattaacgccatcaccagtcattgcaaccttgcatatgaaaacaagtatcaaggctacagtgaaaacagcttaccacttcattgtgtaactgcaaagcttcaacaagcatccttttatgagaaggttccactctacaacatcccgtaa

SEQ ID NO: 70784 - DNA, 2956 bp, Oryza sativa
  Clone ID: PAT_MRT4530_71321C.1
aaactgaatagaagtttcgaatcttctgaggtgagggcaatacagttgatatagatcatatttcgtacgcattagttacaaataggaatgtgctgtctataaataacatctagagatcctacaacatacatccgaaacttctcgatgtttttttacagacaaacgtattctgaagcccccgttaataacagtttgtggtcatccacaaagaggtatgaaaaaattcctacaatgtttgtcagcctccaagttcataatcattagccaaaatcagccaagaggtcaagcttcccgtattgtgctgtgtccaactcagtatgtgtgccgagatctaaaattaattatctcgggattcttttggtagtatctcacgtctccgtaaccttaaagggaatctccgacctcgggagcttcttgagaaaaacttcaatacctcatcaatcaaaattactgagaaaagagctgatagaggttcaatatacagaacagatatgtgaagaagcattgtcaggacaatcgacccaacaagccacaggttactccatggatgaatggcaaggagagattgattttcacttaggttatttagggcattaaacatctcaacaacaacaagaacagtcattgaaacagttgatggatggcgatcctcaaagatgctgcaaggatatgatgtttgcctagttgaacatgaatcaaaattaacctgaggcccaatagaaggaatctctttgattaagctgataggtttctgttgataacttgatgtgtgattattgctccacatcattttgtcccattttcttgccaacagaagagcatggagcaagggttttctagccaattctgagtatggcaacctaggaccatcttcagaataaacaaaccaccaaacgaaccccgctatggtagcaagaccaacgtaggcaccaatgatcaaataacggaaaaagagccatccgttaaccacagcttcattaacttcaatcagtagtagcaccagctgctggtaggctagcacagtgtcaccttcacacagcagtgatggggaagcacagcatgccgtccaccctattggtaggagtttcaaaaaggtaggagacactgcagcggcaatgcattggaccagcctaagacagtgacggagaggattagttaaggcagcagtctgttgaacaaggcagtgccagatcttctggatagcagagacatcctcatcgctgctaatgccaccgccatctaatctgcacaacagcccatgttcacattggtcaaggtcaccatccacacccatcacgtcaacaatgaaggcaatgccaaagcattgttttccatgtgcatctgttagccatctaatagtagtggtggcggagtggtgcaggcgaggcttcactgtcatgatgttgctatcaggcttgttgaaaccaatcgcagttgcaggcaacccatcggtaaccaggtttacccagagtagctggacaggtacaagtgtgtcaggcatcccaagcacagctgccacaaaaatgcatactacctccccaatatttgatgaaatcatgtaccgaatgaactgcttggtgttattatatatggcccttccctctgaaacagctgcaacaatggtagcgaagttgtcatcagccaataccatgtctgaagcactctttgcaactgcagttcctgatcccatcgctattcctatatctgctttcttcagggcaggtgcatcattaacgccatcaccagtcattgcaaccacttcattgtgtaactgcaaagcttcaacaagcatccttttatgagaaggttccactctacaacatcccgtaaaactggagaacagaaccatcctttgcaacgcatttgccttttctaaaggaggaagcccttcaaactctgatgctgtataagaataccctgtaaagtcctccaaatgctcaaaagcacctatttgccgacatagggattctgcagtggacttgttgtctccagtaacaactataacacgaatacctgcagacatacaagagtggatagcattccgaacttcttctcgtggtgggtcaagcatcccaaccaatcctataaatgtgagatttgcctcatcatcatagctaaggctttgttgaccttctggcattcgttttaatgctaatgctaagcaccttagggtatcttttcctgcaaaactttggaatctagcttccaattcattacgaatgtccatagtcaaaggtacagaagaaccatcatcattgcacaatatatgggtgcacctggccattacactttcaggggcacctttcgaaaacataatctcctgttgttttcgactgcaaaggacgctcatcattttgcgatctcgggagaactctagaacggatatctttctaaactgattttcccagtaacggttgcagtatgatgcgcgctcatgcttggtaagcatgttcagggctgaaggcattgaatcaaaaccaggaaggccaaccttctccaccagtacacgcagagcaacctcagtggactccccaattttctcgtaacattttttatcaggattgtattgtaaagtggactcattgcaaagagctgaacacattgctatatgaaggagacatgaggattgaggaggaaactccagctgcaatccaccagcatcatatataaaaccatcaggagcaaatgtagttccactaatggagtactcatcagttattggcctctggtgcacagaccgcacaacacagacctttgatacggacatcatgtttgttgtaagagtacctgttttgtcactgcaaatgactgttgtgcatcctaatgtctctacagagggaagagacctaacaatggcattcaggcgagccattctcttggtaccaagagctaagcacgttgttactacagctgggagaccttctggaatggctgcaacagcaagggcaacagctac

SEQ ID NO: 70785 - DNA, 605 bp, Oryza sativa
  Clone ID: PAT_MRT4530_71322C.1
aagagcgctcctcgcagcggaggtcctcgccgatcccggcaacattggagaagatcatgacggggacgaccgtgagtgtccgcactagggtggggaagcttcgtggcgggaggcagttggtgctgtggctctctgcggtggtcgtctccgctgccgaggaaggctacctcaccatcctctacacgggcgacttccaaccgccggaggctaccatgcgcgttgcgaggaaagaaaccaagaagatgccgcccgccgcggcctcccctgccctggccgacatcgcctcctctgcaccgacagtctacagcaagaatgcagcagctccttgtccgaccacggccggcaagtcggtagtggtgctcaagagagtttacccggaggcgttctagtatagtggagttctagttgccgtagattctactactaggatttagaaatcagggcatgtattctcgtctttctcctctgttgtttttttgggttccgaaattcggaaggcacagaaggtgatgggtgttgtagacctgtaatatgacgattctattggggttctttcagttgtaacaagaacacattcatcaatgaaaagtaagatttttctctac

SEQ ID NO: 70786 - DNA, 288 bp, Oryza sativa
  Clone ID: PAT_MRT4530_71323C.1
atggctagaaaactagcagttgaagtgctgtcagagggctccatcggccttgccggtcagaccggcgttgagtgggcggtcagaccggcctcggctcggtcagaccgccatcggctcggtctgaccgactacggctccgtcggctctgtatcagccacctcgagcagcaccatctcggcctccagggggccggccgcttcctggtggtgggcggcagggaagagggctcgcacggtacaccccgtcgacgccgccagcaccgctgtcgccgtcgtgccaactgcctaa

SEQ ID NO: 70787 - DNA, 387 bp, Oryza sativa
  Clone ID: PAT_MRT4530_71324C.1
atgaggttcacctctgacagggtgtttcagtgcccattatgcatgatcatcggtgacggggtggagtttagaaccgacaaagatataaaatccgcaagcgtacggatataccgatgtagcacttcccctacggagtatttcaagggtatcgaatccaagaacggcagttatgacggttgtgagaagggaaaatgtccgaactgccctgcaaccgtcattgggagaacatctggagcgtccacgccaaaccccaggatcaacggtgatcaggggggttcggccgaacctgggctgggccctcttggcctggccttcgatgttggcggtatagagtcggcatttaacagccgccaacaacaacctcctgaaagagaggcgttaagttag

SEQ ID NO: 70788 - DNA, 969 bp, Oryza sativa
  Clone ID: PAT_MRT4530_71325C.1
atggaggcgaagcagaggacgaggcatcgcgacggagaggagaggaggctcgtagcggcggcggatggcggcgccgaggagtacgacccatggacggcgtggctctacaagccgcacaccatctcggtgctcctcgtcggtgcttgccttctaatttgggcaagtggagcgcttgatccagagggtgcttcttatcacagtagtgcgacatctattaagaggggtgtctgggctatgattgcagtcttccttgcttactgcactctccaagcaccttcaacgatacttattaggccccatcctgctgtctggcgcctggtgcacggactggctgtcgtttaccttgtcgctctagcctttcttcttttccagaaccgcgatgatgctcgccagttcatgaaacacctttaccctgatcttggagttggtaatatctttacatcgaaaggatttacactggaaattaaatattgtagaagaaatggtgctgacaaacatttctgtacactaatgcagaattgccggagagatcttatggagctgactgccgtctgtatatgggcggggatgcacacagtccgttactttgacggtaaaacatatgagtgggttggactgagccgacagccaagcatcatgggcaaggtgaaaagatcactgagccagttcacccctgcacaatgggacaaggatcaatggtaccctttcatggggccgttgcggttcgttcaagtgttgttcctgtgcgttgttttcatgacagtggagctcaacacattttttcttaaattttgcctctggattcctccaaggaatcctttggttgtgtacagattaatcctatggtggttgattgctattccaaccatccgtgagtacaactcctacttgcaaaacaggttatcccaatttccctgcacgcccaatagcattgcacattttttacaattttacttaatggcttgctaa

SEQ ID NO: 70789 - DNA, 235 bp, Oryza sativa
  Clone ID: PAT_MRT4530_71326C.1
attatagagtgtcatcacatcaagcataacaagaacacaaaatctactttcactcgttattaccaatagataagcctacctaaacaactcccaaaccccctgtactgataattttcactaaatgggacacatatgtttaaacacaaccaaaatttattttgcttggatcgaataccataactaattattaaaacccccccttattaaaaatcatggatttcatagttatgacaaa

SEQ ID NO: 70790 - DNA, 999 bp, Oryza sativa
  Clone ID: PAT_MRT4530_71327C.1
atggctaagaggtttgatttggtgctaaaattgggctattatgaggcacatatatgggcattgccaacatttttgtggaagaaggttttgttggagtgtttggtttttgctaccttgccaaaatttcggtattaccaaatttcgaataaaaaagaaaggaagaaagtacgagaggttgggattttgaaaaaggatccagaggctatactggagcagattgagaaactggaaaagatgaaggctgatggtgctctcgataaggctaggaaacataagaaaaggcagcttgaggatacatataatcttattgtcaagaaaagaaaggaatatgaagagaaaatgaaagaaaagggtgagcaaccaattatgttcagccatcttggaccaccaaagaggcggccggcagcagaggaggatgatagagctaaaaatcctaagccggaggattctgtttactatcacccaaccctgaatccatctggagcaccaccacctggcaaacctccaatgtacaaatcttccatagggccaaggatcccactgccttcatcaagcgctggtgcttcatcttctatgccaggaactgaagaagcaggtccttcaaccctgccaccccctccaccgcccccaccattgcctgcctcttcagaacctgttgacccatctgctgcatctttaccccctctcccacccccacccccgcctccacctaagcctgctaacatagcaggagcacctggcttacctctgccacccccacctccacctcctcctggcccacctcccagagaaattgtgccaggtcaaacattattgccgccacctccgcctccacggcctttgcagccatcacccctagctggtacaaacgaatttgctaataagcaaaccattggagagggtgcaagcttgacagattctgcgcaggcaaaaggtgcactacctccaccacctcctggtttgatacgaaactcaagtgaaatgcagaatgccaatgag

SEQ ID NO: 70791 - DNA, 948 bp, Oryza sativa
  Clone ID: PAT_MRT4530_71328C.1
ccaacaacacattgtttttttttttttggtttaaatggggtaagcactgcgaacaattgttttggcatggctgatggctcagtgagcaaagcagaactgcggccggccagacaaaaaaaaaagaacattctattgttgcaggccagcattagctccttacggtgcaggtaagaattctcaattgataaatcactcactgtccttcaacaagcacatgactctctcactagcacaatttgtcattgtctcatacactttacagtcacgatggatcttacatgaatggatatgttacaagtcgagaggtttaaactttccaacatcaactaacagtgtacaatttgcagcccatcgctggtccctctcatcccaacgccgtgagacagatgaaacaaaccagctaaatccattgacatatttttctttttcaggacattgtaggacaaaggcaaatttcacgaggtcaaagaatgcagttctagctatacacggatttttcacataagttgtataggtgtgggggtttctggcgatggtatgaaaaaggatgatgtcaaggaactggatatctgggaaatcaccccttgctcccgaaatagctcatggatgtctctgacaatatcaaacaccgcttttggctgagccagttttaacgctttttctgacatccttttcagttcatcaaaatctggaccaaaccagggggcaacaagtttaacagtttccctaaaacttttggaaaaaacaccagcaccattggccacaacataagggacattgccaacttcctgtccaggtatgaagtcattaaggatgataggcaaccctctaatcaaggcttcggcgatgggacctggcccaccctttgttataatgcaatcacaagcccccatccatttttccatctgggtctcaaatcccctaaccttaattgggattttccattca

SEQ ID NO: 70792 - DNA, 2241 bp, Oryza sativa
  Clone ID: PAT_MRT4530_71329C.1
gagccccccttaaaggaaatttcgcattatatacaattcggtcagatcagaactcagcaggggaaggcgcaaggtctatattttttcaacaagcacatgactctctcactagcacaatttgtcattgtctcatacactttacagtcacgatggatcttacatgaatggatatgttacaagtcgagaggtttaaactttccaacatcaactaacagtgtacaatttgcagcccatcgctggtccctctgaacaaaggacgacaggattttttaaaaaaagtcatatgaacgaatgattttaacaaaaaccgaatatggatattacacaagagcagctgtcagtcaaacaagcccatacctaccatgagagaccacaaactgaaaagcagtcgaaatcctgtggtcacatctaattttgtccaaatcatactagacccaatatacttctctctttctctcccatttcttgaaacttgtgtggaggttgccccttgcacgaggggtggctgctcctctctctcttctcttctctcctccacatcatcatttgagtctacatggcatcttggaattagtgataagatgcttagagcaagatcaatagtaacgtccacggtcggcccttgctcccgagatagctcatggatgtctctgacaatatcaaacaccgcttctggctgagccagttttaacgctttttctgacatcctcttcagttcatcagaatctggaccaaaccagcgggcaacaagtttagcagtttccctagaacttttggagaagacaccagcaccattgtccacaacataagggacattgccaacttcctgtccaggtatgaagtcattaaggatgataggcaaccctctaatcaaggcttcggcgatggtacctggtccagcctttgttataatgcaatcacaagcccccatccatttctccatctgggtctcaaatcccctaaccttaattggtattttccattcaagagcctgcaatgaggagctcagcgttttgttccgaccacaaatgacaattaactgtccaattggttttccaagctccttgtcaaacaacgactctccaagggcttttgcggtcttcttgacaggacccatgccctctccacctcccatcagcaatactgcaggcagctcaggatccaattcaagttccttcctcaaatcatccttaacaagaacggctcggcagaatgatggccgaatcggaaggccaaacacacggatttgagaaggttgtaggtcatccagtgctgctctcttggcaacttcttccgatgggcagtaacatctattgacatcagcatggaaccatgtagggtgacaagtgttgaggtctgtgatgacagtgacaaagaccactctattttgtagcccttgccatttgagtacccatagaggaatgtgttgcatgagggggtggacactaattataatatctggtttgtacttcttgagtccagcctcaaccttcttggcatagaatgaggcgagcgcggcgaggtagaagcaatggacccatctcggcgatgtggtgtggaaggccaccttccatagctgcacatgcttcaccatgaacttgtacgagctctccatgttgttcagcggccaccccgcgtgatccttgcacagatccttgacgaagacccggtaatcgtcgccgaactcgatgcggaaggcgtccttgatagcctcggcggaggcgcggtggccgccgccggtgtcgctcatgaggatgagcacgttcttagcccggttggcgccgagctggacgagctcgacggtgccctcctcctcctcccagaagggctcgtcgtcctcgtcggggccacacagcgaggtggtggacgccgacgaggacgccccgccctcccctcgcgcgcgccccgccgacgacagctcccccgcgtaggagaggctcttcctgaacttgcgcctcatcctctgctgctggtggtacgccgccaccgtctccagcaccgtctcccggatcgacctccccctcggcgacgccatcgacgacgacgacgacgacgacgccgccatcgcccccgagagagacgagacccctttgcggcggtggacgacgacgacgacgagagagagagagaagggagtttaaaaatggggaggcgagtgcaaggggaggagaaggagaagcggagagcaccgggggggttcgaagctgagctggcaacgcgccgcgctcgggggaagaagaa

SEQ ID NO: 70793 - DNA, 1626 bp, Oryza sativa
  Clone ID: PAT_MRT4530_7132C.1
atggagcgtgacagcggcttcaacttcttttcacagctgccgtcggttctgggctcgtcagccgctagcttcaacatctactctcaggtgtcttcgagcagcgccgcccacgctcccagggcgggccttgatggacttgacctcaacttcaacttacagggggccgaggagttccctcatatcggggaatatgagaactaccttcagtccggtggcgaccaaggaggaagtaccacgcggggctctggtctccctacccttcgcacacagcgcacactgggagtacgcaacctgtggatgtcctatgaagaagagcaaaagcccaatgttaggtacatgaggcagataaccactaaattctccgagtctatggatatcagtcaacaagtgatccaacaagcacactttgtgaaaatggaatctaaaaaagagaaggaatacttttcagtgaagaagtgtcaagagctggcttttgagtgtgggatagagcatgatagtgctgaggtgtatgcaatgggcaagatgttccaagatcctttccagcgggaattcttctgcggtttgcccagtgcctccgcaaggctcaattacttgaagagatggttgcccctatgttcgtcaacatcaagaatgtcatcggtagaggctttagctatgtttttgtggattgttggcacaccacagtcagttaggcaagttgaggatcgttttgttagatccttagagacagtaagtcacacatttgacggagttttgagaagtgtcctcaagctagcagctaacattattaatccaaaggaccttgaattttctacagtgcacccatgcttagaaaatccagatttttggccacacttcaatgactatataggagcattagatgtgacacatataccggttgtggtgccaaaaagtaaggtggttcagcatattaacagacacaacgaaacctcacagaatatgcttgctatttatgatttcgacatgagatttacctttgtgcttgcgggatggccttggtcagtacatgatatgagagtgttcaacgatgcaatgaccaaatatggtgacaaatttccgcatccacctctaggtaaactattctatctgtcatgcaagtatttcttcaattttcgttggtcatatatgtcactttatgtacctgaagctgtagggaagtattacttagttgatgcggggtacccaaaccgtccaggttatctttcaccatataggcgtacaaggtaccatgtggagcaatggcaagaaggcccgctgccacaaggtatgaaagagacctttaaccatgcacattcccaagttagaaatgacatagagcggtcttttggagttttgaagatgaaatggaggatgttgttggatatgccaaaattttccgcccgaaaacaaacaagaataattgttgcgtgcatggctctccataatttcattagagagagcagaattgcggatagggaatttgatatgtgtgatgcggatgcaaactattttccaatgccacattcatctcaagataattggccagaagatgaacctctcgcagaagataccaacatgaatgctttccgtgatgagttagctaatgctttgttcaatggattgtaa

SEQ ID NO: 70794 - DNA, 378 bp, Oryza sativa
  Clone ID: PAT_MRT4530_71330C.1
cggacgcgtgggtgcctattgaaggaaattattctcgaggaaacttgatgtttcagaggatcaggtcctacatagcctttctggagcaaagacttgaggagcttgagacagtggaagatataaatcatctaattttcactgattctgatatagcagtggctactgatcttggacatatattcgagatgcatcctcattgtcaccttgctcttacttttcgaaataacaaaggccagcctttgaattctggatttgtagcaataagaggaaccagggatggcatttttaaggctatcgaattcttcaaagaagtccttgaggcatactacttgaagtatatggaggcttaccgcatgcttggtgatcaattaacactgg

SEQ ID NO: 70795 - DNA, 852 bp, Oryza sativa
  Clone ID: PAT_MRT4530_71331C.1
cttgacacactcgtggctagcagtggacctgcattgaagttaagcagatctcccaggccatcgtgttttcacatcaacaaccacctaggagtgcttactcatgcccccaaggtttggagaggtacaggttgatctgcagagtcatagggtgcgagaacttctcaattcttgtggatgacatcaaactagtgctggaagccgagaagaacactacttggctaaagttcaaggagagcttcggctatcctgcagccgacgagggcaggctcaagcgggcggctttcaagaatataggcaattattggaaaatcattaagtccaggctggtcgccgagtacgtcctcaacccggctactccgaagccatatgggctcttcccattcatcacgccaagagtgtgggagcagttctacgagaagaagtcgacacctaaatcccgggccaaaagcgaggcttatcaggaactctaggctaggaacttgcactcccaccggcttggcactgcaggatacgccaggaaggaacaacaatggtaggaggaggatgaaacggtaggggaatcaaacacgccgccggtgtttggcgatatcccacacccatgagcaaggaactgggcaagggcaaagggtcacaagaacgacgatgggacaatttcgtcgccaaatccccaagatcaacaagtgtacgaaaatataaaggagttggttgcctcgcaagaagcctcgtaagaggcttgctcttaaagacacgaggacggcctgaggcggcggatgggaggtgccaccaagaatcaggctcgagatcgatgcgacgaacaatcttcccattttccacgcgtgaaaccgactgaat

SEQ ID NO: 70796 - DNA, 906 bp, Oryza sativa
  Clone ID: PAT_MRT4530_71332C.1
tttttgtgaaagagaagatgaccagcaattctgtcattaaaaattcggccaaatcttagctggtccagatcaaagtagcatacatcagcagatcggtgtacacataatcacatataataatatacacggcgctgctaattacacatggaagcatcagtcatggtctcatggattcagatcgatattactacccttttattacatcatttctaggtcaaaataatgacaaacagaagcgagcacatctagatgacctgacactgttttactccgtcttggccttgtcagcgccgccggttgcagcggcatcacggcacatcatcttcttgaactcctcgaacccgacgcagccatcgccgtcgacgtcgacggaggcgatcatcctctcgcactcctcggcgctgcagccctcgccgatccggccgaggaccttgccgagctcggccgccgtgatgcggccgtcgccgtcgacgtcgtacacgtcgaacgcggcgcgcagctcggcctcgtgctcggcgtccccgcgcccgcggccgtggaacgccgcgaactcgccgaggtcgacgaagccatcgcggtcggtgtcgagctcgttcatcatggcggccacctcgcggccgccggcggactcgctgggcggcggcgcgatggcgcgcgtcaccgcggccagctccgagggggagatcctgccgtccccgtccgcgtcgaagcgggtgaagaccctctcgatctccgcgtccgccggcgccaacgccgtcggcctctcaacctgctgctgctgcggcatcttcttctcggtggtgttcgacatggttgcaagacttgccgtaagcaaaagcttgagcttaattagctgagtgagcagtgatcagaagtgtgccccttgcgcccccgcgggcgcgtggg

SEQ ID NO: 70797 - DNA, 231 bp, Oryza sativa
  Clone ID: PAT_MRT4530_71333C.1
atggcgttagtggtatcttctagcagcacaatgagatcaatttgtaggtcaccattcttgagtggcaagaggtgttctgcttctgcttccaaggttgccctcgcgattgctttgctttcttcccactgggagttggacggtgatatccacatgctccctaacggcacaagcatggcagcaagcatgttaagcgaagctcacattgagccctcgctgtccatcaccaactga

SEQ ID NO: 70798 - DNA, 1251 bp, Oryza sativa
  Clone ID: PAT_MRT4530_71334C.1
gccatgaaatattgatgtcattgatagcaagccgtgttgccaagatcagtttgcgatcagatcggctgttgctcccaaaacaatcaaatgcaaaattcacatcagttccacggatcgtatggatgatccaggcagtacagtgtataaataatagaaccaaaactcggctttacgccataacaaactgtaagaccatcattgatctgtcgacaaggaatcagctgtcagggggcatgatccattactctcaatcctttgcaaccaatctaatgcgcttgccatcaacagaaaacctggagcttgaagaaatcttatccatcaagatagcgtgcatctgctccttatcttctgtcagaccacattccagaagttccttagttactagcttttgtagcttctttaacttcagaactccatctggattcgtctgaagtactttggtaataattttcttccacttgattttctgctttttactgcctttaaggttggcactactaactaattcatctttagtacccttgctctttgctttggtttctgcctcttcatttgaagattgtaccacttctccactgttcacgctcaagttgttctgtcttttcgtgttatctggctcttctgaggtcgtatcatttgctctctttctctttgctgcatcgttgtccacacctctttcattttcagtactcctctcattgtttacttgtgctgattctgtcacaggtgcaccaacagtttccttgggagtttgttcaactccatttgcttgcttctgagaagcatgataggcttttgcttttgccctgtgcttcttgccatctgcatgtgataagagtgtttgcttgctagtggttgtcgtcttgcaaaggctgcagaaccaagggggatatgtcgacagcccgacattgatatcaacatcagcatttggctttggcttgtcttgcttgccctgtgcattgttggatgctttgttctgtcccttgggaccatacttctcagcctcggagatgcactgggtgtggccctggacggtctcctgggtgaagaactcgccgcagtcgatgcaggagagcctgtaggcggagcaggagcggaagtggccggcgagcttgggcttcttgaggtcgtccccgcagtcctcgcactggaaccacaccattgtcgacgctgccgccgccgccgccgcctcttcacctccgacgagcgggcggcgctagggttttgggtgcgaggcgaggcgaaggacgc

SEQ ID NO: 70799 - DNA, 291 bp, Oryza sativa
  Clone ID: PAT_MRT4530_71335C.1
aaaaagtatactgggggggcctaaacttgccaccgagatacagaaacgtccttgaaccgcaataccagacacccggggtcccccaactatacaaaaccggtcatccaacgtccctcggtgattttgaccccggttttgatctacgtggcggctgagttagtgtgggacccacgtggccccacatatcaggtgtccacatcatctttatttcccctcttctctgtcccttcctcccctatcagctctatctctcgcaggccaggcctacgggttagggagcagacggctggg

SEQ ID NO: 70800 - DNA, 1866 bp, Oryza sativa
  Clone ID: PAT_MRT4530_71336C.1
atggatgtggagagctgcgcgtcgtcgtcgccgccgccggatgccgccgtcgactggcgcggccggccgtgcgagccgcgccgccacggcggcatgcgcgccgccgtcttcgtgctagggatccaggcgttcgagatcatggcgatcgcggcggtggggaacaacctgataacgtacgtgttcggggagatgcacttcccgctgtcgcaggcggccaacgtggtgaccaacttcgtcggcaccatcttcctactctccctcctcggcggattcctctccgactcctacctcggctgcttctggaccatgctcatcttcggcttcgtcgagctctcggttgaattcaacgatgacacggctgctacgggtttcatacttctgtcggtgcaagctcacctgccgcagctgaagccgccgccgtgcaacatggcggccacggacggcggctgcgagcaggcaaggggcatcaaggcgagcatcttcttcgccgcgctctacctcgtggcgctcggcagcggctgcctcaagcccaacatgatcgcgcacggcgccgaccagttcgcggccgcggccggcggcggcggcgccgccgcggcggacaatgccaagaggctctcgacctacttcaattcggcctacttcagcttctgcgccggcgagctcgtcgcgctgacggcgctggtctgggtgcagacgcactccgggatggacgtcgggttcggcatctccgccgccgccatggcggccgggctcgtcagcctcgtctccggcgccgccttctaccggaacaagcctcctcagggcagcatcttcacgcccattgcaagggtgtttgttgccgcctacaccaagaggaagcaaatctgcccttccagctcctccgatcccgtcaatgccggcgtttgcgagccggcgcacctcgccggcggcagcttccgccacgccagcaagttcaggttcttggacaaggcgtgcatcagggcggcggagcaggggccgaacacgaagccggagagcccgtggcggctgtgcacggcggccgaggtgcggcaggccaagacgctcctcgccgtggcgcccatcttcgcgtgcaccatcgtcttcaacaccgtgctggcgcagctgcagacgttctcggtgcagcaggggagcgccatggacaccgcgctcggcggcgccggctcctcgttccgcatcccgccggcgtcgctgcaggccatcccctacgccatgctgctggcgctcgtcccggcgtacgagctcctcctcgtcccgctcatgaggcgcgccacaggggcgcggtccgggatcaccccgctccagcggatcggcgtgggcctctgcaccgtgccgctctccatggtcgccgccgccaccgtcgagcacaggcgccgcgacctgtccctgtccgccggcggcgcgccgccgcgggcgatgtccgtgctgtggatcgtgccgcagttcctcgtgttcggcgtgtcggagatgttcaccgccgtggggctcatcgagttcttctacaagcaggcgcgcggcgccggcatgcagtccttcctcacggcgctcacctactgctcctacgccttcggcttctacctcagctcggtgctcgtgtcgctcgtgaaccgtgtcacggcgagccgcggcggcggcggccatggcgggtggctcggcgacaacgacctggacaaggacaggctggacctcttctactggatgctcgccgtgctcagcgtgatcaacttcttctgctacctgctctgcgcgaggtggtacaactccggcggcgccgacgacggctgcgacgcctccgcctccgctcaggtcgccgccgaaggcgacggcaacggcaaggagatcatctga

SEQ ID NO: 70801 - DNA, 231 bp, Oryza sativa
  Clone ID: PAT_MRT4530_71337C.1
atgcgggccccacatggcagtgactcgagggggcggtccatggtggaccaggtccacggaccggggaaggagcggcgaaccacgtggtgcacacgtggcgccgacgcggcgcacacgtggctgccacgtggcagccacgcggcggcagcacaagtcggtgaccggcggcgaccggccggcggcgaagggcggcggcatcgcggcgacgcggacggcgacagcgtcggctaa

SEQ ID NO: 70802 - DNA, 630 bp, Oryza sativa
  unsure (1)..(630): unsure at all n locations
  Clone ID: PAT_MRT4530_71338C.1
atcttcaaaaatcttctcatttcgatataatttttaattttttttaaaaaaaaatcttgcaggttagtttaccttcaaccctgacaatactgatactgttcctgtaggtgtttgttgccgcctacaccaagaggaagcaaatctgcccttccagctcctccgatcccgtcaatgccggcgtttgcgagccggcgcacctcgccggcggcagcttccgccacgccagcaagttcaggtgagctcctcgtcccagcagccggcgccggcggcggcggtgccgcgcgccatgcacgttgctgcgtctgcgtgtgactgatccgtgacggaaacgtgtgcaggttcttggacaaggcgtgcatcagggcggcggagcaggggccgaacacgaagccggagagcccgtggcggctgtgcacggcggccgaggtgcggcaggccaagacgctcctcgccgtggcgcccatcttcgcgtgcaccatcgtcttcaacaccgtgctggcgcagctgcagacgttctcggtgcagcaggggagcgccatggacaccgcgctcggggggcgccggctcctcgttccgcatcccgccggcgtcnctgcaggccatcccctacgccatgctgctggcgctcgt

SEQ ID NO: 70803 - DNA, 353 bp, Oryza sativa
  Clone ID: PAT_MRT4530_71339C.1
tcgagtatgtccttgatatacccacaaaaggggggggtgtttatatctaactgcggtgagacaaagaatgctccacaaatatgggttgaacgtgcttgatcatcctctcaagcacatgatggtgctgccagaaatacctcacacactagaagtgaaactgaaacatggccatactcgtatatgtcagcagatgcacctatgactgaagcacccgacccagtaaatataagcaatcctaacactaaggagcaacactcacgccatgatagggaacatacctcgtgccactttagggaataaaggatgtcagcatgcattgagactgccaaacaaagggacaaacatcgagtatc

SEQ ID NO: 70804 - DNA, 770 bp, Oryza sativa
  Clone ID: PAT_MRT4530_7133C.1
agaattgaaaataaattgtaagaaagtctatttctaaaatttataaaaaatcagggtacaaataatatatattctggattgtattcacgtccttaattagaaacttaaaatccacgcccccacaaaattaagtctatcagcacatccacatacagagcagagctaacagcagcagaaccagagtggcgatgaggatcgttgcggcagatgacgggaagctcctcgtggccgccgttgctgtcgtcgtcgccgtcaccgccgccgtcttcttcttccgcttggtcgggcatgggaggggaggatgccggaggcggatgcgagctccggggtctctcatggccaccttgctcctgaccagcaccgagttggtcaccccctgcacgttgttgttcacgtagatgttgatgctgcagcagcagctgccgctcgccgccactgacatggtcgcccccgtgctccggttgctccgctcggaggagcaatcgtctgcaacacccatcgccggcgaggtaggccggtcggaacggacggaaggttgatttctgaagctggagaaaacaagatctgcaacgttgctgcatcaccaagaaaagcatagcatatgctactacgagcacagctggggaatcacactttgcctctgcggttgggctactccccaggctccagcaatggatgtcaagaaagagcgggttaattacatgtcgctttgcgcttatctttgtatagcgtcctaacatgacataggcacatagcaaatcaacggtcat

SEQ ID NO: 70805 - DNA, 112 bp, Oryza sativa
  Clone ID: PAT_MRT4530_71340C.1
tcgtcggcgggcgcggaccagaagcggatcaggggacctttgaggaacttccccgttcgctcaccggaccctgtcgacgccagtgaagaggacgagagtaagcgaccccaaa

SEQ ID NO: 70806 - DNA, 669 bp, Oryza sativa
  Clone ID: PAT_MRT4530_71341C.1
tagtggatccccgggctgcaggtgacggagtgagaatttcgccggaagcccaaccaacaatgcagtcagcccggaaagtgatcccaattagctctactgaagtcccccggtaactgaaaaactcgatggaccgagggagaacggaggatgcgcgggatgcgctgcaggcgtgcagcggcggagctagcgagctttccgcggtctcgggcgcacatttgtccgcatacaccgccaacgattcgcaccgtctttcaaggcttttcctccattatcttactgtaagcagcctcctcccgatctgtgctttggccacaatgggcttgtaaaatgcgcgcacaagagctcacgcagcagcagcagcactgacgacatctcatgagctcgtgatggtgatgctaaccaaggctgaatctaatccatgtagtagtgttggcaattaggcactttgtttatccgcctgcaactttccaaccctcgaggcaaaacaagcaggtttgtcagataattttactgacaaatgcttggctttttcacgtgttgcccgctttcgactccaccatataagccttcacgcctgtccactcctcatcagtcagttacccctgctttctagactctggtagtgctcttgtcccccgtgggatcggcaagctcggctctgagagatca

SEQ ID NO: 70807 - DNA, 1181 bp, Oryza sativa
  Clone ID: PAT_MRT4530_71342C.1
atggctgccgcggccgccgcaccggcaagctctgagaaggaagtgctccccccttccctgacctcctcatcggagccccctcccctcttcgatggaaccaccaggttgtacgttgcgtaccactgcccttacgcgcagcgcgcgtggattgccaggaactacaagggtttgcaggataagatcaagattgtcgcgattgatcttgcagacaggcctgcttggtacaaggagaaggtttacccagagaacaaggtaccttcacttgagcacaacaatcaggtgaaaggagaaagcttggatttggtcaagtacattgacaccaatttcgaagggccagcattactccctgatgattctgagaagcagcagttcgctgaggagcttcttgcgtacactgatgcgttcaacaaagcatcgtactcatccatagtcgccaagggagatgtgtgcgatgaggctgttgctgctcttgacaaaatagaagctgctctgtcaaagttcaacgatggcccattcttccttggccagttcagcttggtggacattgcgtatgttccatttattgaaaggtttcagatattcttttctggtataaagaactacgatatcaccaagggccgacccaaccttcagaaattcatcgaggaagtgaacaagattcatgcctatacagaaaccaaacaggacccacagtttttgcttgaacacacaaagaagcgtcttggggagaagatcaaattagtccccatggacacgaatgataggccagcatggtacaaggaggtgtaccccaagaatacgctgccatccctggagcacaacaacaaaatcattggagagagtttggatttgatcaagtacatagacatcaactttgcaggccccagattgactcctgatacactgtttgctggcataaagaactatgatattactgaaggaagggctaacatacagattttcattaaggaattgaacaagatcgatgcgtatatgcacaccaagcaggatcctagcgaagtgattgctctcacaaagaagaagctcgggatatgaaacaaactattatgtatttttggtttggctgtgtacagctgttaatgtgaatttcccgtcatataattaattacaacttcgcggggcgttgtctaataaatcaatgcttcttgtatcattaaaaa

SEQ ID NO: 70808 - DNA, 508 bp, Oryza sativa
  unsure (1)..(508): unsure at all n locations
  Clone ID: PAT_MRT4530_71343C.1
gtgtttttttttttttttgaaaaactatccaatgtttaaattagtaacgcgaacgagtatattctcggtaagatctcggatgctttgaattacaattagaggaacgattaggaaagcaaacaaaactggaatacacgagaaggcaaacagcacctgggggggatagcgcagcagcccctctcctgtgctttggataacattttcttcgtcaaatcaccttgtgcccttccctttcatttttcccttccctttaccaaatccatttgcatttcctttgcctttcccccgtccctttccattgccatccggtctcctgttctttccattgccatccggtctcctgttcttctggaatttgccatctttcaagggtcacttcgngcctcctgttgttcttgtggaatttctggaatttactgtcttttggggatctgggcttgatgcgggggaatgtggattagctttttggtggctggtgttgtgggtgtcctggggggttgcgaatggg

SEQ ID NO: 70809 - DNA, 258 bp, Oryza sativa
  Clone ID: PAT_MRT4530_71344C.1
gcgcaacaccacaacaaccagcaacctgtgtggtgagcatacgtcgtcgagtgtgggacctgttcggcaggccttatggaaggagagttctgcttgtccagcagacttcagatacacacgtttctgtggcttatgtggataacaacgacacacactcgagtgatatgctccggatagaacagttaagacgagcgctgattgagctagagaagagagtacatatgagcgcagataatgctcagatggtggcgacatatg

SEQ ID NO: 70810 - DNA, 151 bp, Oryza sativa
  Clone ID: PAT_MRT4530_71345C.1
aagatggggttggcgttcgggaagctgtccagccggctgtccgcgaagaaggagatgcggatcctaatggtcggcttcgacgccgccggaaagaccaccatcctccacaagttcaagctcgggcgaggatcggcaccaccagtccccacca

SEQ ID NO: 70811 - DNA, 308 bp, Oryza sativa
  Clone ID: PAT_MRT4530_71346C.1
atgaaggaggaggcgaggcgactcctgctggtttggaatctggagcttctggaaggttcccctccctccagcgcctccacaagcatcgccgtctccttcgcctgctgccgattgtctgctcatctcattcacccccaagcgttgtcggccgtctctccgcccctaagctccggccactgcctccttcacccaccgcccaaggtcgtcggcagccgcctcgagctctgcctccttcaccttgcgcccaaggtcacggactgccgcctttccgtcacgccgagctccttggcgctagatccggtgtccag

SEQ ID NO: 70812 - DNA, 765 bp, Oryza sativa
  Clone ID: PAT_MRT4530_71347C.1
atgacgcggcgtgtcgccggcgtggctgcggcggcggcggccgtcgccgccgccgtcgtggttcttgcggcggcgagctgctgcgaggcgcgcgacttctacgtgggagggcgcgacgggtggacgaccaaccccgccgagccgtacaaccggtgggcggagcgcaaccgcttccaggtcaacgaccgcctcgtgtttaggtataacaaggaggactcggtggtggtggtgagccagggccactacgacggctgcaacgccaccgacccgctcctccgcgacgccggcggcgactccaccttcgtcttcgacagctccggccccttcttcttcatcagcggcgaccccgcccgctgccaggccggcgagcgcctcatcgtcgtcgtcctcgccgtccgcggcaacgcaaccgccacgcctaccaccccctcgccgccgccgccgccaaccgttccggcggcccccaccccacgcccgtctccgccgccgccggccgcgggaacgaacggcacggcgagggcgccgtcgccacccgttccagcaccggcccctgcaggctcgccgccgccgccgccacctcctccggctgggggaaacttcacggcgccgtctccggctggagggatgaacttcacggcgccggcgccggggacgaacgggacggcggcgccgccgccgcggccgtcgtcggcgccatcagtgaggggtggtgccttgctgatgctgctcgtcgtcgcgacagccggagcaatggctctcgtttga

SEQ ID NO: 70813 - DNA, 2878 bp, Oryza sativa
  Clone ID: PAT_MRT4530_71348C.1
tcttggcgtatgtaggcttctatgttgatcttctgtcttacggagctagagatggcaggagcaatcgtgagtgcttcagttggggtgctgaatccccttctaaccaagctttcctccttgatcgagggagagtacaagctgctcaaaagtgtgaagaaggatatcatctttttgaggaatgagctcagcagcatcagtgtcttgcttgagcatctatcgaacaaggaggacaagcttgatgggccgaccatggagtggaggaacaacatgctcgagctagcttatgatattgaggattgcatcgacctcttcatccacaagttgagttgtggcgatgccaatgccaactttgttcgcaagataggaagcaagataaagaagctatggggaaaacaccagatcacagagtgtatccaagaactgaagaatcgggttatggaggaggaccaacgtcgcaagcggtatcagatcgatgatttcatctccgagccaagtatggtggaaattgatccccgtctgctggcattgtatgaggaggtggagaggctcgtagggattgatggtccaagggagaagatcgttaagtggatcatgcacaaagattggtcatcagaacaacgcaaagtggtttcgattgttggttgggtggtcttggaaagacaactctagctaatgaattgtacaagacaatacaaggggattttaagtgtataacttttgtgtctatttcacgtacccctaatataaggaaggtcttggttgatatgcttaaaggacttgggagcaatggagatgtatctgaagatgagcagaacctcatcagtcatcttcgaggattcctgaaagataaaagtataatcataacaacaacaagaaacgctgccgtagctaaagcgtgtagccgtaccacatctgaaggctatcttcacagcatgcagccactagcagagcaagaatcacagagattattttaccggagagcttttaattctgagaattgctgcccgcctcacctggaagacatctctcatgccatcatatcgaaatgtcgtggtttaccattagctataatctccatagctagcttgctagcaaccaaatccgattcagaggaccagtgggtgcaagtgcatgatactattggtgcttcactaaactcagaggctcgagtgaggaaaatattaatgctcagttattatgatcttccttatcccccgaaaaaatatccgttgtatctaagcatgtatccagaggattattaaattgatagacaagaccttatatggagatggatagctgaaggattcatcgttgaagtgaagaatcaaacacaggagcaagtaggagagaactactttaatgagcttataaatagaagcttgatccaaccagttagtatccagtatgatggcagcgccaagtattgccgagttcatgatattgtgcttgatcttatcataagcctatcgactggacaaaatttcgtcgcaatagtggatgaacaacagcattggagttctttcaagaagattcggaggacctggttcccatccaatggcacagataatagaatagtcaagaagattacgaacaactgttcacaagttcgttcgctgctcttctttgagaatcctaaaccgaaacaaataccacaatttaagaaatgccatgctctgcgggtattggatctgtatcggtgtaggaacctggatagctagcatattaacagcctaacataccttttgcagttgaagtatctgaaggtttttggtgtaaatgttaccgagctgcccaaggatattggacggctgcagcaactagaaacactaactattcatgcaggagatgtcgacgaaataaacattccgtcaagtgtttgtagactgcaaaaactacagcgcctaaattttaattacccaatgagattgccagatgaaattggagttttgcaagctttggaggtgctatatcttaatagcattcggtacagcataaaatgtttacaagagctctctgttggctaaccagattaaggcagctgcgcatactttgtcctggaatttatgattttggaggtgatgtagcaaggttccagaggtacaaggaagccttttacttcactctcaatgagttgggtaaaaatagccttcgatcattacatgttacttgttctcctgagttttcagatacattgatggattcatgttgcagtagtgctccagatctcaaagagctttttattgatggcaatggaatatctaaattttcggatcggatggtctccctttgtaatcttgcctctcttcgtctctggaatattacaagcattgatcagaaagtggtcgtcctccttgggcatacccaagcttctctatcttgaagtattcttgtcccgaggcctgggggatggactcactgtaggctgtagtggatttccatgtctaaaggagtttattttcgacaacagtcgcctgcattggttgttgtttgaacctggagctatgcccaaaactccagaggctttgttttagtttgtatgcacgggaagcagcatcaaaccttgggctcgagcaaagctatgtgcacctttccagcctccagcatctcaccttctatctttgctgtaccaatgccactataacggacgtgaaagcagtggaagctaccatcaggaacgtgatcagcatccacacccgccgtcccactctcgtattgcggagatacttgcaagatcgaatggtaaaggaagatgaagaggagcagctaaaagacaatcaatctgctgggctttacatgtatgcttgtttgttgcattttgatcatagcaactgacctacgatcgcccttaattttgcagtgttcttcaggaattcagaca

SEQ ID NO: 70814 - DNA, 409 bp, Oryza sativa
  unsure (1)..(409): unsure at all n locations
  Clone ID: PAT_MRT4530_71349C.1
cagctaagtttttcttttctttattattattattaagggggaaatgtacaccccgtaggaatggtacaattgtgctgtagcacaaaagatgcagcagtgttaactataagtctataactatagcggcatcctctttgtgctgaacaatttaatgatacactggcctatatagaatgccaatttcttcgttgtagtgagatcgctaatactttgagttcagatcatgacacgcaactcaaccctgtgtggaatcatccctcctgtgatggctcctctgattcagcaggcggcgacgatggagcggtgtacttctggatggcggcgatgatcctctccttgtcccgcgtcgcgaacgccttcacccacgcgtncgcccacgcgtncgcccacgcgtncgcccacgcgttcg

SEQ ID NO: 70815 - DNA, 240 bp, Oryza sativa
  unsure (1)..(240): unsure at all n locations
  Clone ID: PAT_MRT4530_7134C.1
gggaaaaagaaggaaagagaagagagagagaggggaagaagagtagaggctgacatgtgggtccattgttattttggagagaactaatagagagtttgttggtttgactagccaaattaaatagagagttagctatatcggtgtttaaagagcgtaatttggagaagctgttggatatgctctaagaatcatataacgaaggtatattggggtgtacggtgcagcaaaaaaaaaaaaaan

SEQ ID NO: 70816 - DNA, 2841 bp, Oryza sativa
  Clone ID: PAT_MRT4530_71350C.1
atggcaggagcatttgttagtgcttcagtaggggtgctgaatcctcttctaaccaagctttccgccttggtcgagggagagtacaagctgctcaaaagtgtgaagaaggatatcatctttttgaggaatgagctcagcagcatcagtgtcttgcttgagcatctgtcgaccaaggaggacaagcttgatgggccgaccaaggagtggaggaacaacatgctcgagctagcttatgatattgaggattgcatcgacctcttcatccacaagttgagttgtggcgatgcgaatgccaactttgttcagaagataggaagcaagataaagaagttatggggcaaacaccagatcacagagtgtatccaagaactgaagaatcgggttatggaggaggatcaacgtcgcaagaggaatcagatcgatgatttcatctccgagccaagtgtggtggaaattgatccccgtctaccggcattgtatgaggaggtggagaggctcgtggggattgatggtccaagggagaagatcattaagtggatcatgaccaaaggcaagccattagagcaacgtaaagtggtttctattgttggtttgggtggtcttggaaagacaactctagctaatgaagtgtacaagacaatacaaggggattttaagtgtataacttttgtgtctatttcacgtacccctaatataaggaagatcttggttgatatgcttaaaggactcgggagcaatggagatgtatcggaagatgagcagaacctcatcagtcatcttcgaggattcttgaaagataaaaggtacctcattgtttttgatgacatttgggacataggtgcgtggaaggtggtcaattgtgctttcccagagaataatttgggcagtataatcataacaacaacaagaaacactgccgtagctgaagcatgcagccgtaccacatctgaaggctatcttcacagcatgcagccactagaagagcaagattcacagagattattttaccggagagcttttaattctgagagttgctgcccgcctcacctggaagacatctctcatgccatcatatcgaaatgtcgtagtttaccattagctataatctccatagctagcttgctatcaatcaaacctgatacagaggaccagtggatgcaagtgcacaattctattggtgttacactaaactcagacgtcgaagtgagaaaaattttgatgctcagttattatgatcttccttatcccctgaaaaattgtctgttgtatctcagcatgtatccagaggattatgtaattgatagacaagaacttatatggagatggatagctgaaggattcatcattgaagcgaagggaaaaacacgggagcaagtaggagagaactacttcaatgagcttataaatagaagcttgatccaaccagtttatatccaatatgatggtagggccagttgctgccgagtccacgatattgtgcttgatcttatcattagcctatcaactggacagaatttcgtcacaatagtgcatgaacaacagcattggagttctttcaagaagattcggaggacctggttcccatccaatggcacagataatagaatagtcaaggagattacgaacaactgctcacatgttcgttcgctgttctttgacagtcctaaaccggagcaaataccacaatttaagaaatgccatgctctgcgggtattggttctggatgggtgcatgagcctggagagccagcatattaacagcctaacataccttttccagttgaagtatctgaagctcaatgttgcaaatgttaccgagatgcccaaggatattggacggctgcagcaactagaaacactaattattcgtggaggaggacatgtcaacgaaataaacattccgtcaagtgtttgtagactgcaaaaactagagcgcctaattgttgattacccaatgagattgccagatgaaattggatttttgcaagctttggagatgctatctcttttttacaacatagagtacagcataaaatgtttacaagagctccgtcggctgaccagactaaggtatctgcgcataaggacgccttttggaggtgatgtagcaaggttcgagaggtacaaggacgccttttacatgactctcgatgagttaggtaaaaatagccttcaatcattacatgtacatgttacaaccaagttttcagatacattgatggattcatgttgtagtagtgctcccggtctcagagagctttctacttctggcgttggaatatcaaaactttcggagcagatgatttccctttctaatcttgcctatcttgtgatcttctataatactagaagcaatgatcagaaagatatcaacctccttgggtgtatacccaagcttctctatcttaaagtaatattcgcccaaggctgggaggatggactcactgtaggctgtggtggatttccctgtctaaaggagttgatgttcaggcatagtcgcctgcattggttgttgtttgaacctggcgctatgccaaaactccaaaggctttctattgagttgtttgcacaaaaagcagcatccaaacttggggacgtgaaagctttggaagatgccattaggaacgtggccagcatccagactcgctgtcttactctcgaaattctaaggcgctatgaagatgaaatggtaaaggaagatgaagaggagcagctaaaaggcagtacagagggaggtggaactgaagagcatcatattcagcagccactgatcatagtcggaaaccagaagcgctggaagccagtgctattcgggaattcagacaaagtgcaagctagctaa

SEQ ID NO: 70817 - DNA, 969 bp, Oryza sativa
  Clone ID: PAT_MRT4530_71351C.1
atgcgccacacgcaccgatgtaccgccgcggaccaaaatgtgcacataatttttttattttttatttttggaatggacgaattaagcgtgtgcagatggtatgagttggtcccagggttcacaaaaccgatggaatttcacgaaaaccgttcggatttcatgaaaccgctaggtctcggttatgaaaatcgatcggtattagctggttttcgtacggtgttgacgtacggtgttgaccgaaagtctagtccgccctacaaccgactcgttctacatcaaagaaaagtattactcttgggaaataaccgcatccctcgtagggatgtaaatggttcgaaaagtttccggatttcggacgtcttttctctatttggaaagagcgatgctctggtgctctctactggtatgataaatcctttcatccctatccgagtacgtagaatccacttgagccttatcaccggtggggcacaggcaccctacaatgagacatctgaactgaaataccgcgaatacgtgctagctggacccttgcaaaatcactggaaaactggcagctactggagtagaagcaccgggatccgaagcagcacgggcaacggtgggaggagcggggccccgagcggactcgacaacggtgacgacttgcggcaacggtggcgggcggtggccggcttggcagaggacggcgggcgcggggcggcaagcgaagggcagcggcaggttcggcccgtgatggacggctcgggcgggaaatgggtgcggagcggcagcaggaggcaacgcagtggccgggagcggcggcgacgccccttgcccgcccgggatctagagacggcacccctctcctgcccggatccagcgatcgaggccctcaatctagaggcggcggcagcgacgtggccaggaacggtgtggcgctcctccccgtccggatttggcgacgacgacgacgagctgcgacgcagc

SEQ ID NO: 70818 - DNA, 2652 bp, Oryza sativa
  Clone ID: PAT_MRT4530_71352C.1
gcaggagcaatcgtgagtgcttcagttggggtgctgaatccccttctaaccaagctttcctccttgatcgagggagagtacaagctgctcaaaagtgtgaagaaggatatcatctttttgaggaatgagctcagcagcatcagtgtcttgcttgagcatctatcgaacaaggaggacaagcttgatgggccgaccatggagtggaggaacaacatgctcgagctagcttatgatattgaggattgcatcgacctcttcatccacaagttgagttgtggcgatgccaatgccaactttgttcgcaagataggaagcaagataaagaagctatggggaaaacaccagatcacagagtgtatccaagaactgaagaatcgggttatggaggaggaccaacgtcgcaagcggtatcagatcgatgatttcatctccgagccaagtatggtggaaattgatccccgtctgctggcattgtatgaggaggtggagaggctcgtagggattgatggtccaagggagaagatcgttaagtggatcatgcacaaagattggtcatcagaacaacgcaaagtggtttcgattgttggttgggtggtcttggaaagacaactctagctaatgaattgtacaagacaatacaaggggattttaagtgtataacttttgtgtctatttcacgtacccctaatataaggaaggtcttggttgatatgcttaaaggacttgggagcaatggagcttttatgtatgatcattcatccacattgatgcgaaagtatgatgaccggatcataaatttaattgtactcacgtacctcattgttgttgatgatatttgggacataggtgcgtggaaggtggtcagttgtgctttcccagagaataatttgggcagtataatcataacaacaacaagaaacgctgccgtagctaaagcgtgtagccgtaccacatctgaaggctatcttcacagcatgcagccactagcagagcaagaatcacagagattattttaccggagagcttttaattctgagaattgctgcccgcctcacctggaagacatctctcatgccatcatatcgaaatgtcgtggtttaccattagctataatctccatagctagcttgctagcaaccaaatccgattcagaggaccagtgggtgcaagtgcatgatactattggtgcttcactaaactcagaggctcgagtgaggaaaatattaatgctcagttattatgatcttccttatcccccgaaaaaatatccgttgtatctaagcatgtatccagaggattattaaattgatagacaagaccttatatggagatggatagctgaaggattcatcgttgaagtgaagaatcaaacacaggagcaagtaggagagaactactttaatgagcttataaatagaagcttgatccaaccagttagtatccagtatgatggcagcgccaagtattgccgagttcatgatattgtgcttgatcttatcataagcctatcgactggacaaaatttcgtcgcaatagtggatgaacaacagcattggagttctttcaagaagattcggaggacctggttcccatccaatggcacagataatagaatagtcaagaagattacgaacaactgttcacaagttcgttcgctgctcttctttgagaatcctaaaccgaaacaaataccacaatttaagaaatgccatgctctgcgggtattggatctgtatcggtgtaggaacctggatagctagcatattaacagcctaacataccttttgcagttgaagtatctgaaggtttttggtgtaaatgttaccgagctgcccaaggatattggacggctgcagcaactagaaacactaactattcatgcaggagatgtcgacgaaataaacattccgtcaagtgtttgtagactgcaaaaactacagcgcctaaattttaattacccaatgagattgccagatgaaattggagttttgcaagctttggaggtgctatatcttaatagcattcggtacagcataaaatgtttacaagagctctctgttggctaaccagattaaggcagctgcgcatactttgtcctggaatttatgattttggaggtgatgtagcaaggttccagaggtacaaggaagccttttacttcactctcaatgagttgggtaaaaatagccttcgatcattacatgttacttgttctcctgagttttcagatacattgatggattcatgttgcagtagtgctccagatctcaaagagctttttattgatggcaatggaatatctaaattttcggatcggatggtctccctttgtaatcttgcctctcttcgtctctggaatattacaagcattgatcagaaagtggtcgtcctccttgggcatacccaagcttctctatcttgaagtattcttgtcccgaggcctgggggatggactcactgtaggctgtagtggatttccatgtctaaaggagtttattttcgacaacagtcgcctgcattggttgttgtttgaacctggagctatgcccaaaactccagaggctttgttttagtttgtatgcacgggaagcagcatcaaaccttgggctcgagcaaagctatgtgcacctttccagcctccagcatctcacc

SEQ ID NO: 70819 - DNA, 777 bp, Oryza sativa
  unsure (1)..(777): unsure at all n locations
  Clone ID: PAT_MRT4530_71353C.1
cggcagcatcagctgcagccgccgctgctgaggctactacacgtcctgcgggggttgatactttctggacgtcctgcaatcgctgccggatgcagtatgagtacttgagaatttatcttaaccataatcttctgtgtccaaactgccatcatgcattcttggcagtagagactggatttccttgcaacgggagcagttcttcattctcatggtcaaccaaacagcagccgcagaataacaattccaccaagcattcatatggctcgacaagcaggacttctagcattccggggacagggcatgggggttaccagcaagatggtacttatgattcctacaacaaccaaagcttccaatggaatcagtactccaagacaacacctgcagctggtacaaatgcatacggtacccaggccttggagaaaccgaaaaggaaacatgaagagagctacagttacaactattctgctactggcaattcatatggccatgagagaactaattcaaggcgtggccggttttcaaagaggagaaggcatagtaatgatggttacactactatggattttggtggagataacagagaaactgtagctgccagcacagaaacaactgctttcactgacgtggcagtggcacaagtcaatggcacttcaggggaaaagttgagatctgcagtgagtggaagaagagcaaacgttttgagagagatttctcagattgatacacnggctctacttattgagaaagccaaggctgccatccaggaaaaattac

SEQ ID NO: 70820 - DNA, 528 bp, Oryza sativa
  Clone ID: PAT_MRT4530_71354C.1
atggatgtgtcagtattcaacaatggtggcggtggccgatcgactaacgtcaacagcaatgatattgtaggtggtacaatgattccaatggcattcggggtagatggaaggcggccattggtgtccgaatctatcgtgcctcggcaagctgcattggagtggcttcttcttctctgcattcattggatagcatcgccaagcaaaggcactagaaggagatacatgcatcaagcaaacatgcataagtatgtggacaacaagggtaaagcaaatgttgccatctacagcttgcacatagtcctgtttcttaagccatcactatttgttcagccttacttcttccgtttcacaattaaccttactaaaatttggcaatgccaaaacttgatttgcgctagccgctgcctagtcatggctctaagcgtaagatctgaggccgccaccatcacagggatccaaaccaagattcattttattgtcgacttccttcaagctctaaagctatcttcagctatgggtctcatttaa

SEQ ID NO: 70821 - DNA, 899 bp, Oryza sativa
  Clone ID: PAT_MRT4530_71355C.1
ttggttcaaattagtttgaatgtacaagctgatgtggatgtttatcatccctctatctctcacccatttttttcttgaattttcttgcgttaaccatagcttctcttctggatttggaatttttttttccgccgcctctccgacgactgcctgccgccgccgcctcaaccgacatcgccgatccggtctcccgtcgttgtccctcggccgctgaagtctcctcggactgtctcaaccggcatcaccgccgccaccgccgtccctccgccactcaaatcgtcacgcatcgccggtctcctccgacaaactgctttggcgacctcctcctcggcctccgcctcaaccgccgcctatacggagccacgccgccgttcctccgccgccgaaaggttaaactttttaattgcatctcagacttttgcatggtcttcaactggcaataatcttcagacattttttgagggagctgaatacaatttcacgtgggggctttcatcagaagatgcagtagaacgcttgcagctgtccggtgcaagcagattggagaagtttatctgcctttttctgatcaattgtttacctacattcctgttctgaaatcctcatattttttacttccttttggaatagaacaagagcatcaagttcctcagctttatgtggaatcctttgtcctaagtgatttgggcagcaacagtgatggcattggtcttagcaaatggtgggtgtaagtgatctgattttgtgttctttggaatataggatgtaaacatcgatgattgttcaacaatgctaaattcatccaaagaaacccataatggttttcttcaatatccgttcaaaaaaaaaaaaaaaaaaaaaaaaaaaaaaaaaaaaaaaaaaaaaaaaaaaaaaaaaaa

SEQ ID NO: 70822 - DNA, 517 bp, Oryza sativa
  Clone ID: PAT_MRT4530_71356C.1
cttagtattccccccctgttatcgtgcccatgtcgcgccgctccggagcgcggagcgcggccggtgtgggcttacgccagcgccggccggagctccggaggtttaccgggtgccgcgcggctacgggtggtgtgccgtccgcggtggctaccgccagcgccgtgaagccggctaccgccggtgccggtggctacggtgcgcgaccgtggtgtcggcagctacggtggtgggctacgcacccgccggcaggcgggcaactccgacgggaactgggaggaactggagcggtggggccctcatgggccacagtgtatgctatgctatgctaatgcgagctaccatgcatgcatgcatgccgatcgttatcatcgttagttttggtgtgggaactatgctaagtgttggtgttaactgtgtgggttgccccatctggtgtttttgatcccaagaagaaagctcgtctcgttgccttggatcaaaggaaggaagaatgaatctaggggctcaaaaaaaaaaa

SEQ ID NO: 70823 - DNA, 517 bp, Oryza sativa
  Clone ID: PAT_MRT4530_71357C.1
gcagcgcctctggccgcaagtttgatgttttgagtgcaaaagtgtataaggcaatgatgcagctgcaagtgcgcctgctgcctgactacagctatactatgtggcttagcccatatgaatggagttcgtaaggcagcagtatggcatagcggcaagcccctgtgatgcacaatgcagttgcatgttgcaactgagaaatataccaagtctgggcaacagctgcaggctggtggtgcaacagtgctcactatcaggatattaacattggttcaggccatagcgcagcagctacaactgccacgcagtttggatgatgctctactttgggctcggaatctgactcaagctcaagctcaagctctgttggctttgaactgcccatctagatatgggtatgctaccctgaggtactatagtcgcacctagtaccattaccacccttgccggtgtattgtactgagttttaacaatatagtcgctttggaagttaaaaataagctcagatatctaaaaaaaa

SEQ ID NO: 70824 - DNA, 2312 bp, Oryza sativa
  Clone ID: PAT_MRT4530_71358C.1
cacgagctccacctccacctcttccaacgccgccgcgtccccctcctcctccctcggcggcccctgcatctccttccccctcgcgtcttcgccgtcgcgttcaccttcgcggctccgccgccgcccggcggtagtcgacgaggcgaacagccatctccacgtcggcgcggatggtggccgaccaccactggttccgcctctgactgaggacaccaataaccggcgtctttgaattctggatacgcagatttgcgtgagcaacacgcgtcggagaaagtttgttcgacaatcttcgccggttgtcaccaccacgagtgatacttcattcagaaattatcgaataagggagtcggaccacactccctccgctgatgtcggcatcgccgagggagaagcttccgtgatccatgatcaagacgaaagatctgaagagtgccctttgggaagcacaccaaaatgaagaaaagagactaattgatcaaggattaataaaaatgaccaatgaagcgataagagaaaggctaataggcaccagcgggattgtccgaaagattaggcatatccatgctcggtagacgcagttgtcgcccgtcactccgcgcactgaataactttttcctcatcgaccactagtcctacactaccgataactctttcaatggtccccgcaactgatagggtgcctatggacgctgaggtgtcagggagacttgatcgaatgaattgtaatgcaggagcattaaaattggaaattgcggacacgggcaggttgagtgggacatttgtgaactcacgggcaggtcgatatcttgatgtctggttcagacacctggttctcccagctgtattagtagatgttgtcattataaatgtaagaagggcatcaaccctctctgtccagatgtcactgaaaaatcagcggatcagtgctggtattggtatagcatctgatccaatgatgagccgtcgaagtggaaagaagcttgcaatggaggatataagtatttgcctgtgctctccgtagggtgtcgaacagttaagtttctttggacgcttgggtggacatggtggtgatggagctgccagagctgtcagcaagatttttccagaaaatgtggcaactcttttgtctcaccatgagacaaaagaaaaggttctttcatactctgatgcttctgacgttcttagatatgcttttactatgacagaagctgcaatcgatcatgagtatgaggggtgcacagcaacagtcctgctgatttggtttgatcaaaagaaagactgttttgcccaatgtgctaatctaggtgattcagcttgtgttatgagtgtcaatggaaagatgattgaaatgactgaagatcatcgagtagctagtgtaactgaacgagctaggatagcaagagctggacaggccctgaaagctggcgaagtccggattaatggacttaatctcgccaggatgttcggagataagtttctaaaagagcaagattcacgcttcagctcagaaccatatgtgagccaagctgttcacattacaaaagcatgcacagcttttgcagttattgctagcgatgggctctgggatgttattagtactaaaagggcagttcagcttgttgttgagggtagggagagaaacagtggtgatagtgcctcggcggacaaagtagccaatcgtatactaagtgaagctaggaatttgcgaaccaaggacaatacatccgtaatatttgtagattttgacatcttgagaacagaccattgtattgccaaatgattttgactatttttgggacaccatattccaagaaatcatttgcctggctgttgctcgtcgcttccataattttgcttcagctatggtgtcaaagatgctgcaatgtcatgaagtgttgcctacctatcctgtgactgtaaattatgtggacttttaagttagcttattattggatctgatagactgatgtaaccagtgtcattgccttctaccactgcctcatcatttgattaggtggttatctttcagtagatttaacttcaaatttcttgatgcaacccgtgcactctggtaggccaagccctaacctgatctgcttcatcttcaacaaccttgcttttatcctttgcaacgattagtttggatgacttattttgtgaatctatctgtagttagggtatgggtacagtctacggagcagagccttccttggtatggtctccccgttatcttctctcttgattaagccctaatcttgattcttgattcagattcatgctaggcccatctagccaccctaaagtccttc

SEQ ID NO: 70825 - DNA, 312 bp, Oryza sativa
  Clone ID: PAT_MRT4530_71359C.1
atggccgccacagcctcaccggcggcgagcttcgcgctcttcgtgctgctgctggccggcctcaccatgggaggtggaggggatgggggagaggcgggcgtcggcgggtcgacgagctcggccggctccggtggcagcggcagcggcggcgatggcgtccacggagggaacgtggagcaaaggaggagggggagacttccttccccaccgtcgcgggcggcgtggagctcaaacacgccggcactgtggcggccgcccccttccccacgcgcatccatccgccgcagttgccgccccgccatcgacgcgtag

SEQ ID NO: 70826 - DNA, 2444 bp, Oryza sativa
  Clone ID: PAT_MRT4530_7135C.1
caacctttggcccgttagtggccccctatttggtaaggaagacattgtaatgttcacttagctaatgatgcctgggtgggaaggtttagtttaatggaggatgaaaagaagagaatgataagacctttcaccatggatgaggtgaaccaagtcatcaaaagtatgaaatctcaaactgccccaggcccaaatggctttcctgtgggattttacaagcaattatgggagcattttgggggattaataaaggagatgctggatgattttcatattggggctttaaacatagacagaattaactatggggtgataactttacttccaaagatcaaggatgcttgtaccatcaagcaatttaaaccgatttgcttacaagattgtgattttgaaaattgtgactaagactgtaactctaagattttctgagatagcagacaaggttattagctggacacaaacggctttcattcctgtgaggaacattcttgaggggtgtgtgattttgcatgaggtgcttcatgaattgaataagaaacagttgtcagggatcgtgtttaagatagattttgaaaggcgtatgacagaggtaagtgggatttcttgtatgaggttctgggaaaaaaagaactttgatcctgtcatgatcaattggatcaaaaagataaatgaggggggtaaagtcagtattaatatcaatggggagcagggtcctttcttcaaaacttttagagggctgaggcaaggggatcctctttcccctttgcttttcaatttagttggtgatgctctagctgtcattcttgataaagcaaaagaaagtggggttctaaaagggctggtacctgatttggtccctggggtgatcactcatctccaatacgctgatgacacaattctttttgctcaagtgtctgatcaaaatattctaagcttgaagtttctgctgttttgtgtcgaggaaatgtctgggatgaaaataaactatcagaaaagtgaggtttatgtgctgggggttagtaaagaggaggaactgaaagtggccaacatgctgaattgtaatgtgggaaagatgccatttacatatcttggactcccgatgagtatagagaaaattgttatgagagatttgtgttacatctcccagaaggttgaaaaaagaatgcaatcttggaggagtgggtatttgtcttatgggggtagggaaattaagatcaactcttgcctatctagtgcccctctttatgccatgggtttttactctcttcctgagggttttcatgctaaaatggatgctgctaggagcaaattctattggcaaggtactggggagaagagaaaataccatatgatcaagtgggaggctttgtgtcgtccaaaagagttttgggggtatgggcttcatgaatactagggtaatgaacatttgtctgctttgtaaatggattatgaaactagagaatggggcccctgatatgtgctttgaggtgttgagaaggaaatatctgagggggagtttttttcagagctctgaagtggggggtctcaattttggaaagggctacaccattgtaagaaatttctgcagagactggtagaaaaaaaagttcatgatggttctaggacagatttctggggggacatttggtgcgggaatgtaccactgagagtagtctttaataatttgtttgatataagtgtgcatcagaaggctacggttagggagctgtggaataatggggattggattctgtccttccgtaggatcctgagtacagagagagaacaagagctgaatgacttgaagaggatgcttcaatcagttcagattgagggtggttgtgatgaagtaatctggccctatactaaacataaatcctttaccgccaagtcaatgtataatcagttaatttttgggggattaaggattcagtcatgtgggctgtttggaagagtagaatccctcttaaaattaaacattttctctatttggttgggagaggaaagcttccttgtgctgttcaattagtaaaaaggaattggaaaggggggaatgagctttgcaaactatgtgggaaaaatgaaacctctgatcacattttgtttcactgtcctttagctgtgtttacttggtgtgtgattaaagaggccttgcatttaaaaaggagacctttctcgttctgggattgcactagctttgtttgggataggggaaaaaaagggtttggatggtgcttttggctagtatttgttgggctttgtggctaataaggaatgactgggtctttaaagatgttctggtttcttctcccttacaggtcgtttacaagtcactctcgctggcgcaaaagtggaaggtgttcctaagaggagaagaacaaaaggtgttggatggctggcatgaagctattatggacaaactgcgacaagtgaaaccgttggtcctt

SEQ ID NO: 70827 - DNA, 254 bp, Oryza sativa
  Clone ID: PAT_MRT4530_71360C.1
ccacgcgttcttttagctaagctagcacgcacccacggggaggttttacacctcgagctcgctggccccggcagcgatggtggccagagacctactcctcctgggtgccaccgtcacgtccacccatgcggcgcgcctcctcgacgaacaactcagcaccggcgccatcccggcgatccccgggggccccggagagacggaggaaggccccgggatcccggtgaccctccgcctgccccgagagccggtggttg

SEQ ID NO: 70828 - DNA, 1742 bp, Oryza sativa
  Clone ID: PAT_MRT4530_71361C.1
gcacgcggctccgccgtgcagtacagaagagaagaggagagaggaggggtctcgaaatcaaagttgggagaccgagcgcgctcgatggagcccaacatcgtccccgcctacggctgctccggtaacctcgccgccgccgccgccccgccggagtaccgctgcgtcacgcgcctccgccaccgccgcctcctcaccttcctctggctccacggcttccgatccaccttcgaagcgatggcggaggagacgaaggtgctagtgtcgttgccgcgcctggagcgcctcatcaccagcagcatgtgggacgacgccatcggctacatctgccgcttcctgccgccgtcctccggctccaccggccagcgccgccgccgcgggtcgcatctcagcgaggaggcccagaccctcctcctcttcctccacatgcacaagtccttcgccgacgtcgtcgccggcaacaaggccggcgctgcctggtccgacaagcaccgccgcctctatgcccaatctagcggcctctccccctacagccacgccgccagaatccgccgctccatcctctccttcgtcttgtcggaccgtaccagggagtccttggactgggggcgcgttagagagcaagtagcgcagatcgtccgaagcttgcttcatagtactccagagctcgtcggatttgtggacttgccgggaggcatggtgaagccgcataacgtgcttcccattggcttcggtttccgatccaagcgtcacgtgagacagcaaagccacccccaagcatcaactattgccaagctctatcttgagatgaagagatgtttcactgttaattctgcacctgtgacaaccggtaaccacacatatttctacacagaaggactgtcaaataaggcgaggagctggatggcggatatccttgatttaagcttacgtgctggctgcaagcgttcagaacaccatgaagggtatccactccaatcaagttctctcgttgctgcaatcacacagactatgtttagcaccataacaactgatactgaaaattctggaattgcttcagcgacaaaaactggtgttcctgccagtacagtcttgcaaactttgattggcaccatgataagtcctggaaaaaaatctgggatctcatcagtgacaaatgcaggcactgatatgcattcaagtcaagaagattgccatactgagaattattgccagggtttcactccaagaaaacatccaagggaagaagtggaacctgaggaagatattagccctaaaaggcaacaaacaactgtgaagtttggtgaagcaagtgtgagtagcacaacctactctgtcgactagggtaaagctcgcttagtggaactctccatgtgaattcggatgagctgcagcattggggctgtgctggctgcttcctgtgtgaaaagtagacagtcgatgaagtactgccgattctgttggaacattaggtggttttaatctgctgctactgctactgctactgctacctagctgaggctttcatatctcctaaaaataattatgttatccagcaactctagctgtttctctagctaagaactattctactattaagtagacttggtcagactaaaccactctaagatgagcgcacgtgcagtatgtttgcttaactcgtgtaagacttatatgtggcattactatattgtcattagttccctatcaaaaaaaaaaaaaaaaaaaaaaaaaaaaaaaaaaaa

SEQ ID NO: 70829 - DNA, 585 bp, Oryza sativa
  Clone ID: PAT_MRT4530_71362C.1
atggcgcgcggaggcgccgctgctcgtggtacagcacctgcacaaccgtctgcaccggcaggcggtcgttctgcgccgccttctaaccttcaagtagatgtcgatggcgcggtacatgccgtcctcgttgaacctggcgtgctacgggatgagctcagcgagggcggtgaactagtcaatggacaggttctcgtcggaggcgatcttggcgaggtagttctccatgagcctgccgacctgggcgacgtcgttgtgcggccgcgacgctgccgagctgaagtcgtcgtcggtggtgcagtccagccgtggcggcaccgccggcgcatcgccctcgtggtcgaggtagccggccaggatcctctgcacggcgtcgatgtcgtaggccgttgtggctgcggcgtcgggcgaggaggacaggatgaggaggtcgtcgagcacggcctagccgagctgcgccgccatccgcttctcgaggtcgagccggcacgccagcgacggcgacgcggcgccggccactgctcgcctcccgccaccggcgctccctcgatagaggggaggaggagaaggagagagtggagggtatga

SEQ ID NO: 70830 - DNA, 114 bp, Oryza sativa
  Clone ID: PAT_MRT4530_71363C.1
atgttgaagctcaatcaatcggagaaaattaaagatgagggcgagttcacgctcccacagctctcgggccgatttccagcgattttggagggcggtttcgctgaccggtgttaa

SEQ ID NO: 70831 - DNA, 446 bp, Oryza sativa
  Clone ID: PAT_MRT4530_71364C.1
ttgtaagcagccatgtcagatgaagaaattgaggaaccaaaacggaggagagaatctgggggacaatattgtgcggtggagaaccgttaagaatgctaatggcactacatcttgtgaaagtaatgcgcgcattgtaaaatggaaagatggaacgatgcagctgctgattggtaatgaagttcttgatatatctgtacatgaagcacatcatgatcagtcccatctgtttctgaggaatgggaagggtagttctttattacatggtaggcttttacggaaaatgagatttatgccatctttcttgtcttcgaaatcacatcgcttttttacttgcttttgtgaatatcagattaagaaatacttgtatgattcaataattgatcgattctaatgatccttgtatagtgctacatgtataatgttatgtcttttttttcaaaaatttc

SEQ ID NO: 70832 - DNA, 915 bp, Oryza sativa
  Clone ID: PAT_MRT4530_71365C.1
atggccgccgcgggtgcgggggcgagcggaccggcggcggagacagcggccgcgacgttccggcgggtgtacggcacactcaaggcagagcttctcaaggacccctccttcgacttcaacgacgacgccatccaatggctcgagagcatgctggactacaacgtgcttggtggtgagaaaaacatgctattcagaaacaatgcgaccaaaccaaacaatggcacattgcgatatggttggcaacttcaggcctattttctggttcttgatgatataatggataactcacaaactcgacgaggaaaaccctgttggtttaggcttcccaaggtcggcctcatagctataaatgatggactcgttgtttgaaaattatgggaaatcagatccagcttgtgttgccaaagtgaaggatctatataacgaacttcatctccagcgggtgttttctgagtatgaaagggagagctatgaaaagctgatctcagccatcgaagcacaaccgaatgaagcagtacgagcggttctgaaatcttttatgcacaagatctacaagaggcgcaagtagaacacggctgaaacgtacggccaatttttgcatctcgtgtattatattatgctcaagtgaagcatatcctagttgagatgggtgtttactttcaaagccaggatgattatctggactgttttggtgaaccagaaattattggcaaggaaaattatgggaaatcagatccagcttgtgttgccaaagtgaaggatctatataacgaacttcatctccagcgggtgttttctgagtatgaaagggagagctatgaaaagctgatctcagccatcgaagcacaaccgaatgaagcagtacgagcggttctgaaatcttttctgcacaagatctacaagaggagcaagtag

SEQ ID NO: 70833 - DNA, 285 bp, Oryza sativa
  Clone ID: PAT_MRT4530_71366C.1
aaccccgaaacttcttatattttgggacggaggtagtagcatatacattgcttgttactcttggaggttgccgcctcttagacggcttgtggaggagttgctcggtgacctctccgagaagattatggaggaagcccggtgccggttgtgagtggtttggagttcaccacctttggagtgaaggaagaactaccccgagtgatcgaggcttgggtagtcctctccatgggccggctcccgccttgcccacccctttacaaaggatgtgtgcggtggcttcgtggt

SEQ ID NO: 70834 - DNA, 947 bp, Oryza sativa
  Clone ID: PAT_MRT4530_71367C.1
cccggggatcaagcccaaaaggtctatcaccaatacgaacacaagttgcagattttagcctatcaagttaacccccaagaccccaaccgagccaccgttactgcccgggtagaagaaattagccagccctttaccctaggtaatcaacagcagaagggctccgccaccaaagatgacttgactgtgcgctatcagctagtacgacaccaaggggtttggaaaattgaccaaatacaagtggtaaatggcccccgttagtgcgtggcgttaactccccttttgaccaatggcatacggctagatgcccccataggtacggaaacctgcacttccgagaactaagcccctaccgtcactataagagtgtgaacgtgtcggccccaggcaatggattggaaccatggcttttcggcccatcgttgtgtcttatattcttacttgttaacgggagttaattaaaattatgggaaaagttgttgggattgacctcggtactaccaattcctgtgtggctgtaatggaagggggtaaacccactgttatcgccaatgcagaaggttttcgcacgaccccatcggtggttggttatgccaaaaatggcgatcgcctagtggggcaaattgccaagcgtcaagcggtgatgaacccgggcaatactttttattctgtcaaacgattcattggtcgtaaatttgatgaaattaccaatgaagccaccgaagttgcctacagcgtagttaaagacggcaacggcaatgtgaaactagattgcccagcccaaggaaaacagtttgccccggaagaaatttctgcccaagtgctgcggaaattggtggacgatgccagcaagtacctaggggagaccgttacccaagccgtcatcaccgttcctgcctacattaacgactcccaacggcaagccaccaaagatgcgggtaaaatcgccg

SEQ ID NO: 70835 - DNA, 559 bp, Oryza sativa
  Clone ID: PAT_MRT4530_71368C.1
ccgtcaagaacccactggaactccaactccggaggtgcctcccccccaaccaaattcaaatccaaggaccctgatctgctgcccgatccaattaatattccacctgactgcatcgtcgtgctcaacgacgacgacgagcctgcagatcggccggtcacgccgcccgccatcatccaggcccaggcccaggagacactaccgtcgctgaccctgagccttagcctttccctgcccggcgccgctgctgctgctgctgaggttgaggtggcgccgccccgcccagggcactggcagctgcttctgagatccaagacggcagcagcagatcatcatcggcatcgcgtgtcatgttgcaggtgatgcgacagatggtgagggaagaggtgcagcgctatactgcgcagctcgcctactccctcatggcccctggcctcctgcagccgtaggcccccaattaggagcattcattttcagactttgttcaaacatcgatcgatcatcaaataaaaatttctcaggaggagttgcatgcttgaataaaaaaaaaaaaaaaaaaaaa

SEQ ID NO: 70836 - DNA, 1347 bp, Oryza sativa
  Clone ID: PAT_MRT4530_71369C.1
atggcctatgctacttacttctggtccaataccctcaatgcttttctattcaatcaagggccaatgactcccaccctgctcgatatcaccatgcttactggattggatgttgtgaatcggccacctctgacagatgtagaattcccacggctggagcccactaccaatgatgatggagaagaggtcacccatcgccgatgcatgtcgtatggagaagctgcatcgacaccagccgattctggagcaaagctatcagccaaactactcaaagactggttctgcagtttctatgagggattccagagagatgctcgggtttggttcccatatgaggattcagtgaactttgacctcccagcaaacttcagatttgaggatatcgactccgagaaatttgacaaatccagagaagtcttctcggctgctattagtccttgcatccttcctgttggcatccaccaagggagaaatatacaagtgtcctatgagttctaccatccgatgagctcagctaggcaatttgaaatggggcagctaccaatcggcttgttctttgccgataagatctatatcgagaacatagaactggcaaggttcaagagtaggaactttgacagatggtgggttgaatggaagcaacatatattccatcagtcggcttctatgtacatgacagacctatttcctgatgttgtccctcagacaacagaatcttctcctcctcgcaagagcaatagcggtagggacataatatatgctccaggccttctaccaaatggaggtggattagctcttccagtcatcggctaccatgccccaggacctcaaaaaaagaagactactgtgaggaagaaatcggcagcaacaacacttaagctagctcgaccagaagtcaccaagttgaggaagaataacaaaccagccgctcctgccatcccagtcttaactgatctattttcttttgacatcaaggattatcttgatgaaatagaagaagacaccaccagtaaagccatagctcctctgtccgatgatgtgaaaagaacacttgaagacatctctcatcggctagaagcatcatcattagatagcttagtagtcgactgtggatcaatcaggactagacttcatgaaattcagtctttgatcccagatgacctagctaatattcttactctagcagtttatctcgaacaacatcaattcaggctggagaaagccaaacaaagattagctgaccggcgggaacgcgaggacattgaagctaccaagtcaatcggcaacttgtgcatgaagaaaaggccaagcttgatcaactctctgtcgggccgattcaatccaatatag

SEQ ID NO: 70837 - DNA, 270 bp, Oryza sativa
  Clone ID: PAT_MRT4530_7136C.1
atgccgctaggcggaggatccattaaacaaagtccaggaggaagcattgggctaggaggacctgctaggggtcatccaaccccgtcctggctctgctggcccaggcccaagctgaaggcggttacaactgacctcccaatgacggctgtggccggcagccccctgccaaaggagtggtcaggaggcggcccagaagttcggtcgaacaccaaggttggccgaatcgacatcggcgcctctcgccatctgcttccacgtatacgctcctga

SEQ ID NO: 70838 - DNA, 343 bp, Oryza sativa
  Clone ID: PAT_MRT4530_71370C.1
ggaccaaccaggccggtgttttatctattgaagtagagcgagtacatggtgggatcctttgagggtgccttgactttaggaagcaaggagggtgtctgactaccgggagaaccacaggctttcaggatactatcatgggaaatattgaaccatgtgaaagcagctcatgtggaagagcagcgatgtaacgcatttgctgaaggcgctagaggaggcctataaggcctacccggaggcattggtctgaatgataactttggacagcttgaggcatgggccgacgactagctggattgcatacacgcccccatgctgccaggagcctgcatgcaactaagctaag

SEQ ID NO: 70839 - DNA, 702 bp, Oryza sativa
  Clone ID: PAT_MRT4530_71371C.1
atggcctccgcagcatacttttggtccaacaccctcaacgctttcttgttcaaccaagggccgatgattcccactctgctcgatatcaccatgcttactggattggatgtaactgcatcggctaaccccatgagcttgaacaccaaaaaccagtttgattttaggaccaagagcataggagtaggaattttgacagatggtgggggtgaatggaagcagcatatattccatcagccggcctctatgtacatgatagatttatttccagatgttgtccctcagacaacagaatcttctcctcctcgcaagagcaacagtggcagggacatagaatatgctccaggccttctaccaaatggaggtggattagctcccccagtcatcggctatcatgcccccaagacctcaagtgacggtggcacaaaccacggcgacggcgacgctgtgggcggcggcgcactaatggcgcacggcagcggcggctgtggcgctacatgcgcccacaggaagaggagggaggtgggaggatgcggctcagcagtctgggccggcttgggccgcaacgggtggcggctggggaagacgacaactcgtcgcgtccctgggtcggctgggccgagcccgagcaaggagggaaggctcaacaaaggggtggatgaggacagcgaggatgaaggtggtgaaaccggcgacgacctgtaa

SEQ ID NO: 70840 - DNA, 2141 bp, Oryza sativa
  Clone ID: PAT_MRT4530_71372C.1
ttatctagacaagtaatgctggatagccgacacagcccgttgcctgatttgatctacttcttcgatggcttggatgtcttgggtgtcggttccagagatgatcttgagggacttggtcatatcagctacattcttgatagccgatttcagtctggatttctgttcttcgacagcatttggaaggttggctaacttttgcttctccagatccagctcggcgttgcattcctcaagttgagctattagatcaatcttgcgggcttcaagccgatctatgttcgactgaattggcccgacagagagctgatctaacttggctttctcttcatgcacaagctgccgattggtttggatagtagcttcaatgtccttccgctcccaccgatcggctatccgttgcttgcccttttccagtttgaattgatgttgctcgagatacactgctggagtgatggcatctgctaagtcatctgggacgcagtcggccaccaagttatctaatgatgactctagccgaagggatatatcttcaagtgttttcttgacattttcatccataggggctagagccttgcttgtggattcttcttctgcttcttcatcaaagtaatctttgatgtcaaaggagaatagatcggctaaggctgggacggcaggagcggctgtttgttcctcttcttcaacatgatgacttcctgtagccgatggggtacggtcacttgacatttgttgcataggtggtgaaggaggaggaggaggtggtggagctgatttaagtgttgttgctgctgatttcttcctcacaacagtcttcttttttggaggagctaatctacctccatttggtagaaggcctggagcatattctatgtccctgccactattgctcttgcgaggagaagattctgttgtctgagggacaacatctggaaacaaatctgtcatgtacatagaggccggctgatggaatatatgttgcttccattcactccaccatctgtcaaagttcctgctcctgaaccttgccagctctatgttgtcaatactgcccagaggtggtcctgggatattgagtagccgatccatcatcagtgttgatgagatctctcccctgcattggatcttatcggcaaagaacaagccggttggcagctgccccattccaaattgcctagctgagctcatcggatggtagaactcataggacacttgtatatttctcccttggtggatgccaacaggaaggatgcaaggactaatagcagccgagaagacttctctggacttgtcaaatttctcggagttgatatcctcaaatctgaagtctgctgggaggtcaaaattcactgaatcctcatatgggaaccaaacccgagcatctctctggaagccctcatagaaactgtagaaccaatctttgagcagttcggccgatagctttgctccagaatcggctggtgtcgatgctgcttccccatatgacatgcatcggcggtgagtgagttcttctccatcatcacctatgatcggctccagccttgggaattctgcatctatcagagatggccgattcacaaccttcatgacaacaagattgagccatgtttgcaatagccaccatggtccacctgcacccactactgagcctatagctatcttagacgatgcattgctcaacatttggaacagataaccgagaagaattttacccatagggaactgccagttggtggtagggccacagcttgatccgcagaagaggaatttctcaagccacatcagaagaaaagacgtatgctcccagggggtgacagatcctttgcccatgtatgcagcaacataaccagaccagccacctatgctcttggtcctaaaatcaaactggtttttggtattcaagctcatggggttagctgatgcagttacatccaatcgtgtaagcatggtgatatcgagcagagtgggagtcatcggcccttggttgaagaggaaagcattgagggtattggaccaaaaataagtagcagaggccatcaggggttcatccttggccgaatttgctagagtaagagcaagcgcttggccgattcctaattcgtcccagcgaacttgcttgctagccgatacacacttataccaca

SEQ ID NO: 70841 - DNA, 1598 bp, Oryza sativa
  Clone ID: PAT_MRT4530_71373C.1
ttgtcggcgaacgcgcagcgcgcgaccaccgttgcttggagctagctcgcggggatctgcagatctcgcccatggcgtcctcgtcggacgagcagccgaagccgccggagccgcccgcggcggcggcggtggcggggacggccgtggccaccgccgccgcggcggtgccgacgcacgccgagtgggcggcttcgctgcaggcgtactacgccgccgcggggcacccctacgcgtggcccgcgcagcatctgatggcggcggcggctgcgggggcgccgtacggcgcgccggtgccgttcccgatgtaccacccgggcgccgccgcggcgtactacgcgcacgcgtccatggccgcgggtgttccttacccgacagctgaagccatggcggcggcggcggcggcggcggcgggggcggtgccggaagggaaggggaaggggaagggcgccgccgcgtcgcctgagaagggaagctccgcggcgccctctggggatgatgcatcccggagtggtgacagtggcagcgaggagtcgtctgatactagagatgatgacactgaccacaaggattcgtctgcacctaagaaaaggaaatctggtaatacatcggcagaaggtgagccgtctcaagctacgcttgtgccctatgctgctgtcgagtcaccgtatccgttgaaggggaggtctgcgtcgaagcttccagtttctgcaccagggcgggcggcacttcctaatgccacacctaatttgaacatagggatagatctttggagtactcccccagccttagctgtgcccgcagggcagggggaagcaagtcctgggttggcacttgctcgacgtgatggtgttgctcacctggatgagcgtgaattgaagagggagaggcgcaaacaatctaacagagagtctgccaggagatcaaggttgcgcaagcaggttggatacctctatgggtctggcagtagatggcagacctggaaagaaacacttattctgcttggtgctgccatatttctggcaggaggaatagagtgcaggatagatgcatacacgactgatgggtatgatgtcagcacttcaccagatgttggcttgtctgcacacgggcaatatgcacaacaagccatgctccaagaaactgacaaacagcatgctcctcacaagaacactaataataacagcaacgggaactatgtaggtggcagccacaaaccagaggctaactctaggtgagagagaatcatgaggaagtaacgacaaagatgagatgaggtgttcttcttatctaaccacaacacccatcatcaaaccagtgtgtgttcttttttagcaaaaagctgttgttttagttcttctcacaactcaccggggccctgtagagctgcccccaaatcgcagccatatgtattatttatggctcgttgccgagaagaaatgagtttgtgttttgtgtttgtgtggtgtgtgttttgtaaaccgattgatgtagctattgtaacaaacctagcgcttagaatttttatgtttgctaacatttgatgagggaatgtaaccggccaattcggtggcctgatcggttttatgaaaaaaaaaaaa

SEQ ID NO: 70842 - DNA, 1068 bp, Oryza sativa
  Clone ID: PAT_MRT4530_71374C.1
ccggccgggagagatcttcagatcagatcagaaatccccaaaaaaaaaaaacacaacaaaaccaaacccgacagatcttctcttcttcctcctccctttcccatcttcgacgaggcgacccggcgcgagagaagaagagatcgatcgatcgatcaaccgatctcgccggagaaggaagaggagcaaagatgtcgtcggtgttcagcggcgatgagacggcgcccttcttcggcttcctcggcgccgcctccgccctcatcttctcatgcatgggtgcggcgtacgggacggcgaagagcggcgtcggcgtggcgtccatgggcgtgatgcgcccggagctcgtgatgaagtccatcgtgcccgtggtcatggctggtgtgctcggtatctacggcctcatcatcgccgtcatcatcagtacagggatcaaccccaaggctaagccgtactacctctttgacggctacgcgcatctgtcgtccgggctcgcctgtggcctcgccggtctcgctgccggaatggccatcggcatcgtcggtgatgctggtgtcagggcaaatgcacagcaaccaaagcttttcgtgggcatgatcctcatcctcattttcgcagaagcgcttgccctgtatggtctcattgtgggcatcatcctctcatcccgtgccggccaatctcgtgcagattaggcactttgcggtaccataccgctgttattccactggctatattcttgagaaaacctgaaacttacttgggagctctagtttaatgtattaaaagatcgatttgtagcttaaggaaggtggcacttccagtcctttttgtttcttttgtggtggttcatgcaaagttttttgggttaggctggatttgctgctcctgagcaaacggatttaatctcattcgtggtgaataaaaaacacggcattgtagcaaaataaaatcattacaatatattatgttcatcccttcactctaatgtattggattgcaaaaatcatcaatgctcctttttgttatgagttcaagtcatcattatataaaaaaaaaaaaaaaaaaaaaaaaaaa

SEQ ID NO: 70843 - DNA, 281 bp, Oryza sativa
  Clone ID: PAT_MRT4530_71375C.1
aattcataaatatcatttcatgtacagatcaacaacgcatataccctgtcaaaaaaatctcaattccaattatgctatgttttctttaatctggctctttcctctatggcagacaatcttaatctgcacctttcctctttgccagacaatcttaatgtgtacaccttaaatatgctttgcagtcataaaccttgagtttatttttctgcaactggccattgtttaactgctctggtgaggccattgggaatggctatgatcttgcagcccaccgggtttat

SEQ ID NO: 70844 - DNA, 365 bp, Oryza sativa
  Clone ID: PAT_MRT4530_71376C.1
acgtggagggggtcggggcagctcgaccccaagcgagggcggcctcctccctctagcttgaagggggcagccgccgcgccaccccgggctcgacccccctcgcggggagccacgtgggtttgggggcggcctgacccctagctgggagggggtagccgccacaacaccccgggctcgacccccctcggggagagccacctaggtgggggtagccaccgctccaccccgggcttgatcccccctcgcggggagccacgtgggtttgagggcggcctcctccctctagacgtgatacccccgggcccatatcaccgacagtaatgattgttgagtcgcatgtaagcatctaagaagttagtagttat

SEQ ID NO: 70845 - DNA, 368 bp, Oryza sativa
  Clone ID: PAT_MRT4530_71377C.1
gagggaggaggccgccctcaaacccacgtggctctccccgaggtgggtcgagcccggggtgttgtggcggctgccccctcccagcttggggtcgagtcgcccccaaacccacgtggctccccgcgaggggggatcaagcccggggtggagcggtggctaccctctcccaggtggctctccccgaggggggtcgagcccggggtgttgcggcggctgccccctcccagcttggggttgggccgcccccaaacccacgtggctccccccgaggggggttgagcctggggtggcgcggcggctgcccccctccaagctagagggaggaggccgccctcgcttggggtcgagctgccccgacccctccatgt

SEQ ID NO: 70846 - DNA, 1573 bp, Oryza sativa
  Clone ID: PAT_MRT4530_71378C.1
cccgatgccgccgatgagcatgagctggtggtgggcaggcgccatcggcgccgccaggaagcgccacgacggcggcggcggcgagcagcagccgccgttccggagcgtggcgctcgtggtcggctccaccggcatcgtcggcacctccctcgtcgacatcctcccgctcccggacacccccggcgggccatggaaggtgtacgcgctgtcgcgccgcccgccgccgccgtggtcgccgccgccgcccgccgcggtgacgcacctctgcgtcgacctcgccgacgccgccgccgtcgccgaggcgctggcgccgctaaccgacatcacccacgtcttctacgtcgcgttggcggctccccacctcgcggaggcgcggagccgcgaggcgaacgccggcatgctccggaacgtgctcgccgccgtcgtcccgacctgcccggcgctcgcccacgtcgccctccagaccgggagcaagcactacatcggcccgccggagtccatcggcaagctccccgtcgagacgcccttctccgaggacatgccccgccacgactaccccaacttctactacgaccaggaggacgtcctcttcgacgcggtgacctcctcctcctcctcctcctcctcccgccgcgccgccgccgtcacctggtcggtgcaccgcccgtcgctcatcttcgggttctcgccgcggagcgccatgaacgtcgtgtgcagcctctgcgtctacgccgccatctgccgcaaggagcgccgagagctgcggtggccgggctccctcggcgcgtgggaagggttcagcaacgcgtccgacgccgacctcgtcgcggagcagcagatctgggcggccgtcgccgacgcggcggcgaagaacgaggcgttcaactgcagcaacggcgacatctacaagtggaagcagctgtggccggtgctcgccgggaagttcggggtggagtgggcggggtacgagggggaggagaggagggtggggctgacggcggccatggccgggaaggaggcggtgtgggcggagatcgtcgcggaggagaagctggtggcgacggagctcggcgaggtggccaactggtggttcgtcgacgcgctgttcatggacaagtgggagttcgtcgacaccatgaacaagagcaaggagcacggattcctggggttccggaacacgctcaggtcgttcgaggcgtggatcgacaagatgaagctttacaggattgttccttgattaatttatctcaggtttctcctcaatctctcgtggattaataattatacccattagatccgttaaaatataataatttttagctataaatctgaacaaataaaatatttatattttaggacgaaagtacatcggtctaatacggtggcctcgggcaaccaaagtagtttgtggtgttctctctggtcatgcatggtcaatgcttccaggcttccagcgtcaaatcattttgaccaaaaggggttaatggtttgtaaaacgttttgctgtacatttgtccattgaattttcctcgaaaaatatatactccttttaaaataaaaaaaaaaaaaaaaa

SEQ ID NO: 70847 - DNA, 709 bp, Oryza sativa
  Clone ID: PAT_MRT4530_71379C.1
ccggccgggcgcttcactccatcatcccccgacgcccccgcatcgccgcttcaccccgacaccccgcgcgacctagtgcgcaacggagggggaagcggtcgtcgtcgtcgtcagcggcggcggctgcggtgcaccggcgggaaacaggtggcggcgcaccggtttcccctttctgtatcgcccccccctcctttctccttccccatccctacgagcaaacgccgccggcacacggggactgagggaggcggctgcgggcgagcaaggagacgcaccggcggctgagggcgtcggcacacgtcgtcgcgcaaggtagctgacgactccgcacgaagaccccaagcgacagcacacgaattggtgtaagcagaaacagtccacaatgacaactccactccctgtcagtgctggtgatgcttcacgagtcctcttcactggcattcgagaccacactgacatcctcatcgaggtcctccttcggctgccaccctggtccctctgccaactacgctgtgtatgcaaactatggctagagcggacaacatcgtccaccttcctctctgcctatgctgaacgtcataccaccaacccttcaaactggttcctcctggaccgaacaatctttattgacactgcccccacaccccgaggcccaatacgtgcactgcttcgcaattctgaaacaccaaaagtctcatcaatcatcacc

SEQ ID NO: 70848 - DNA, 604 bp, Oryza sativa
  Clone ID: PAT_MRT4530_7137C.1
ccggccgggtttgcgtgtcaaagatcccttgttcaagcgaatgggagcttcccgattagctcgttttgcagttgatgatgcaaggagaatgaaggtagtggagatggggggagctcaagaacttcttaatgtattggaaggtgctaaagatgataaaacacgtaaacaaatcctaaaagctcttcatgcactttcgaagtctgaggaagcagcagggtttttggacaaggcgggcgcctacgtaatagtcagttccactcccaactccctcgagtatgctgagatcgagacctacaagactagcctcctgaaggcgtttgatgaactgaagtcgtgacgataaatggctgggagtggtgaatcgatctacatgtttgttttaaactggacgtatccgagcattctttgttgatcagaccttcggtcttgttgctggaatcatgtctacatacatttgttctgaacaggcagcacctttagagagttgttattttgtctaaacgaatcttcttccttttttctagaggaaaaacattggattggctttatctgtataatgatcgtgtaggcactgtatgcttccataataattgttgttttggac

SEQ ID NO: 70849 - DNA, 1924 bp, Oryza sativa
  Clone ID: PAT_MRT4530_71380C.1
gagggaggaggccgcccttaaacccacgtggctctccccgagggaggtcgagcccggggtgttgtggcggctgccccctcccagcttggggttgggccgcccccaaacccacgtggctccccccgaggggggtcgagcccggggtggcgcggcagctaccccctcccaggtggctctccccgaggggggtcgagcccggggtgttgcggcggctgccccctcccagcttggggttgggccgcccccaaacccacgtggctccccccgaggggggtcgagcccggggtggcgcggtggctgccccctccaagctagagggaggaggccaccctcgcttggggtcgagctgccccgaccccctccacatatcagcccacgtgtacaggtctatgcaaccgcgccaggccgcatttaatgcggcgtgctgcgcatctgaccggttgaatgaccgatgggatggcgactgtgtacccctgccctgtcagtgtgtcaggcggcgagcggcgtgctccatcccgtcccatcataatgatgaggggcttcacagcctcttaccccggtcagagctggtccaaccactctgaactgacccgggttcccgttttctagtgtgaacgagaaaccggaagtcctcatccattaaatatcctcgaatctcacccactgcccccggccgaactctcaaaggggggtctcacagcctcccgctagagagggtcacccctcgacagctagcgcgccaggtagggggcgcgttcgtgatttttgaggttctgttgagcaccggcgtggtgagtgtcgcgccgccgcaacgggggaaggcgcagcattctcaggggtgtcgcgccaccccaggcagggggcaaggccccccacatccccaccaggtaatcttggctaccaggtctttgtggcgagtcttcggaatgtctgagggcccccaaagctccaggcctacctcaccaagaagtacgacgatggcactgacccctccgagtccctctagatttgcacagcgatcatagaggcggtggggggtggcgaccgggtcatggcgaacgtcttccccatggccctcaggggccaagcgcggggttggcccatgaacctgctgccgcctcagtggctggctttggtcccgccggctggctacggtgctcgactcggcttaactgatcgtcctttcaagctttaacggctggctttggacccgtcggctggctatggtgcccggctcggctcaactgtggacggggattgctggctctagaatttttcggctttcacactcgtgcgaaagtaatcgtccatgaagaaggaagagagattggaaggaggccaccgaaaggaaagagcgaacaaaatgtgtagcgttggggcgtaggctcaaaataagttcacaacctaaggtacgggactgcgagtcgccctcaagttggagcgaaaaaggcgcatgggccctagtgccagcaaagaatggagaagagaccgggcccacatcgttagactaggagagtggcgtcaactctggccaacaggggaaggttttggtcagggctaacgccgggggctactgtcggtgatatgagcccggggtaggttggggcatctgaccggtctgtgaccggttgaatgaccgatgggacgacgactatgtacccccgccctgtcagtgtgtcaggcggcgagcggcgtgctccgtcccgtcccatcataatgatgaggggcttcacagcctcttacctcggtcagagctagtccaaccactctgaactgacccgggttcccgttttctggtgtgaacgagaacccggaagtcttcacccattaaatagtgaatgacatgggcgccccccgtgttaggcggcatgatgtggtaggccccacgaccgagacgacgtgtatgcggcttccaaggcttcat

SEQ ID NO: 70850 - DNA, 369 bp, Oryza sativa
  Clone ID: PAT_MRT4530_71381C.1
atgtggagggggtcggggcagctcgaccccaagcgagggcggcctcctccctctagcttggagggggcagccgccgcgccaccccgggctcgacccccctcggggggagccacgtgggtttgggggcggcccaaccccaagctgggagggggcagccgccgcaacaccccgggctcgacccccctcggggagagccacctgggagggggtagccaccgctccaccccgggcttgatcccccctcgcggggagccacgtgggttgggggagttgcccgaccccaagctgggagggggcagccgccacaacaccccgggctcgacccccctcggggagagccacgtgggtttgagggcggcctcctccctc

SEQ ID NO: 70851 - DNA, 507 bp, Oryza sativa
  Clone ID: PAT_MRT4530_71382C.1
atgaggtggacgtgcttagctggcagtgcgggtgttctccccggacgcgccacgcatgtcttgctgaccctgtcccgtggggaacgtcaatttaccatactgcccttcgctctcctttttccgtgttttcttggttgcatgtatggtttgttggtagcggttttatacaaggataacattgagacacaggaagcggttaggaaggaatgtgttccggtgtgcgtggttggcaagaacatgaaagcgaaaagcacagtgtttgttgtgggggcagaacggtcattttggcgtccactggaaatctatggtgtgctgtctcttctcatcccttctctctctgtttttgggaagcagattctctggtttttagggtatgcttgcgtatgcagtgtgagagagaaggctggaaagcttcgggaccgagctccatgcttccctctctctctttctctcatgaattttgatggcctcggaaaatgcaatatgcatccgtttttgaagatttca

SEQ ID NO: 70852 - DNA, 246 bp, Oryza sativa
  Clone ID: PAT_MRT4530_71383C.1
atgttggcgggatctgacaaggcagcagcccagcggatcacaaggcactgcgctggagatgaagcaaggctaggatttgggcacgcgcacatcaaaaccgtagagaagagagcaagagccaagagggagagaggaaaccgcaggatgaacaaaggaagggaggagattcacctttgctgcgcggtcgggaagaggccgcagcgtcaacaaagtcgccgtcgcttttcgccggaggaacggatctga

SEQ ID NO: 70853 - DNA, 481 bp, Oryza sativa
  Clone ID: PAT_MRT4530_71384C.1
tgttcatggccgccacgagcgcgaacccgctgcacttcgtctggttgggcgcgcacggcgcctggtccagcccgaacgtcaccaccatgttgtggtcgacggttgttggcacgcccgggtcgctcggggtggactccacgaccctacacctcctggccaaatgtaggctaacaaagagaatatggacagaaatccagagatggacatgcaccgaccttcagatgggtagttgggaaacttgtcactctgttgggcagtggtggactctcgtagcggagtccccaaacacccccgcaagcctctaaagactatgattatcctagtctcgtgggaaatctggtgcgaacacaatgcaagaattttccgaaactctgcgtcatcaccgtcctcaatcctagcaaagatcaaggaggaaggaagagcatgggtcaaagcagaggcaacaaccctacaggagtttggaatcctgggagatatcact

SEQ ID NO: 70854 - DNA, 769 bp, Oryza sativa
  Clone ID: PAT_MRT4530_71385C.1
agccaagatacaggagcgatcggctccgcggcgttcgtcgctgtaaaatccattgttcatcgtctccctcaccggcgtttgtgttcgtgagtgtgagagtgttcctgggctgagccaacatcgaagtcagcaactccatctccaaggttctctggatggccaccctcagccccacctcgctgcccaactggaacaggatgcggatctcggtgaacaccatcacgcagaaccgcgccaagtcgctgcggcggctgcttgcgtcactgcggaacacgtactacgtcgacgacgaggtggtgccgatcagcttcaacatggacagccgcgtcgacgcggcgacgctgaacgccgtcaactcctccgacgctgaaccagtactaatcaacaagacttgtccatcgtgatgaacctgcttgtcagcaacacagttgtaccggatgagctacagaacactgtcaagaccaaggaggttaagcagactaaggaaggaagacctgttaggcaccgagtatgtaatcctagagtgagtgggccggaatgggccatatgagcaccatgtccaggctgtcgatagttgcgtgtgagagagaaagcatcttaaaactaactctgtattcatttggatgagttgaggatgaactaggcggcgaaggcggcggcggcatcaaccctgtcgggttggtgaaatccatctgtgtgtgtgtatcgttgttctggttgggcgattcttcctctgtccttgggggtagctaacaaattggtatcagag

SEQ ID NO: 70855 - DNA, 213 bp, Oryza sativa
  Clone ID: PAT_MRT4530_71386C.1
acggatgaggactactgccggaagaaaggtcctgaagcgcagacgcgccaaaggaagaagggttctctgcacaaagacgaactcccccactgggaagaaacgaatgttctgattgaatcgcattctaagtcgctctttgtcacaatttatttagtagttgtttgctgtgggaatatgttctccttgatctgcattgccatggttttcctctga

SEQ ID NO: 70856 - DNA, 1206 bp, Oryza sativa
  Clone ID: PAT_MRT4530_71387C.1
atgaggaggtcttctcaggggaagagctccagcggcggcggcgttggcggcgtacggaggtatgacgtgcacggtggtggtaacttgctggcctgctacgcgaaggcggcgaggccgaggccgtccaagtgggacgacgcgcagaagtggctctcccgggcgggcgacgacgactgcggcggcgaagctacccggcggaggagctcctgcgccagcgccgacgacgggctgctgctgcctcctccgccggcggcgcggaagggggccggcggctggcgatcgtggagcaacgtggaatgggagggcgcgcccgcggcgatggcgccggcgctgaaggccgcgcgcggcgacgagggggtggacaccaaggtggtggacgccgtgcaggcgtacgtgccgcagcggtgcgtggtgtcgctgagggacgtcggcacggagatgacgcccggcgggagcaaggagccgtcgagggcgaacactccccgcgtcgtcgcgccggcggcgaccgcccgtgtcgtcgcgcggggcacggcttcgcctgggcaatgcgacggcgggtcgcgtgacagcgccgtcgccggcggcgtggtggatctccgggcggctcgcaagcgcgccgatcaggggcacgacgaagtcgcgggcacgatcacggccgtgtcgcccgcgacggcgtggggcgacgcggagcgcgccaagtacatggccaggtacaggcgcgaggagatgagaatccaggcgtgggagaaccgggagcggcggaaggcggagctgcagatgcggacggcggaggagaaggccgagcggatgaggctgcgcgcgcaggcgaggacggcggggaagctggcgacggcgcaggcggaggccaaggcgcggcgcgcgcgcgccgaggccgagctggcgctgggcccgcccgggaggcggtgccaagggttggctgctcacgcggagcgcgagctggagcagcggcagcggccgctcgccctcctctctctcgctccggttgccgctgctgtgccgctgagaaaaatccactgccacagtcaaaaggctcgtgatcgatctgagagtttccgctgcttgttgaaggcggtttctgatgtactactagtaccaggcacagaagaattttatctttgtaccatcaatgaagacccgtttagtttcccaaaagtttttcctaaaaacatcacatcaaatttttag

SEQ ID NO: 70857 - DNA, 396 bp, Oryza sativa
  Clone ID: PAT_MRT4530_71388C.1
gaagggaggaggagcgcggtaccgaggggaattgcggccggaggcggcaatggcggaggtggctcggccggtggtgacggtgacacatgcggcggcggttccagccacggggaacgacggccggagctcgcaaaggcgatggcggctcgggttgacagaggggagggcggctcggtgggggattggaggaacgaggcggtggccggtgctcggcttggagcggtgaagccgatggcgcaagcggagcgccgcggcgacggccagggctccggtggcgcgcagccggagtcggtggaggcggtggagagaggtggtgcgcgtggcggcggtgcttcggagacggggaggggaaatggagcggatgccggggtgcggtggggcgctgcgatgctatag

SEQ ID NO: 70858 - DNA, 165 bp, Oryza sativa
  Clone ID: PAT_MRT4530_71389C.1
atgagggctggccgaagggaccgtctcaaccctttcagcaccagagaagaggcacttagtcctcacaccgaaataaaagcagcagcagcagaaaaggcgatccttgcggggcttcagctccactccacagctcagaagcactacacttctgaaaagggggaataa

SEQ ID NO: 70859 - DNA, 1780 bp, Oryza sativa
  Clone ID: PAT_MRT4530_7138C.1
atggcgccgccgtcgatggattactggctcggcttcttccgcggcgccggggacagcatcttcgacgccatcgacgcggccatcgccgtcgcggcgtccgaccaccccgccgcgctccggtcgaggcgggacgccatcgccgagcgcctctacacggcgcacctggtccccggcgcgccgccggcggggccccccgcgggcggcggcgccgccacagccgacgcgccgacggcccagctcctcctccaccccgagggcgccgccagcgtccctagcctctgtagctccgaccgcgccgaggtcatcaccgacgacggcgccgtccctcgccgcgacgacgaccccgtcgccgccgagaccgagcgcatcaaggccatcctcctcaacgaccaagaaaagtcggaggcgacgttgctcgagctgctccggcgactgcagcagctggagctcacggtggacaccttgacggttaccgagattgggaaggcggtgagcagctaccggaagcacaactccaagcagattcgtcaccttgttcgattgctcatcgaaggttggaagcgcatagtcgatgagtggatgagcagccgcgacgccattgtagatcatactcctcaatccatgcatccctctggcttggagcaggatgaacgggggctctcttctccttccatggatgagggcgctctcttcgctacgccgagcacttccatccgcctatctgagctccctctgagttttcctcaggaaaaccaaggttccaagttcttcgatggtatggatgatgatggaaacacgaggagcaatggcggcagggataatggccggctgtatacaaggaatcaagaaccagctagaaggccgctgccgccaatggcccagcaatatgatccagaccagagctggaagcaagaacaatctgcgatgaggcagtcgagaccacaggaactgagcaatgggcagacgagagagcaattcatcgcggcgatgcttgcaaggccctcaaacccagagtccggtcctgggcgacctcaaccgaggactaagcagcatcaagatgcctcgccagctcaaggcagatcgcaacctatgccatctgataaatcggcgagccatcacgatgaaaattcagttcgggcaaagctagaactcgcgaagaatgcaaagcttgaactcacgaatagtgcaaagctagaggtgacaaagagaaaacttcaggaaggctaccaagaatttgataacgcaaagaagcagagaactattcaaatggtggatccacaaaatttgccgaaacaagcgaaccggaattggcagcctaatggcaggccgaggaataacagcaacttcaacaacaaccggaattggtcaagatgaggcaccaattccatcatccagcaccaagggatcatagactccctcctcccaattccatccaaatttttcctctttttccggctaaagttagtccagccaagtacataaacagcaataaggctttccttcaaaacttgcttccagtgccacacacacacaccacaaacacttcttgagagctgtgttgctggtttgcactctcttttaaccttttgatcacgatggctggttttttttttcctagtggtttgtcaaaaaaacttgtaaagatagtgctactgccaatccgagatgagtttctgcaataccgatcctgatcttgagcccctaaatttgctgtttgtgttggtgtttcctcggttgaaatgcaaattgctttctaccctaacaaaaaaaaaaaaaaaaa

SEQ ID NO: 70860 - DNA, 2469 bp, Oryza sativa
  Clone ID: PAT_MRT4530_71390C.1
atggccaccggcggcggcggcgcaacgcgggcgaccagcgaaggggagatagagggagagggagggatgctcaccaagctcgcgcaacggcgaggagacaacgggaacgcggcggcgatggactcctcggggaggcacggcaacggcgggactccggcgacgtccggcgaaggaggagcggctggggcacaacacagtctgggagagaggatagaggggttaggaagggaggaggaggcgcggtaccgaggggaattgcggccggaggcggcaatggcggaggtggctcgggtacgtggtgaaggggtggtttcggtggtggcgaggagaaaggaagcggtggccgggcttgggattgctgcggtgaagccggtggtgacggtgacacagtgcggcggcggttccagccacggggaacgacggccggagctcgcaaaggcgatggcggctcgggttgacagaggggagggcggctcggtgggggattggaggaacgaggcggtggccggtgctcggcttggagcggtgaagccgatggcgcaagcggagcgccgcggcgacggccagggctccggtggcgcgcagccggagtcggtggaggcggtggagagaggtggtgcgcgtggcggcggtgcttcggagacggggaggggaaatggagcggatgccggggtgcggaaaaatagtactctattttctgggggaaaaagtacaccgaaggtccctcaacttgtcatcgagttacaaaatcgtcccccaaccgcaaaaccagatatcaggcgtccctcaacttaccaaaccgctgcaagtggaggcgtacctgacgctgtcgcacaacaacctctccaggagcatcccggcggagttcgccgctgtcaacttcgcgcgcatcgacctgttgcggaaccagccgaccggcgacgcgtcgccgctgttcgggcgagggaagccggcgcaggccatcgacgtgtcgcgcaacgcgttggagttcgagctgaccggcgtggagctgccagagcaggtgaccaccgtggtccgtggacgtgagtcacaacatgatctacggcggcatcccgacgcaggcggcgaagctgagcaggctgcaagtgttcaacgtcctggacgacctcgacgccgtgctgcgactgggcgggcatccagtgcgacgccaccacgggccgcttagtggacctcgccgtcaaccaggacaacaacctcagcgccaccgtgccgctcgccgtcgccagcctcacccacctccactccctccgtggctcctgttggaaataaacacgtcatggtgtattcctggcgtggttgagtcagtgtgtgtgtgtcgtgctgctgcatgtgtgcgtcgtgtgcgttctgttagtttggttgagtcgtgatcacgagtgcatggctgctgcatggttgtttgcatggccgttgcagtgttgatcgagtcgtgggtgtgcatggtgtgcgtggcgtcggttcttgcggaggaagccgcgtcgtccgggcgagcgtgtggctcacggcgacgtcgagcgggttctgcggaacgtggcgcaatggccggcatggaggctagctcccggtgtgtcaccggtctataagaggcccctgtactccttcgttgtttctttgcaaggttcagtgagtaataaagccaagatacaggagcgatcggctccgcggcgttcgtcgctgtaaaatccattgttcatcgtctccctcaccggcgtttgtgttcgtgagtgtgagagtgttcctgggctgagccaacatcgaagtcagcaactccatctccaaggttctctggatggccaccctcagccccacctcgctgcccaactggaacaggatgcggatctcggtgaacaccatcacgcagaaccgcgccaagtcgctgcggcggctgcttgcgtcactgcggaacacgtactacgtcgacgacgaggtggtgccgatcagcttcaacatggacagccgcgtcgacgcggcgacgctgaacgccgtcaactcctccgacgctgaaccagtactaatgtgattcactccacctgactgacattgctcaaagttgagcaacaagacttgtccatcgtgatgaacctgcttgtcagcaacacagttgtaccggatgagctacagaacactgtcaagaccaaggaggttaagcagactaaggaaggaagacctgttaggcaccgagtatgtaatcctagagtgagtgggccggaatgggccatatgagcaccatgtccaggctgtcgatagttgcgtgtgagagagaaagcatcttaaaactaactctgtattcatttggatgagttgaggatgaactaggcggcgaaggcggcggcggcatcaaccctgtcgggttggtgaaatccatctgtgtgtgtgtatcgttgttctgtttgggcgattcttcctctgtccttgggggtagttaacaaaaaaaaaaaaaaaaaaaaa

SEQ ID NO: 70861 - DNA, 571 bp, Oryza sativa
  unsure (1)..(571): unsure at all n locations
  Clone ID: PAT_MRT4530_71391C.1
gggaagaagagattaaggtcaaggcgcggcgcaacaatcataagttcaagtggtgaggaaaaaagcagatgaagctctgcacaggcaatttcagaggcttcttctgcttgaatcatctcctcctctgaagaagaacacctcttcttttctttgcatggaagaggcagcaatggagggacatgtgattgttccactggaaaagttgagcttggagctcaacaatggtggaatcatgctcaaccatgacaaggacatttcagctctccaangaggagatttcagctctaagatcaacgtgcagagacatcttgaccacagaagacaggaggcactggacaagctcatagacctgaaaggaagtatcagggttttcttgccgggtccggccatcgattttgaccaacaacttcatgaccaaaccgccggttaccgtcgaaaacgagaagatcgtggttcgagcagtggggatcaagaaagagttcagtgttgacagggtttttgatcaggagtcaacgcaagaggatgttttccaagaagtgaagccaattctcagatctgcacttgatgggca

SEQ ID NO: 70862 - DNA, 504 bp, Oryza sativa
  Clone ID: PAT_MRT4530_71392C.1
atggcgcttctgcttcccttcatctacatgctgtttttcttctctgtttttcttgtcatgcggataacctacaaggccagccaagcaatcgacaccgctgttatcttcaacaagccaatcagtagctcggtcgagctcgtcggcgtcagggggctggatccatctctggccccaggagcggcggcatcgccggctttcgatctactcctgcgtctcgacaacggggacgcctgcggcgaccagtaccgagagggcggcagcgtcaaggtctcctacgccggcgtccccctggcgcacgggagcacccctggcttccgcttgggggcgaggagttccgcgacggtggcggtgaacgcgacgagcgatggggtgggtgtgccggaggagctgttccggctcatgtcggcggagcaaaggctaggcgtggctcagctggatattggtttgcagctgggctggcccggttgggagtcctactactggagcgtcgatttggatggttga

SEQ ID NO: 70863 - DNA, 5048 bp, Oryza sativa
  Clone ID: PAT_MRT4530_71393C.1
ttaacaaacaatgccatcagtctgtgtggcgtggtgctgcagtagaaagtggaactgagagttctgcctgagcagtggtgttggttccacgtcagataggtctatgtcaagcatcagtcgtgctatatcatccaacgatataggtatgcttgagtcgtcatctaacaagaacgaactatttggagtagttattgagtcatcagtggccattgttctcatctttccaatgacctcctgagatagaccttgtgcaccgtatttatcatcccagaacattgttccaatgcgatatatttgagtgatgctcaaaactgggcaaagctcatcagtgatttcctccaaggttttatgtgtcttctgatgcaaaaccagaaatccaactgcctgtctgatgtgctgaaattcatcccaagacgttcctgcatactcttcagttgttacagagcaccactgctctaattcttgtaaaccagcctttaagaattccccattgctaaaggagcagcattctcgacggagtagcaaactattgaagagttgaacgttcataaaggcaaatgcttgattgaatgttttcctgattatcattggaggtacacgaacagcccttggagcctgtgaaattgacaaattgttaacgaaattgtatcgccttatattcacgattggcatggaaatgtctggggtgcatacctttgatgcagtgtcaggccttccaaccattccactatatccacttgatatgcctgatcctaatgacgacgatcgagcattctgctgaactgctagacttaagagtattttgtaataggtagagaagagttgatgtagtcgacagccaataagccagttctgtagaactttcagcgtgctaattgtatggatgattcggtcaaatatgttagtcttctctgcttcaaatgagtgccagtgcaggagtgatttgtacacgatgcatgctgcagctggtctgccgttgtcaaatctcctgtcttcagccagacttttgatcaggacatcatgattttcttgttgtcgatccgtgagcgacttttgtttgcttaaattctttataggaggaacaaccacctcctcctccattgctgatggctgaatcacttcaggagtaattactgcttgaacagctacagaagatttactgcggagcaactggttttctgactccaagatggcaatcttgctttccagactctctatttgctttgatttatcgtcatctgcagatgcaagtagtgactgttgacgtaggacctggttttcagattccaagctggataaatttgtttcaagcctttctatcatctcctgaagttgattaagtttggagtccttttctagaatttccctcgacaattcatcggactccttttgaacctctagaagtctcttttctagatcttcagcctttgttctaaatgtaacaagttcatcctcaagttccttattttgtctagtcagcagctcaacttttgcattgtccaccaccggcacctctactatctttggtggtgcctgttcaattgctagttttgcatcttctttctccttttctattgctgcatgtgcttccgaaagcttttcttgcatttcttgcaacacagatttcaagtttgaaatctcttgccccttggcttcttcaaggtcaatcctcaagtgtttctcaacatctaatcgccatgtgagttcctcaactcttttttcaagtttgtcttttgcttctttcagtgcgccagtctctcttgcttcctggattattatggaagctttggtctctcgtctgaatctgtgttcattgcaagccgccattgcacgtaatcctgtctgtattactatggctgactcatacatttgaaggtaagatttcctggctgaatgagtacgtgcatgcttctgtatcctgattgaagcagcatttcttctcatatgctcgaaaaatattctagctaggcgtgccctccaaaacttctgagactgaattgaggcttttcttaagttgatgaattcctttcttgtaagatgtgtctttatacgtctctggataagccgtgcagcattggccaatacttctgctcttcgagcatccagctctgccatctgaccagctcttaggaatacctttgtttttcctatctgatatcccttcaaacccattttatcacatattgctgcacaggcagccttctcatcagagctgtcgacaagctctgctgcaagcattccaaaccgatcaatgaactcatcaaatgtcctttttgttggatagccagcacaactgatccggattgcttccagaacacccccgcatctcaattggttaaggacattgaaattctcaaagattcctggtttaagtacagcattgggtttcacacatctaatgtagtgtggttctgtcgtactcagtgtttccatgagagcttgtagttgttgcttaaagcgagtaccgatggaagagaatttggactgtttagaggtttcctcaggtaatggaggaaagagatttgcaacaaaagggcaccttgaggaattaagtagagcctgatgttctgccaccacatagtctttgttcttgtcaagaaactgatcagcttgatatgtgacatctcctgcatagtggttgattgtaaaggctgtccgagcaagtttgggtttgctgaagcgcttatgtgccttgtatgtttgatacatcttttgggcaaatgtttcatgtgtggactttggaaacatgcatgcttcatccagtagtgcaattattcctccaggttttttctcaattaagtccagcacatcttgattgtccacaaattccacatagctccaatctatttcctcccttgtatagtcttcttgctccatcttgaatacatgctggttaaagtgctgctgcaacttctcgtttgtcaagttgatacatagttgttcgaagcagtcaaacagtcgtgaatacacagtctttgctaaggcgtcacgactcagtgctgcagaatctggatcaagtggctttgtgatatttccatcaggtgttacaataacacgctcacaaagcgaatcttgaagagccttttcatcacacattagaagttctgctactattttcaggtgatagactgatttctcatccctcagcttcgatgaatcaatttcttgccccttcgagaaattgatgtttcccagatgaaggattgcagctactactctaaagattgcatcctgctcttcttgaccaatgccaacaacatccatagcatttcttgtttctaggtattctcttgcgtcatccacattagctacttcatagcagtttgtttggttcaaataatggaatgatcttgggtctcccaccttaaactttttcacatcctctggtggtgcagaacatagcatgtaaaagcaatggtagttcctttcaggatcagagacctgacatactcgcgatctttcaaggaggtacgttcgaacagcagccccggatatcttcccatatttgtcgaattggatttcaacaaacttaccgaatcgactcgagttgttgttcttcaccgtcttcgcatttccaaatgcttccagtactggattagactctaaaacctgctgttcaacagtccgaccctctgttccagaccttcctcccatgaattttttttttgaagcttcagtagctaagatacacatttcagtatggaagaaagtacacatatgaactgctcatataacaccaggaaagctgatcgaatccccagactttgattgatgtatgtaagttctttattcagatcaagcgactacatgatggcaagtgcgaccaacatgaagaaatgcactcgggacgccattctctccaagccccctaaaccatggaagcacaatttgcacaatgctggagccgttcatggctcgaacaccatgttttcggcctccctcttgatcgattcgaagaggacagacgacaggtagcgctcaccgaagctcgggaagaccacaactacgagcttccctttgttctcgggccgctgcgcgaccctgatggcagcgactgcagcagcaccagatgagatcccaaccagcagcccttctttcaacgctagctgcttcgccatgctgatggcttcatcacttgagacttggaccacttcatccaggagattgacatcaagtacaccaggaacaaaaccagcacctataccttggattttgtgtggaccaggtcttcctccagataaaattgcactttctgtcggttcaacaccatagatcttgatctcagggttctgctccttgaggtactttcctgttccggttactgtaccaccggttccaatgccagagacaaggatatcaactttcccagcagtggccttccaaatctcaggtccagttgtctcatagtggatctttgggtttgcagggttctcaaactgctggagaatgtaagagttaggcatctttgctgccagctcatctgccttctggattgcacctttcatgcccagaagtggatcggtaaggaccaactcggcaccgaaggccttaagaatgatcctcctttccatgctcatggatgctggcattgtcaggattagcttataacccttggcagcagccatgaaagcaaggccaataccagtatttccactagtaggctcaatcaaaacactctttcctggagtaatgagacccttctcttctgcatctgtaatcatgctataaccaatcctatccttgacactggagcagggctccatgatctcaagcttggcagcgatttgggcctcacatccatccaccaccttgttcaggtacaccaggggagtattgccgatcagtgcagtcacatcactcgcaatcgattggcctgattccgccattgcctaaatctctctgaaaactctgcaagccagtaaccaactaaccactccccccgccgacggctgcgagaggaaaggcggatggatcaagaaactgcggagaaaaccggaggacgaacgaggcaaagatgttggggcattcgattggccctgtcccggcat

SEQ ID NO: 70864 - DNA, 697 bp, Oryza sativa
  Clone ID: PAT_MRT4530_71394C.1
atggctgctagcctgctagggcgcatgcgcatcgggccatcagcagaaaatctgagtggcactacagctccggaccccggcagcaagacgctcagacctccgaaaatgcttaggatcatatatgtgcacgtgcagccgcggagaaaaggcgcctgccttggattgagatggagatgggacgcctggcaacagagaatatgggcatggctaatggtgattggatgtgcctccgtggagcctgcaggcagcacgtcggtcgatgcccaccaactatccccgggtatggacgactacaggatggatgaccgccatatggatggtttggagggagatggggatgatcctacggaacagcccatccctaaggccaacgatgacacagtcttgcccatgccgggaagcgaggccgagccatccgcaccatctacagagagagcggagtgttggcggcacttcgaaaaaatcagggtaatggtggactacaacattgtggaaaaactttgtctgcatcttctagttcaggaacaggacatctcaaacggatttactgttattaccaatttacacaacaagatccgtcaagctgtttctatcatcgagggtagcagcaaccagcaagccagcaccagcagttggcaagattgttcgctgactgacgcggccacgtcgccgcgacgagccgacgaggaggagcagg

SEQ ID NO: 70865 - DNA, 357 bp, Oryza sativa
  Clone ID: PAT_MRT4530_71395C.1
cttcatagcaacatttaaagtgggggggtattcaccatacgtataggcgcttcctgacaaatgaaagcactagttgtttaacaaccccacagagtcatacacacagctagctttagtagcccaaagaccagttctcggggtcctaggataacctagccaatagcagacaccacctgtcccattggggatgtccacgttgcaaaacgccagaaggctcgccgccatacgctacaaaacccctttccggcaaccggtgaacacctcggccatggggtgcccaacatcggtggggccaagcttcctgtaaatgcctccaaccatgtgttagagcgccgaacacctgcaccagctgtcgtc

SEQ ID NO: 70866 - DNA, 741 bp, Oryza sativa
  Clone ID: PAT_MRT4530_71396C.1
atgggtggcaacggcaatggcgcggatgacaaggcacgtgatgtcacggatcagtccaaggctcttggtgggaacagctgcgaggaccgcgcgctcccctctgctgtgcgtgtcactgtcagtggtgatccggtggggacgtttggctcttttgggaacatggccgattataatgttcaccttcatcagcctgatgaaggtgacgaccatggtgacagcacggagtgctcgagctcgttcgggccctcttgctccgcgtcgtccgatgatgatgacgacgacacgaagtcggagatggatggcatggaggtggattcgccgtttcttggtccaacccgtaccggtgacagccgagtggagaaagattgttgggccaataatgtggcgatgccaatggttggagttgcatatgaagaatctcttatcacagaaaacaaaaacagtggagttcaaacggatggtcccttggttaatggtggttttgacagttcagttgttgaggacatcgaaagcactgatgatgcgttagttgagaatgacaggagcgctgatgatgtcctcatagataatcaagcagccaaagaaggttatcagctatttgagaaggtcaagccagaggagcattcagagctgggggcgaaggaacagcactgccagaggacaagagagcgatttaactgggaggatgggagatctggcaaagatgatatattggggcagtccactatggatatgcgctga

SEQ ID NO: 70867 - DNA, 165 bp, Oryza sativa
  Clone ID: PAT_MRT4530_71397C.1
ggggaggattaaaaaagctccgtctttgctgctgtagttgttgacgccagtaattgaacaagctaaagctgcccggtaacataggcgcggagaatacgactaacacgttcttccaaaacgcgaccgaaaagaaggcggacggggtggacggcgtggcgagaggcg

SEQ ID NO: 70868 - DNA, 320 bp, Oryza sativa
  Clone ID: PAT_MRT4530_71398C.1
tgaatgtgtaagcagacgcgaaggatctggatcctgctggtacagatgcgcggcatgtgatgaaagcatataaagagcgcatgggggaggaaacatggatatgaggcctatgcactattgcatgaagctgtgtcactactgaaacacattactgtgtggatgcatatcgatgtggtagactagcagtggtactatgactatattaagatcgatgctggctattacaaagatacaacgtgcagcaacatagaaaacttattataaatgaaagatgccttaggctaaatcattgtgatacagtaaacagctaccgtaacatg

SEQ ID NO: 70869 - DNA, 477 bp, Oryza sativa
  Clone ID: PAT_MRT4530_71399C.1
tttgttttttttttttttttttttttttttttttttttttttttttttttttgttaacccacacaacccaaaccatccgggctgctaaaaatccaagggaaaacaagggccggtactttaaatgaccggtccagggtctccgccaaacgtatgctaagcagaaacataatctgaaactaaattccaatggggggcaaaaataaggggtagtccaagggggctactcccgccccaagccaaacaaggggattggggaccctatccttccctgggaacccccggtaaacagcttcctgggctgattggagccctctcgtctttgatcgaggccgcagtgttaagcagcaagccccccaaggggaccagcggatggggtggggaaggaccgccacggctgaaccgggggcgggggtggctccggttgcgacaggaacaccggcggagggggttggacccaggggatgtggcggctagggc

SEQ ID NO: 70870 - DNA, 185 bp, Oryza sativa
  Clone ID: PAT_MRT4530_7139C.1
atattctacataaacgatccttcaaacaagaagatgcacatcgtaagggatggcaagcgccgaattgtcggagttgacaacgtcgttgatgaagaagaatacaaccagaatcttcttgtaagacctcatatcgaccttaacgaagatccccaagaggctgtggaatatgctcgttcagatcaaac

SEQ ID NO: 70871 - DNA, 1378 bp, Oryza sativa
  Clone ID: PAT_MRT4530_713C.1
ccctcagatccaacaactgcgagttcaacctcgacgtgttgtagaggaatgggccgcgaagacgactccggatcgttttgtgggattcaatggtgttgacccccatgaaccctcggtcctacatggcttggaagatcgagaatcgtcctcatcgaacactccatgtgaggtgaatgtaatcgacggggagggcaccagtgatgcagctgctcgggcaaccgtggaccttacacgtactcccgcccagcacctaaacactatcaattcaattctaagagaaagcccatttgacccagtcttgcaccctgatggtgatctttgggttcaacgaatttgggatacggtggcgaatctcaataatgcttttgcggcagtagccgaaccaccggcacgagatctaccgcgacttccgatccaataaacgggtgccggcgggaacaacgagatcaggacgacgctcatcaccctcaatgccgccctcctccacgacggaatgataatgcgaatcaaggaggtcatcctagcgagaaccgagaccggcaggatcgccaaggccatcacgacgacccttcgtcatcatcgtcttcatcttcctcatcatcagctaggccgcctcggcgacaacatgggcaccgacgacctctcgtactaggaggaggatgtagagcgttcacacctacactacgagaagtacggtgactcaaaaaattccgaccaggagcgatagagaaatatgatggaagcactgaccccgaggagttcctccatgtctattccatggttctctatgctgctggggcagatgataacacgctgacaaattatctgtcagccgcgttaaaaggatctgcttgatcatggttagttcacctcccgccccgctcaatttcttcatgggaagacttgtggcagcagttcgtcgccaattttcaaggaacatacaagcaccacgcgatcgaggacgacctacacgccttaactcagaaccccggtgagtctttaagggactatattcggtgcttcaacgagtgccgtaatacgatccctgagattaccgatgcttctgtgatttgttcgttcaagtcggacgttttaaaatcctgtttggatgtatacatatttacaagccccaaacgtactaggctgcatttgatccacctatcaagcatagttcaccacggtaagtcagccactatttggtccacttcggccgctcgcccgccttcatcccgcccgccgtcctcggccgggagccaagaaacaggcgcggaagaagaagaagagagagaaagcaaagatgcggacgcagtcagacttgcccccggttgaccagagacgaggagggccaaggaaaacagagcaagggcggagggttagc

SEQ ID NO: 70872 - DNA, 565 bp, Oryza sativa
  Clone ID: PAT_MRT4530_71400C.1
acagcaaaaacttcaaaataggggagatagtaagaagattacagactgaatgaatcagagtacctaggttctaatcctataaattgcacgcacacataaaattgcatgacttgtgaccctggacgcccaactgtgtatagatgcataccgaaatacaaaacattttttcgagtttttttgcacctacaagaataaaaattagaaaattaattttcactagcgtgtccttaagggtgccacccatggaaaccctcaatttcttccggcacggagttgcatgcgagtcagaaaacacccatgtaaactggttattggccatccgcacaaacattttctttagtagtgcaacgaatacacaaatacttcaaggataatagtcatgtcataaatatcattaggcgacgccacagcaaagcatcggggtctactaaccccgacgatttttaacaagcatgttataccccctctattttaccgtcgctgaccctggtcaaaaaaaatattagaccccagtagaattaattagttgaagccacctgtggttagcagtaatgacacaacaaac

SEQ ID NO: 70873 - DNA, 260 bp, Oryza sativa
  unsure (1)..(260): unsure at all n locations
  Clone ID: PAT_MRT4530_71401C.1
gaatcatgtggtgtaanccccttactctatgttacgtgcggagggaagggttcgcaacctcttcaaanagaacccaaacctttagcattgttaattttgggggttttggctgaataaagttgtttcaaattcaggtagatcacatggatagtgtcccaatgaacagatggtggagctgctctntcccagcttgtggcgaccgccacgtccgttgaggctccccactgagccttnatttttacgttattgagcctggaata

SEQ ID NO: 70874 - DNA, 2005 bp, Oryza sativa
  Clone ID: PAT_MRT4530_71402C.1
cgacgacacgcgcgccggcgccatgggcctccccggccggcgcaacccgttgctgagcgcgaggcgcgcggcggcgtccctccggaggagcagacggctgcccgtctatgtcgccgcagtcttcttcgtcgcctccgtcctcctcatgttccgcgacgagatcctttatctgacgacggcaaggtcgccgtcgtcgtcgttgccgacaacgggaggatcagccggcggcgccgggctcgcccggaaggaggagctagtatctgtcaacaagccagtcttgcttggtcacggcggcaaaccggagaagcaccacagcgtgacggagaggcaccggccgaaggtcagcgcgaagaggcggccgaacaagaaggcggccaaggcggcgaggaagaagttcatggcgtcgccgtcggtcgccgccggcgccgaggtgaacgtgccggagacgtgcaacctgtccaagggcaagtgggtgttcgacaacgcgacgtacccgctgtaccgcgagcaggagtgcgagtacctgacggcgcaggtgacgtgcacgcggaacgggcggcgcgacgacggctaccagaagtggcggtggcagccgagggactgcgacctcccgctcgccttcgacgcgaggctgttcatggagcggctccgcgggaagcgcctcatgttcgtcggcgactcgctgaaccgcaaccagtgggagtccatggtgtgcctggtgcggccggcgctgtcgccggggaagagctacgtgacgtggtgggacggccagcgggtcgtcctccacgcttgggagtacaacgcgactgtggagttctactgggcgccgttcctcgtcgagtccaactccgacgaccccaaggcgcacagcatccgggaccgcgtcatcaagcccgaggcgatcgccgcgcacgccggcgactgggtcggcgtcgactacctcgtcttcaacacgtacatctggtggatgaacacggtcaacatgaaagtcgtattaccaacccgccatgaccaattcaccgtgatcaggaggccgacggggaagacgtgggaggagtacgacgaggtgggtcggatcgaggcgtacaggagagtgctcgacacatgggcgacctgggtgaacgacaacgtcgacccggcccgcacgtccgtgttcttcatgagcgtctcccctcttcacatcagcccggaggcgtggggcaacccgggcggggtgcggtgcgcgaaggaggacgcgccggtgcagaactggcacggcccgctgtggctgggcacggactgggacatgttccgcgcggcgaggaacgcgtcccgcgccgcggggcgcgtcccggtcacgttcgtggacgtgacggcgatgtcggagctccgcaaggacgggcacacgtcggtgcacaccatccgtcagggccgcgtgctgacgccggagcagcaggccgacccggccacgtacgcggactgcatccactggtgcctccccggcgtccccgacgtctggaacctcatgctctacgcccgtatcctctccaggccgccggcggcggccggtcacgtggcgtgaccgaccatatgtgtacagatactgtttgtttgtttgttcgttcgttgatgggttgccagctgcctgcacggttagttttagtttttgcctttcgcttttgttgcttctcgattattattttctcatatgcgagatataaaggaggtggttggtggcgatcgaggtgattgatggtcatgtgacgcaacattcttgaccggattgtgtggcacgagttaagcggggaacatctgcagtagtagtagttacatggttgaaggggcgtgcgccgtggcgcgacgcgaataaatgtcgtgtgacggtgtgagcgagtaccgtgtagatagaagggcagaatagatattccaacactcagatttacacagcttattacttctgtaatactccatgaaatttgttattcttttatcaatactagaaaaatgcccgtgcattgtaacggat

SEQ ID NO: 70875 - DNA, 1810 bp, Oryza sativa
  Clone ID: PAT_MRT4530_71403C.1
ttaaaccgctcccccccattttatggtttttgtttatcagatcttttttcttgtttttttttttttttttttttttttttttttttttttttttttttttttttttttttttttttttttttttttttttagaaaaaaaaaacatctttatttgttgtgtaggtgaaccggatcagttgcagaacaatgacaatggaatttcagctcaatttacccagcactagtgagttccaatgtcaagcttcatgataccacattacaaaaattgatgaattggaataacaatttcatcgcatcaatcaatatcaacctaaaaaaaatatctctgagagatctgaagatcttgtgcctgccgcgactgaacaatctcagcaaaccagtaggtttctcatacagttgccacagccgcttcttcggtttgcaaactattgtagtagtccacaagaactttccacccaccagggcacatgaaaccgtcaggagggttctctccacttttcgcaaaagcccgcatcttggttcctgagatgaacagaaaatctttactccgtgaaggatcaaagaacgccatcttcttcgccactgtatcatatgctgctaccttgaagggcaatatgttgagtttctctaaacctggggccatgctaaggaccttctttccatgatctgggttgtacagatccctcttttctgttggatggcccattccagctggatcacgacccacaatgtagaaattggcaccagcgttaatccgtgcctttgcatgccattgcacttctgttggaccagcataatgcatcggggaggggaaaatagacactatagtagtctcaggatcaaggacaccatcttctaaaaccttgctgtgttgttccattctcacaggcaacgggacatcatcagctttcgtgaagccacctaaagggtgcagcagtagaatgggattcttgaagcccatttccaagaggcgccttctagtatcattcatcaacagggcatgcccattatgtactggatttctcaattggaaggcaaacacagcatcagcccctcgcttatcgaattcattcctaagttgctggggtgagagcctatagtgatcaagaccatcgttatatttgatgggttcaatcacttccagatcaccaccaattagccagttcccagcttgggctattgcctcatctacataaggtaaaccaggtgcggttgtcccccatgttcttgctattctttcttctttgttgtgagggtatatttccaccctgcgtaggatggcgaggacggcgccgtcggggccatggagcgcgacgtccgggctggacccgatctcctccttctcccggtcgccgatggcgaggacgatggggagcgacatgttgacgacgcccgcgccgtcggggaggcggatgcagttgaagtgcagcgactggaggtactcgtgctcccgcatgaacccccgcagcgggctcgcccacccctcggcgagcacgtgcgcccactccacgtcgacgggggcgaggcggacgcgcgggagcgcctccgcctcgccgcgcagcgccgcgcgccccggcgccgccacgaggtcgacgagcgcgcccccgtccgggtcgatgagggagctccggacggtgagatgtgtgaatgcgagaagagcaatatttcttgagcatatgcgatgaaactgacgattgtgtctctgcacttgggagaatctaagctgtactgtgaagctggagaatctcagctgaaatcaatctgcatatccttctgcactaactgtttccaaaccgaaaagcaaaacgga

SEQ ID NO: 70876 - DNA, 2541 bp, Oryza sativa
  Clone ID: PAT_MRT4530_71404C.1
tcacttgtcttgcatttcctttttatcagtagaatgctcctcctgaccatgcaaaatatgtttagcgtatttcctgatgacagcctcatggaatggcccaaccctcccaaggaatgattgtattgatcttcctagcataaactccaccagaatatttagtgagttctcctcccatattgggtcttctcctctgtggcattgctggttctgatcaaagccatgcgaaatagcagattttaggcctgctaaaccagcttcagcttcagctgcaaaagcatcatgtacatgttccaggcagccggcacccgcaagaacagcacatccacggtggtcacgaaccaggaaatcataaccaccagacttgtttacagctcggaaggctccatcaaagttgagcttcagattaccatctacagggggaacccacttatttctttgcacattcaccttgggatgttttcctttgcgcagagaggcatgatcacagatcagctgtttcaccttgtggaccacttcttccactctgattacgtcctcccccgagttcaccttgttgcgtgcataccaccaaacccacaaaagaaagaagacctccattcttcgatcattctccagcttcaaaatggtctgaaccacatctctagcagaaacaagctgagtcaagcttaaacggatatcttcaaggcataaaattctccagcagagtttcatgggcttgcattgcaggaagcagtgtccaccattctcatcaaaccttttgcagaccgggcatagagtttcagcgtctggtactctccttttgatgttgagtttcagggggaggctgttatgggcaagccgccagataaactgtttgactttaggaatgcattgcaaactccagattttatcccactcgaaattccgctggttcaccgctccagaggatgaaccgccctcttgcttcttcgccgatctctccctttgatcttccaggacatggtacgcagatttgaccgagtacattcctcttgtatcaaaatgccaggctacaaaatcatttgtgtctaatctcaccgggatggccagaatgttcctggcatcagactcccaaaaaatctcctccactagtggtttatcccaccagcccgtagctgggtcaataagatcagctaccttgttcagcacagtgcctcttcgaggagttatcggtcttcgggtgactccagcagggatccaaggatcctcccatatatctatactgctcccattgccaaccctccaaatcctcccggccttcaaggcagatagccctcggataatgcttcgcgcgatctgatcgagagggagagagtgcgcgatctttactcttaacatttttctgcttaaatacaattgcaattgccaattcattcgttgcaacgcacggacattgtacttcagctccttttcatgagcatacattccacttacacacagcacatagtcaactctgctgttaatatcaaactttttaatcatatgatctgccctgtacttcatcatcaaattaattaatccatcatagtcctctttgtcccaaggaagagcaatcaaatcttcattgccctcaatcttttgtcgaaatgcgcgtttgttcatggccaaaggaatcgagcaagtcaaaaggaacttcctatcatcaaaaacccaaaagaaaggatggcctccaatcttcttctcaatattgcataaatccccgttggaaacaaacttgaagcgtatgaaagctacactgaagagctgcaagttccttctcatggcccatattaattcaagccagggccattccaacacattggcatcaaaggaaaactccctaagttcttcagcaaggctatcaatttgactgcaatcaaaatcaagatcttttcgatctttagccatctttgagatctttctgagtgcatcaccaacagcctggcagtccttagcttgcaatactggagtagacttcacctgatctttaacttcaaaattagcaagtttcacaatgatttcatttccattcttcttgtaatagtatgtcttctcaagtgtaaagtttccatggtatttcccacagagcctcagcatcttcaatccatcaaaaacttgacttataagattctgtagcacaggtgttgggagcacaaccttttccccaaccatatgtttggcccctaacaaagtagattccaaatatgcaagaagattgcctgtgtaaggctcatgccatacagaaatgcagtcaacatcctccttcttctgaacaattggagcatgcaatatgttcttatgcaggcagtttgtcataatctccaagcagtgaagcccatttgaattatccatcaaatcaaaaattaacacagaatcaaggttctgtataggatcatactgccgcggtatatttgaaggaatttttgccctgcaacttccttgttgtattttgaagtcccatgcttgatgcgccagttcataaccaatgttaatcgtttttttctgccccttgctctccggctgacctgatgtgcctggggccat

SEQ ID NO: 70877 - DNA, 902 bp, Oryza sativa
  unsure (1)..(902): unsure at all n locations
  Clone ID: PAT_MRT4530_71405C.1
gcatcttacacattttcctagcaatctgtgtgtgaaaagttggtagcaaactctaatagtttctagtgtcaaccagatttgcatcctcatcaatgaataacgtcacagccgtcatcacaagcctgtcagatggancgaatatgcaaatagtagcttatgcaatagcgacttagcatgatactggaagggactacattcttggatgagaactaattgaagttatcatatccgcagaaaaacaaaatccaccacggcacaatcagtaacaaggaagagaacaggtcatgatagggtcgttgcttgcctttataatactgaataaatttgcatatttcaatggctccttatgatggtttgtgtgtttgaaaccaattgcataaaacaaccacctatttggtttgatgctacgtaagatgccagagtcacatgaacaaggaaaaccgataacgagatcattcctttgtgccaccagaaggtggttcagtattagagcatcttgaatgagggccaaatcaacaaacatatgtaaaatatttaaaagttttaaatacgaacaatttatatcctactgcatgaaaggttcggtattaattgcattacctttcatctatagatatgcaaggttcaatattatattgatgaaacaaggattttccataagttatgtggcatacaatgatgtagcaccctttcaattacatgtggccccataacataactcacactcgaggtgaaattcaatgacaaattctgaaatgctattgaatgaagttgcacatccacaaaattcccaatttagaaggcacacataaggtcatatgatatgtttgactgaggagataagaactatctttaggactaacaaatgaatattccattgtaggataagcatatgcaatgat

SEQ ID NO: 70878 - DNA, 1998 bp, Oryza sativa
  Clone ID: PAT_MRT4530_71406C.1
atgccatcccatgagagcaagaatttgttgacaaaactcaagactcaacatcaaattgccaaggacataaaggtcattaagaagcaagtcatagaggtaagtgagaggttcacaaggtacaaggttgatgaaggaacttcgaagctgcaaaattcgaccattgacccacgagtatgcgcaatatataaagatgcatctgaccttgttggcattcatgagcctgtagaagacatcatcaagtgcttcacatatgaggatgaattggcaaaagatctgaaagttgtctccatagttggattcggaggactaggcgaaacgactcttgccaaccaagtgtaccgcaaacttgctgccaagtttgagtgtcgagcttttgtgtcaatttctcggaatcctgatataagaagcattttgaaatctttgttatcccaaatctgcaatcaagaatatgtccagaccgacgcatgggatgagaatcaaattattagcacaatcaaaaaacttcttgaaaagaaaaggtatgtgctgaaactttcaaggggtcaccctaggtgttttccattggagatttgctccggtccaacaaaaagtaccttgaggtactggtacctcacggaatcgtttccgatcgttgaatctaacaatgctcatcctgctcagctagatccaacgatcggaaatgatctggtaccgtacagatttttcgtacaaccatttgacagaagcttagtccagccattggaaatacgcattgatggccaagcgcggagttgtcgagtccatgacaccatccacgatttcctcttgtccaagtctattgaagagaactttgctgctacaatcaactatccacagcttacatgtttgtcaactccagatatgaagatccctactattttttggggtgcaaagcaactacccactttctccaacttcagcaccttgcgtgtgctggacttgtggttttgtgctgaatgtggattagaaaaccatcatcttgagactgtgacaagactttctcagttgaggtacctgacaatccaagggaagaagataactgaacttccaagaaaatttggagatctcaaatgtctagaggtgctagatgtcatagctacatcggtaaaagaactgcctaaatctactactcagctgcagcgattagctgttctgtatgtcaatgatggaacaaagttgcctgatcaattcaaaaatatgcaaatgttagaagaggtagtaggcatagatgtattcagacactcgatggaatttctggagggactgtgtgagctgaaaaacctgtggaggttgagcataaattgggatattgacaggctagaaggtaataaagtgagatacaaggaaataatagcatcttctctctgcaaactagaagcctgcaatctccatgatctgagcattcatgttcacttgagaaacaacgatgatttctcttccttgttactacctctaaatagcattaaaagttttgtactcagaggagaaagcatttccatggttaacatatggcagagctcccttgtgagcatccggcgattggctcttactattaaggacatagatcaagatgatcttcaggtccttggaagtatacccagtttgacaaatttgtacctatgtttagacccagaccaaaatgaaagatctattgccatcagcgacatccatggattccaacagttggagcctttcactttccaatctacgcatacgggtctgatgtttgaagctggatctatgccaaggcttggacaactttcgtttggaatcaatgtagctaatttcaagtcaacatatggtggtttttgtctaggcatccagcacctgtcctgcctcactatggtcagtgtcagtacaaatcgtttgggtgcaaagcttggatatgtggaagccgtagaggatgctttcaggtgcatggtagaagcacatccaaaccagcccactctagaaattgaaactgacaatttatgtgaatga

SEQ ID NO: 70879 - DNA, 220 bp, Oryza sativa
  Clone ID: PAT_MRT4530_71407C.1
tggcacgaggcccaagtcgctgttgcacctgaagcagagtagagaaggagaggagcggagcgccatcaggcgtccgatctgagtgatcctgatggctctcgctctctccacctctgctgctgctgccgctgccgccgcggcgcgggctgctcgcggcgagggtgacgacgacgagtgtgtgttacgccgcgtcgtgctgtgcgtcgtcggcgatgagtgc

SEQ ID NO: 70880 - DNA, 451 bp, Oryza sativa
  Clone ID: PAT_MRT4530_71408C.1
aatgagaagcaacaacatatctctgctttaatgcctgcatctcaatagtctcaagctgctcggctaagtggcaagtgagatcttcaatgccgaccatggatggacagcaaggatggaacgcgtctggagggataaaggaagactttgagggaaagatgatctagctgaaagctggagttgttttgtgatagacagtggctgtgtttggattggcccaaagtttagaatttggttgaaattggagacgatgtgactaaaaagttgtgtgtgtatgaaaggtttgatgtgatggaaagttggaagtttggaaaaaaaattggaactaaacacacccagtgttgtacgtaggctatctctgtgtgaaaaacctgtatacatatacagcgttgtacgaacatatttggtggctagcagtacatatacaggttgatcaagaaaaaaaaaaaaaaaa

SEQ ID NO: 70881 - DNA, 168 bp, Oryza sativa
  Clone ID: PAT_MRT4530_71409C.1
atactaacaacgagatgtcctatcccggctgctgcaggaagccaacatatatgctgaaacctggctttatgctattaaaagagtacaaggccacctaaggaacaaacacagctgtccacactgtggccaatgaccaatacgggtgggccgactagatgctattagagc

SEQ ID NO: 70882 - DNA, 908 bp, Oryza sativa
  Clone ID: PAT_MRT4530_7140C.1
tcgacctttgcgtccggtagctctcagctagctagctaaaccagtgctaattgtgttgctaatttgtgttgatttgtgattttgatacgagatggccggagtagggaggacgatgatcgcgccgctgctggtgctgaatctgatcatgtacttgatcgtgatcgggttcgcgagctggaatctcaaccactacatcaacggcgagaccaaccacccgggggtcgccggcaacggcgccaccttctacttcctcgtcttcgccatcctcgcgggggtggtcggcgccgcctccaagctcgccggcgtccaccacgtccgctcctggggcgcgcacagcctcgccgccggcgccgcgtcggcgctcatcgcctgggccatcaccgcgctcgccttcggcctcgcctgcaaggagatccacatcggcggctaccgcgggtggcgcctccgcgtgctcgaggccttcgtcatcatcctcgccttcacgcagctgctctacgtcgccatgctccacggcggcctcttctccggcaaccacgccgccggcgccggcggctacggcggcgactaccccgccgaccaccaccacaagcccgccgccgcggccagggtctaactgaatttgaccccgacacaccggccaatcgatcgatgccatccatcatgcacacgactgcctatatatctcggtgtgatcgagctttgattttctcgtaatttcttcactttgtgtttcccgctcgtgcattgctgctagatgcaatggcaatgcacgaacaacgctgttcatatactctccgtatgtaaacttctgttctctgtatcgacgttcgtaatcatatgtatgtaccgtttggtttggttttagttccttttttccgcgcgcttttatgcctaaaaaaaaggggggg

SEQ ID NO: 70883 - DNA, 273 bp, Oryza sativa
  unsure (1)..(273): unsure at all n locations
  Clone ID: PAT_MRT4530_71410C.1
catcaccaaagcaccttcctggtaaacattgtgacaaccttttcagtgcaaagacttttcagagttttggtagcgcttttctagaaagcaatacacagtaagctggcgtacaaacatatcctactatgctctcataccacgggagatttttgccgtgcgttgtcatgcactgttacgcctgaacttgaccaaagacacttttttattgtttnagttcttacacaattattatttgcatttgaaaggtttttagcttgatggtaattgatcact

SEQ ID NO: 70884 - DNA, 114 bp, Oryza sativa
  Clone ID: PAT_MRT4530_71411C.1
ccagacttctcgtataatttgtgcgccgctcaagccatacttcagaggttcggcttttaagccagagaacctgacacaaggcatgctgaaatacttctactttggcgatgaggg

SEQ ID NO: 70885 - DNA, 1429 bp, Oryza sativa
  unsure (1)..(1429): unsure at all n locations
  Clone ID: PAT_MRT4530_71412C.1
ttttttttttttttttttttttttttttttttttttttttngggagaaaatacatagattaacactagccattagcaaatcaacaacaaaataataataaaaaaaatntcgnggaactgtcgnttcccctttttagtcccggttggtagattccctntttttactcccggtnggggttaccaaccgggactattatttgaaccgggactaaagatagcgatntttagtcccggattggtactcccggtttggaaaccgggactaaaggggggttacgaaccgggactacaaagggtttctccaccagtgagagtgtattacttagtagtaattgcccgcgtacgtcccttcccgacgacgccgacgtgccgtgccgcgagtagtactctttctccgcactgtcggtgcggtacatacaggcgcgcgcgcgttcccgtcgaacggggatggcccagttcatttcgatcgtcgccactcgtgttacgtctgctactgctacctcggtggcgtagtacagctgcatgcgtcgatgaaatcttgagctgtggacattattgccttcgctagtgacgccttggacgaagacgcctcctataataattaaccattgtctgaaataactctgaataacagatcgaagcaccgattcgcatattgacaggtttatttccatgttacagatgcgctgcagcattatcagatcaatcaactggccgttagctagtgcggcgctttggaagacaaggctaacggtctcagctgctcgcaaacagttgatggatcgatttgacatgacccgcgagtagttgttcgtgggtgtaaatgtgttgaaaagagcccatagaaaatctcccgcgtgcacgtaattgacagatggtgcattcgaatctacagtgtgagactctccccttatgagcctatctctccttcgcctgatccatatcctctccggcacataggaggcggcagcatggtggccataaacgatggccccgaagctccatctagccagatttagtggatggactgagggcacgccgggagcagtggcgggcggacgaaatacccccctcaatccaatccgcggtggttttggtcgtccgccactgccgtcgtcatcctcccactgcagcgcacaggtgtgggcgtcgtcgttggcggcgatgttggcgcgcatgaggcagccgagctccatcttggcgcggggccggagcgccgggtcctgggtgactagcacagcggcgccgcagctccgcgccgaggccgtcgcgcccgggcccccccccccccccccccccccggtcaccttcccccgcctttgcttaaaagagctacagctaaaggtaaaattaattagaatcacaaataattcatttttgaaacggatcgagtaatctctcagccgcatgcgcgcgccttcggatttcat

SEQ ID NO: 70886 - DNA, 562 bp, Oryza sativa
  Clone ID: PAT_MRT4530_71413C.1
ccggccgggatccaaaactattccaagcaaactcttccagttttctgtttttctcatcttctgcttcccctgtgtagagcacagtagaggttccatcagcttgctctcatggtgttccaaacccaaggatccaacctgagggcattgctcgttgaggacatcaaagtgaaccgcatgatcctgtcgcagatgctgcgcaaattccaagttgaaaccactgtggttcagaatggaaaagaagctgttgaactattccttggaggagaaacatttgatattgttttgactgacaatcttatgcccatcatgactggtcctgaggcaatatccaagatccgtgccatgggtgctactgatgtgatggattgtggagtctcagttgacgccaacagcatggaagagttcaaagatgctggtgctgatctatgtgtgcccaagctgaagcttgagattctagagcacatccttcaggagaccaggagcaagaagaacaagagcagcgcttaggtttcagaagaaatcaagggactatctgtcatcattagtgtcatagttgttgact

SEQ ID NO: 70887 - DNA, 588 bp, Oryza sativa
  unsure (1)..(588): unsure at all n locations
  Clone ID: PAT_MRT4530_71414C.1
anagngccatctttaagggngccttcttaacnttttccaacctagttaactnnatttnaaacncccattcntttntggagtanagtaattgcttcctgatanaanatcncggatgantnantncccatnggcnnccccccnnagncnatnggngnnaaccnncnccgagtcccccgggaaacntgnangggnnttccttggagatnacnaanncntnccananggaccnccgtggagancaggctnanntggcaatcttnccncttcaatgacccgangacgacaatgcnctgggnttcgcnactgaatgnacctgcggtcctttgngccatccntggccnannaanctcntncctatattttcgntctacctgccggctggctancatgttatcaacncgtgtgtgttcncgccganccgacatncccacactacacgtcgacactanacgtgttttattttgttaattnataantctggncaaccaggtcatcttgtncggnacttctcccctntgncccgaaataaaccnacttttaaagattnnaatttntcgcaaaaaaaaaaaaaaaaaaaaaaaaaaaaaa

SEQ ID NO: 70888 - DNA, 1711 bp, Oryza sativa
  Clone ID: PAT_MRT4530_71415C.1
gagaaggcggcagcaatgggcgccggcgccggcgacgttgccgccagctggagggtggcggcggtggcgctcctcggcgcggtgaactgcgtggtgagcttcgtggtgttctcgttcttggatttgctggatatggtgctgtgcgtggtgtacaaggtggtggactacgcggtggaggcggagtggaaggcgtgctactgctcggcggcggcgcgggacggcgccgccgccgccatcttcgtgccgccggcgtcggcgtcggccgcgccggggccgaaggtggtgcggctgtcgccgtcgtcggcgaagatgcagctggaggacgtctccgacacgctgtacgtgcgcccctcgctgctgtcggacgccaccaagaagtccggccccgccgcgccgtcgctcacggtgagccccgccatcgccgagctcatccgcggcaagatcggccgcgccgccccgcgcccgccgcgccacgccgccccctgctggtccgactgcgactgcaaggtctgccactcatggagcgcctcctcccgctcctcccacctctacgtccacgtccaatccccgaccaccgcaagtggagtggagacggaggacgtggtgttcgtccacgggttcatatcgtcgtcggtgttctggacggagacggtgttcccggcgttcagcgaggcggcgaaggggaggtaccggatgttcgccgtcgacctgctggggttcggccggagcccgaagccggcggactcgctctacacgctccgggagcacgtcgagatgatcgagcgctccgtgctccagcgctaccgcctccgcaagttccacgtcgtcgcccactcgctcggctccgtcctcgccctcgccctcgccgtcaaataccccgacgccgtccagtccctcaccctcctcgctccgccgtacttcccggtgccggaggaggaggcgggggcggcgacgcagtacgtgatgcggcgggtggcgccgcggcgggtgtggccgccgatcgcgttcggggcgtcgatggcgtgctggtacgagcacgtcagccggaccatctgcctcaccatttgcaggcaccaccgcacctgggatcgcctcttcaggctcttcacccgcaacaggatgaggacgttcttgatcgaggcgttcatgtgccacacgcacaacgcggcgtggcacacgctgcacaacatcatctgcggcagcgccggcaagatggacagctacctcgacgtcgtcgccggccagctcgcctgcgaggtcgccgtcttccacggccgcgacgacgagctcctccccgtcgagtgcaccctcgccgtcggcgccagggtgccccggggcgcgcgtcaccgtctacgaccacaaggaccacatcaccatcatcgtcggccaggagaagctcttcgccaccgagctcgaagacatctggcgccggagcgccgccgccgccgccgccggcgacggcgagtagcaccgagctgcatgtcacacggctactactccagcactatacgcgacatgtacgtattatactgatcagcagtgcacagcagagacaagagaagcaagttagttaattaatggccggtaaattaaacaagaactcgcaataacggatcgactgccctgcatgaagaagaagaattaagaagatgctgccctattttaggatgagcaatatattctaccatataaattaaaaaaaaaaaaaaaa

SEQ ID NO: 70889 - DNA, 343 bp, Oryza sativa
  unsure (1)..(343): unsure at all n locations
  Clone ID: PAT_MRT4530_71416C.1
aactacaatcacaaatttacaaaggctcaatgatggacagggtccaaaacgagacggcgatctaggcctacacaaggataagagccagcaccaaatatatgttatttatttgatcgaagcaaatatcagactattacataatatattagagaatttcacggactaatttgtaaaattagtggttgtgatactgtgctttttgttaaacaactgtatcattcatacatcagctatattttgtatggtacagtctgagctgctcctagtagggagctagcatttttaaactcgaccatagttataacttatcataaggagtttataaattttaatttcatacaan

SEQ ID NO: 70890 - DNA, 1036 bp, Oryza sativa
  Clone ID: PAT_MRT4530_71417C.1
ccggccgggaggggaaaccaacggcaggaggagggagacacctcgaggaaaccacagcacccaaagaacaagaaaggcgataccccttctcccaccaccaccgtttccgtccatctccatcctcaccgccggcgacgctcacctccgacgaccgatcggcgacctgcttcagccatggcaatggcttacaagatggcgacggaggggatgaacgtgaaggaggagtgccagaggtggttcatggagatgaagtggaagaaggtgcaccggttcgtggtgtacaagatcgacgagcggtcgcgcgccgtgctggtggacaaggtgggcggccccggcgaagggtacgaggagctcgtcgccgcgctgcccaccgacgactgccgctacgccgtcttcgacttcgacttcgtcaccgtcgacaactgccagaagagcaagatcttcttcatcgcctggtcaccgaccgcatcgaggataagagccaagattctgtacgcgacgtcgaagcaagggctgaggcgggtgcttgacggggtccactacgaggtgcaagccacggactcctccgagatgggctacgacgtcatccgaggccgcgctcagtgagctgagctcctccggcgccggcgcgccgccgcgacgcgacgagtcgcgggcgggcttgcggcgctgtacttagcacgtactcacccccagtgtgtgtggtataatcggacggatgctaattggctctctcgttctcgtagtagggcggctgatgatgcgatctgacgagggtttgtgaatttggtttagagtttggcgtggcgtggcgtgctgtttcgtttggagagttggaggggtgtgtgtagcgtggcgtgttgctgagggagtggcagcggattagtgaaacgtcccatgtcggtgacgtagaaattccactgatgatgctccacttggttgattaattgttccaggaaacatgatcggggtgcttcaaaattttgttcgactgctggaataaaaggacacttgacacttcaaaaaaaaaaaaaaa

SEQ ID NO: 70891 - DNA, 338 bp, Oryza sativa
  Clone ID: PAT_MRT4530_71418C.1
gaattaactagcgagttttttttgcaaaaataaagggatggaccgccgccaaagcgggggggaacaaaacattataacgcgaaggatgtgtttgaataacaagaaccggaaatcaaccacaagggctccaagatgttttgggggccgcgtttccctttaaaacctcgctaaagatggcgggaaggaccaaaggccgagacccagaagttcttgggcacctgactgcaaaccctccaggtgtgaaagatcctacgaagaaaccacctgtacgccggaacttcaacgggggagaccgacacccttagcaactactgcagatgcccttaggtgaccaccca

SEQ ID NO: 70892 - DNA, 1318 bp, Oryza sativa
  Clone ID: PAT_MRT4530_71419C.1
cccgggctgcagcacgtcggaccgggcgacaaatcgaatcaatccatcggcggcggcggcgactcggctctcgcttcgacgcatccatccccgcgcccccctcctctccggcgactccccggaatcgcggcgcggcggcgcggccgccctagcgtcggcgacggctaggtcttcctccccgaccccttcgtgaggtgaggaattcctatataggactacaatttaagggagaagctttcaggcttctagcaagtaataactactgatctccaatggcacaaccttcttctaagaagacgccgtcagtctatctttacatccctaatatcattggatattttaggatcatcataaacttcattgcttttgccgtatgttattccaatagggtgctctttgctatcctatacttcttcagctttttctgcgatggcttggatggttggtttgcacgaaagtttaaccaagcatcaacatttggagctgtgctggacatggtaacagatagggttagcactgcctgtttgttggcacttctctcccagttttacagacctggcttagttttcttgatgttgcttgggttggatattacaagccattggtttcaaatgtacagttcgttcctatcaggtaagactagccacaaggatgtaaaagacacaggcaattggcttctgaagttatattatggacaccgaccattcatggccttctgttgtgttgcttcggaggttctgtacatagttctttttctgttcgccgatgagaagtcaacaagcttgcttaatgtgtgcggaaaccttctgaagcaaagtcctctcactgtcttctttttcatttcaactctagttggttgggcgttgaaacaagtgatcaatgttatccagatgaaatcagccgcagacgcgtgcgttgtgtttgatttgaagcgcggcaagtgagcagaaatgcacaacgatttcgtttagcttgtgtttggcatgtcgaagaaaatattccatgaggcttgatgtaccaaggctgtacaaacctaatgtaagattttgacatgtcctcggacgcgtgggtcgacccaccctctttttttgggtttggtggggtatcttcatcatcgaatagatagttatatacatcatccatgttcagattttgtatgtctctttttacaacagcgatgaatcagcgcgatctttgtttctttatgagcttgatgtttgttgacagtatttttagctggttatttgtgaataccattctcacctctggaaatttggagggcatgaaaaaaaaaaaaaaaaaaaaaaaaaaaaaaaaa

SEQ ID NO: 70893 - DNA, 2175 bp, Oryza sativa
  Clone ID: PAT_MRT4530_7141C.1
gacataaacaaacgaagatgctgctcgtctagttccctgatttggagattcatcaaatggatcatctcagtattagaaatcctttgtctcttctgctctcactgcagttgtcacttttgttgttcaatcccttgtctgtagcagacttaacctctgaaaagcaagcccttctagactttgcctctgcagtgtatcgtggcaacaggctcaactggagtcaaagcacatcattgtgttcttggcatggcgtaaaatgctcaggagatcagtcacacatatttgaattaagggtaccaggtgctggtctcattggagcaattcctccaaacactcttggaaagcttgactctctccaagttctgagcttacggtctaatcgtttagctggaagccttccatctgatgtgactacgcttccttccttacgatccatataccttcagcacaataacttttcaggagatttgccttcctttttgaatcctaacctcagtgtagtggacctctcctacaattcctttaccggtgaaattcctataagcttacaaaacctttctcagttatcagtcctgaatttacaagaaaattctctctctggatccatccctgatctcaagcttccaagtctgagactattgaatctgagcaacaatgatttgaaaggccaaattcctcagtcgcttcaaacatttccaaatggctcattcttggggaatcctggattatgtgggccacctctagctaaatgcttgcttcctgattcaccgacgccttcaccagcatccccttcatcagcaccaactccaatgtcagcgcatcatgagaaaaagtttggcgccggattcataattgcagttgctgttgggggcttcgcagtactgatgtttgttgtggttgtgttggttgtgtgtaattcaaagaggaaaggcaagaaagagagtggtgtggactacaagggtaagggcactggtgtcagaagtgagaagccaaaacaggagttcagtagtggcgttcagatcgccgagaaaaacaagttggttttcttggagggttgctcctataccttcgatttggaggatctactgagagcttctgcagaagtccttggcaagggaagttatggaactgcttacaaagctatacttgaggatggtaccgttgttgttgtcaagagactaaaagatgtcgtggcaggaaaaaaagagtttgagcaacagatggaactaattggtaggttaggtaaacatgcaaacttagtcccacttcgtgcttactactattctaaggacgagaagctcatcgtctacgattatctcaccaatggcagtttctcaaccaagttacatggtatcaggggtgttactgaaaagacaccattagactggagcaccagagtgaagataatccttggaacagcatacggcattgcacacgttcatgcagaaggtggcgccaagctcacccatggcaatattaagtctacaaatatcctcctcgatcaagattacagttcttatgtttcagactatggtctaactgccctgatgagtgttccagccaatgcatctcgcgttgtggtcggttatcgcgctcctgagaccatcgagaaccgcaagatcacccagaaatccgacgtctacagcttcggcgtcctcctcatggagatgcttaccggtaaagctccactccagtcgcagggcaatgacgatgtcgtcgacctaccaagatgggtgcactcggtggtcagagaggagtggacagccgaggtgttcgacgtcgagctgatcaagcagcaaaacatcgaggaggagcttgttcagatgctccagatagcaatggcttgcacatcaaggtctccagatcgacgcccatcgatggaggatgtgatcaggatgatcgagggactgcgccattctgcttcagagagccgagcttcctctgatgaaaagatgaaggactccaatccaccatcggtttagttatgtgctcctgtgttcatatgcctcaccaagctgcgagttgcagatcatttgattcttagctaatttgtgattgagttcatgctaaacatggtcgacattagatgcagcctcagaaagctgagcatattctgattggaacttatgagtcttgaattcttgattcttgacaagtgtaggatttttttctctggga

SEQ ID NO: 70894 - DNA, 871 bp, Oryza sativa
  Clone ID: PAT_MRT4530_71420C.1
atggcacaaccttcttctgagaagacgccgtcagtctatctttacatccctaatatcattggatattttaggatcatcataaacttcattgcttttgctttaatgttattctatgtatcagcatcaacatttggagctgtgctggacatgcctgaaataatttcactgttcaaattgctcctcctcagggttagcactgcctgtttattggcacttctctcccaactttacagtatgttcctatcaggtaaaactagccacaaggatgtgaaggacactggcaattggcttctaaaattatattatggacatcgaccattcatggcattctgttgtgttgcttccgaggttctgtacataattctttttctgtttgctgatgagaaatcgacaagcttgcttaatgtgtgcagatgctttctaaagggaagtcctctcactttcttcgtttttatttcaactctagttggttgggcattaaaacaagtgatcaatatcatccaggtttgttataaagctgaagaaaaagtgttgatgcactggttagctcatatgctttacattagggtttagcttgtgtttggcatgtcaaagaaaatattccataaggcttgatgtaccaaggctgtacaaacctaatgtaagattttgacatgtccttgacactgagggagggcatgctgtgcattaacagcatgaaaagaaaaggagagagatcagatgtatttgaggaaaacagggttttagtcagattttgtatgtttctttttacaacagcgatgaatcagcgcgatctttgtttctttatgagcttgatgtttgttgacagtatttttagctggttatttgtgaaaaccattctcacctctgg

SEQ ID NO: 70895 - DNA, 3399 bp, Oryza sativa
  Clone ID: PAT_MRT4530_71421C.1
atgatgcagggcatttctccatcaagtgtaatgaagacactagatcatgcaaagaatatcatctcaggaaaaaatggcaagttgaaaaaaatcctaaagagtttagaaaaaataactgaagaagggtctcaatttttgttactgctagaaagaaccattggcagtggtacaaatggcaatggcatatcaaatcctgctaatacatcaattaggagtaccacttcatctcctacacaaatcattattggcagagacaaggagcgtgatgagatagtaaggatgctccgtgataccggggacgaacccaaatcctggatcatctgggccatgggcctaaagaactatgggcttagactagttttcacaatgctaagtctaatatgggccaaaataggctgggccatcactggacttggcccaaggttggatccagcccgcagtgaagcaacaggtgattgtgaacaaagctgccggaacagcaagtgttgttattcagtgattagcatctacggcattgctggttctgggaagactacgttagctcaaaatgtctgcagttatgaaaagattaacaactactttttccccgtcatgtggatttatgtttcaccaagtttcagtgtggacaaaatttatcaaaagatgctcgaggcagctacagggaagccatccagtgagttcagtaatcttgacacattacagatgaagttagaggcagaactaactggcaaaagattcttgcttgtattagatgatatatggcatgagaaggatgcaattgcacaggacaaactgaatcaactactttctccattgaaggtagggaagaaagggagcaaggtcctggtcacaactcgattcaaagatgtagcaatgtctcttagttctcagagaattatcccagtacctaacttcaacgaggaggatttcttcaatcttttcatgcactatgcacttgatgatgctgtgagtcttgatggccaagaacgagaaacattttataccattggaagggagattgcgagaaagcttaagggatcgccattagcagcaagaattgtaggatctcgactacgcaaacatttagatgttactgtttggacaagagttggagatcaacacctgttgactgataccatgggagctctgtggtggagctaccagcacctgaatgtgcagcttaggcgatgctttgcatattgcagcatgtttcctcaaggatacgatttcaaacgtgatgagctagttgacttatggatggcagaaggctttataaagaccactgattcagctgagcaaatggatgttgtatgtcagagctatttcgatgaactggtgtcatgctcattcctacaaccaaaggacatttttggcagtaagaacaagtggttcactatgcatgatttgttgcatgaattggccgcgatggttgctggaactgattgctttcgagttgaaagtggtgacatgaaagaaatcccccctgatgtccgccatctttttatccgctcaaatgatcaaacgaagtttgcggaaaagatttgcaaattgaaaaaattgcgcacgctgatactaattacaacttttggtggactggggataaccatagaagaacttgaggccatgctgaagaaattaaagaagctgcgagtggtgcatgtagatgtccaaggacaaatggtgtcaatcccgggatgcatttgtgagttgaagcatctacgatttcttagaatccacagcccctggtcagagaaggtaaatttgcccaaaaaattggacacaacttatcatcttcaaatcctagagctctgtggtgcaggtgtcttagacttctccaacgtccaaaacatgagccacctgattagcttgcgtgacattaggaattctggttttgtatttccaaacactgatgttccaggctttcctggcattggggaactgaaatcacttcgagaattgagtgacttcagagtgagaaaggacaaggggtatgagctgaagcagctcaagagcataaatcatcttcgtggcaggctaagaatcagtggccttgaaagtgtagaaagcaaggaggatgctctagaagcgaagcttactgacaagaagttcctcacatcattgtcacttgaatggtcacagtttagttcagtgcagcatagttgccctccagacctgcaagtagagatacttgaaggcctctgtccaccgtcacagctcacagaattggaaatacaacagtacaatggactgaggtgcccaagttggttgtcgtcagaaaatcagaatggtatattcacgaacctgcaagatctccaactctgtcgatgttacaatctcgaccatcttccagaaataggcaagcttttcgtttcccttcgtcagctgaaactcgttgtttttcccaaactgaaaagaatgccaagactcccgggcacactgaagaacctccacattcagcagtgtaaggcccttgtgatgacatgtagcgaagatgtgaacatgataagatcactctttgttgagacagcaactcaaattgagccatctctgaatattactgcaacagaagtagcagaaatcgaaaggtttgctggtgagcagcctgacaggtttgaaaagatcttgtgtgacattttcagcagatgtggtagcttgcctggtgagcttatccgtggccatataagagaggaagattactccgagcttacacttcctgcaacagttgttgataggctcattatctcatattgctttgtcacaaacacagtcctgcaccgttgcttgacaggctctgcaaacctggttagcttgaacctaaggtgtcttccatttctcacagaaatcccttctgaggtgatggagtctatggcaaagctctctgacctctccattgaggactgcatccagtttactcacttggaaggcctgaacaatctcagtagattgcaacacctaaccattgccaagtgccccaaccttagggcccttggagaagatcaaaaggtgagaagtctaaatggccttgccattgatgacataccccttgtgccacagcttctgtcaagagaaggctgctcatccctatggagccttagaatcgacgaatcggagcagctgaggggaggagatatcttggagcagcttacatcattgacatcccttgatttcagttgctgcagttgggacagattgccggagaatttggtgaacttgacatctctggagaatttgcgtttggattgctgcaaaaagattcaatcacttccagaactgcctgcatctctgcagtcttttgaggttgaggattgcgatgcattgttcatgaagagctgccagaaggctggagatcaaaattgtcaaaagattgctcatgtcccagtgaaaagattttcatcttag

SEQ ID NO: 70896 - DNA, 475 bp, Oryza sativa
  Clone ID: PAT_MRT4530_71422C.1
atcgaggcgccaagccaaggagccgaccatgtcccatgaccgatgtcgtcgtcgactccccaagaacaaccctctccggcgcaccgccagccgccgccaacgccgctactagctcacgccgccctctttacttcaccagctagccagtcactcaggaggcatgcccaccgatgagccttcatgacttactagcaaagtggagtactacactttagctaaccgtcccaaaggaatattaacattcaaattaattataaattaatcaccatcaccctctaatccctctttaattatatgcagagaccaaaaaaaacaaattgactccacttttatatgtacttcaacattactattcatcccatggggtaattactttcttattacaggaggagcctgctctcttttaaaaacactaccccctttcttttttcaaaatcatcatcacccctttcgatctaaaaaaaaaaaaaaaaaa

SEQ ID NO: 70897 - DNA, 209 bp, Oryza sativa
  Clone ID: PAT_MRT4530_71423C.1
acaaggtcaaaaccaacatgcagatgggggctaccgatttcccaccagaaaggggttgataaaactaacgtctaagacggacgtcatactgacccctccccccgaggccagtagacctgacccccccttgcccccctttaaattacgtgaaccccaagaaggtaattaacccaggccaaactttgcttgctttgctgaccaccattgct

SEQ ID NO: 70898 - DNA, 2919 bp, Oryza sativa
  Clone ID: PAT_MRT4530_71424C.1
atgaagatcccgttcgtgaccaagtggtcgcaccggtcgcacgagcccgccgcgccgtcgaatccggcggcgcagcagcagccgcccccgccgtccccggcgggggtgtcatcggccgcggcggctgcggtggtggaggaggcggagatggagacgggaggggatgacttcatcacgcaggaggaggagtaccagatacagctggcaatggcgctgtcggcgtcggcgtcggtgtcggcaccgagcggcggcgggggctcgggggacacggagggggagcagatcaggaaggcgaagctgatgagcctcgggaggggcgacctgagcgccgccgccgatcgtggcgtgggcgactccgcggaggcgctctcccgccgataccgggactataactttcttgactacaatgagaaagttatagatgggttctatgacatatttggactttccggggagtcggccaggcagggaaagatgccatcgcttgcagaacttcagaccagcattggagatcttggctttgaagtgattgtggtcgaccataagtttgatagtgccttgcaggagatgatggaagtagcacaatgctgcatgttgggctgtcctgatactacagtattggtgcgacgaatagctgaagttgttgcaggacatatgggtggtcctgtgatagatgcaactgaaatgtttacgaaatggttgggcaaaagcattgagcagaggacatcacatcagacaagcctgctgcctataggccgcattgacataggcttgtctcggcatcgtgccttacttttcaagattcttgctgacagtgttggtattccatgcaagctggttaaagggagccattacactggtgttgaagatgatgctattaacattgtaaagatgaataacgaaagggaatttttggttgatgttatggctgccccaggaacactcattccagcagatgtctttatttcaaagggtactccattcaacttgactaaaccgttggtgcagaatcaggtggttgaattggcaagtaacattgaaaatgacccaagtgcagctcattctgagcatgtaggcaaccgattgcatatgtttggcaatggtaattcgttgtcagaaaatcaatcagggtgtgaaaaaaccatgatagctggaagtgaggttagtcaactctggacattggcacctcagatgcaatctgatcaacaatcaacttctgctggcgcacattcaatgcagaaagaggacttgaaattaactccagactctcaagaaaatgaagagtctaaaaagcaaatttcagagactgattctttcaggggtattgaactgggtaaaagttcattggcattcaagggattaaacaatagaaataatgaatatcaaaggcatagagagaatatagctccagcacctggaagatctcaacaaccattggtgatgaaaaactggtcagcttgtaatgacatttctaacaagcaatacaatattgctgagaggttagttcgtcggagaaacactagcgacaatgctgcatcgtcatctcagttggcctggtcaactgcaaagcattacaatcccaatggcagagagcgtaatgataggttatgtgcagcaccaggtcgtaattatgacaatagaaaagttggtgcctcaactacggcaacagcttctgccactggagaacgcctggatagaccaaacctggcacctgttcattactatgatgacaaaccgaatggtatttcttcagtgaatgcagcttctacatctggaatcgtgaaggttgcagaaaagggccctcatgatctggaaaaagttcccatctattctagatttgacagtcaaatctatagtagtatgcaagggtattctccagaagtgaaggagaacaaggaaaactatgataggcatgacaacatgaggttacatcctgatccaagaaggtcccctctagacagattcatggacacatcaaggcagaactcagaatctgtttctccaccccaagctgggtcaagcaccgttgacatggtgttgggcgaagtttctgaatgtgaaatcctctgggaggatcttctaattggtgaaaggattggcctaggttcgtatggagaagtataccatgccgattggaatggaactgaagtggctgtaaagaagtttttggatcaagagttctatggtgatgctttggctgaatttcgttgcgaggtgaggattatgcgccggcttcgtcatccaaatattgtactctttatgggtgcagtaacacggcctccacacttgtccattgtatcagaataccttcctaggggaagcttgtatacgattattcatcgccctgattgccaaattgatgagaagtgcaggattaaaatggcccttgatgtggccagaggcatgaattgtcttcatactagtgtaccgacaattgttcatcgggatctaaaatcaccaaacttgctggttgacaataattggaccgttaaggtctgtgattttggactttcacgtttgaagcacggtacatttttgtcatccaaatccactgcagggactcctgagtggatggcaccagaggtattaaggaatgagcagtcaaatgagaagtgtgatgtttacagctttggtgtcatcttatgggaactagcaacactacaaatgccatggagtggcatgaaccccatgcaagttgtgggtgcagttggtttccaggatagacggcttgatatccccatggaggttgatcctctagttgcatctattatacaggactgctggcagaaggatccaaacttgcgcccttcttttagccagctaactagctatctgaatacattgcaaaggctagtaatcccttgtcatcaggagacagcgggctcctatgtaccgcaagaaatatcgttataccggtga

SEQ ID NO: 70899 - DNA, 323 bp, Oryza sativa
  Clone ID: PAT_MRT4530_71425C.1
cggcacgaggtgaatcctgaagtcttggatagagttggctttgtgttgattgtatgtgtcgggttgtgggtgatctcggcagtattctgttgttggcctagcggcggtcggtcacacttagcgacggctggtccgatactagccttctcctggatctgtgtgttggcgctgttggtgtgtgggtggtgatataattttcttttttcctggttacgatcttccaaggttgtaatcttgtaatttttttctactctatcaatataacttcgcaccgtcaccgtctagtgcgagtcattaaaaaaaaaaaaaaaaaactcgagggg

SEQ ID NO: 70900 - DNA, 1258 bp, Oryza sativa
  Clone ID: PAT_MRT4530_71426C.1
atggtgaccgggagctttagcaggagcacgtcggcgcggctcacagcgaggggcggcgtcgggagcccgcgggtgtcggcggcggcggccgcgcaccgcaagtggtggtggtgggcgccctcggggccgtcgttcgagtgcgctgccttggccttcttcctttcctccgtcgcgctcgtgctcgcctgcgcgctgtatctgtatctcttccggtaccagggccgcggccatgcggtcgccgagttcgccggcgacaacctagagtcctgcgacgtgttcgacggaagctgggtgccggacaggaggtaccctttgtacaatagctccgattgcccgtttgtggagaggggattcaattgcctggcaaatgggaggaaggacaccggctacctgaaatggcggtggaagccaaggggatgcgacttgccgcggttcagtgccagggatgtgttggaacggctgagggggaagagggttgtgtttgtgggggactccatgagccggacacagtgggaatctttcatctgcatgctcatggcaggggtggagaatcccaagactgtttatgaggttaatggcaatcagatctcaaagactatccggtttttaggagtgagatttgcgtcattcaacctgaatgtagagttcttccggtcggtgtttcttgtacaacagagccctgcacctcgcagtagcccaaaaagggtccgagcaattctcaagcttgataagatggataatatcagccggaaatgggagaatgctgatgtgcttattttcaactcagggcattggtggactcccagcaaattatttgatatgggctgctattttgaggctggaggtttgcttaaactaggtacatccattaattctgctttcaaaatggcacttgaaacatgggcttcatgggtgaaggaaaaggtggatttaaaacgaacacatgtctttttccgcacgtatgagccatctcattggagtggttcaaatcaaaaggtatgtgaagtaacagaatttcctacagctgaggccaaaggagatgacagaagtgaatttggagatatactcgctggggttgtggtgaacatgagcgttcctgcaactatcttgaatgtgactttgatgggggccttcagaagtgatgctcatatcggtatatggagtcatccttcaaccatacttgattgcagtcattggtgccttcctggagtcccagatgcttggaatgaactagtaatttcccaccttttgacaaatg

SEQ ID NO: 70901 - DNA, 693 bp, Oryza sativa
  Clone ID: PAT_MRT4530_71427C.1
atggcagcggcaactttgtgcgacggcgacaaggatggagtcgacttgcagctagagcgccgcctttccccacaactcccacagcgagcacgtgaagagggaggaggcggggaggccagcagcggcccgttcctcgtcgtcgtcgttctgcggggacgacggccgccggacctcttcctctcccctccccccagctgcgcgcggtggaggaagccgcggcgtcgtcctcctcctctcccgcctcgccccgtcgacgcccgcgccttccggccgcccgtcgacgcccgcacacacccgcgcctccccattgacgatgggggcgacggaggcgccgctctccccgtcgccaagaagtccccctcatcctcctcctccagggcgctcgacagagacgcggcggaggccgaggtgtgccgccggctgacgagctcgcggcgggaggcgctcgggctgtatcgggacatccttcggggacgcggctccttatcggcggccgcgacgccgtgcaacaggcgctcgaccgactcgccgaggcatcccaccgcatggtcgaggccgaggaggccaagcgccgatgcgtctcaccgtggcggccgggcggcggcggggtggtggcgcacgtggggtgcggcgattacgacggcgtcgcgacgtgaagcgcagcgtgccggtgtgggagctcaacgagcatga

SEQ ID NO: 70902 - DNA, 700 bp, Oryza sativa
  unsure (1)..(700): unsure at all n locations
  Clone ID: PAT_MRT4530_71428C.1
ntcnngaggccggccggggaataaaaaattgcttctcataactccaacatcagagcgtaatcataacaactagaatccgcaccacaatgaacatcattttcttcattgctctccttgctattgctgcatgtatcgcctctgggaagtttgatgctgcaactcaagtttacacggaatatcaaatgcagccgcatctcatgctgcatcaacagatgctaacaccatgcggtgaattcggaaggaatgaccgtagaacatgggcagcccccttcttccaatcacccgtgttgcaactgataaactgccaagccatgcagcagcagagctgcccacctatcacgatgatcgcgtaacagtctctctgccagaacattataatcgtgcatccgattgtgcaacacttacagctaccacagacctgatggcggctacttcgatcatgctcaagctcaatgaccaagttatgttggacctaaacttgccgacaatatgcgatatctacccaagctacaacactgctccctgtcacattcctaccgacggtgacatctgcgattgaattgtagcagtatagtagtacaggagagaaaaatatagtcatgcatcatcgtgtgtgacaagttgaaacatcggtgtgatacagatctgaataacaatgtcatgcgattttaagcaaaaaacaaagaaaacacccgcgggc

SEQ ID NO: 70903 - DNA, 405 bp, Oryza sativa
  Clone ID: PAT_MRT4530_71429C.1
atggccttctccgcggagccggcggccgaagaggctgaggaggaggccctcccgcccgtcaccggccccggcgaggtcaccgcggaggagtggaggcggtggggcacctcctcgccgctcccggccgcggtggccgccgtcgtcggcgagcttctcgagatggaggccgaggctggccagaagatgcgcttcggcggcgtcggctccaagattaagggtgatttcaaagacatggaggacaagaagcacagggctgtctaccagacgctcgccgactcggacaagaagctgcagtacttctccgcgcggcagattgcttgccgcttgctagggagtagaggatatctgtgccagaagcgatcatacacaatgcagcaatcaggccttaatggtttattcaactga

SEQ ID NO: 70904 - DNA, 3879 bp, Oryza sativa
  Clone ID: PAT_MRT4530_7142C.1
accttccagctcgaagatttctgtctgaatcgatcggatcaagatcaaatcaaggagggaggaggttgagcaattcctgacagggacagatcgggaaagctctcacagctttttctttgtttttgtttgatttgttcctgcttttcgattggaaaattgggaggggaggaaggtgatagccattgaggtggtggcatttgctgtcaccacctttagctatcgccttcctcttcctcgtctcgctcgccccccggtctagcttctttctgcagggccggacggaaaaaacaaaacaaaagaaggcaccagccagccatggcgatggtgctggactccttcgtcacccggtgcacggcgtcgctggaggacttcgccgggcaggaggcgtgcggcgccctcggcatcggggacgacgtgcggtgcctcctggccacgctccggcgcgtccaggccgtcgtctcccacgaggagcgccgcggcagggtgctgagcgccaaggtggacgcctgggtggcgcaggtgaaggacgcgatgtacgagaccgacgacgtcctcgacgtctccatggtcgagggcggcaagatgctcgccgagggggacagcccgccgacgcccaaggcgcgctgctccctcatgttctcctgcttcaagcctgcatccgcccccaagttccaccacgagatcggcttcaccttcagggagatcgacgccaagctgagggagatcgaggaggaaatgcccaggctccccgcaggatctttgcactctgaatcaagaagggattggttcagtagaggcatctgcagtaacttctctgacgccattaggccactcgcggttgggacacaggttcagaaatctctggatggccttgtgcctaggatgattagagagggcaagaagaaggtggatgtcttggccatcgtcggcgcagtggggatcggcaagacaatgcttgctagggagatttacaacgacgagaggatgaccgaaacatttccaattcgtgtgtgggtgaagatgacaaaggatttgacagatgtggatttcttgaagaagatcatcatcggtgccggtggtggtgtcaatgttggtgagattgagagcaagaaggagctccttggaatcgtcagttctactctttcgaagaggtttctcattgtattggatgacttggacaacccaggtatatgggatgatctgctcaaagatccactgggagatggtgtggcccgaggcagaatactaatcacaacacggagcgaggaagtggcaacaggcatgaaggccatggtccaccgcgtcgacaaaatggatgcagagaatggctgggcattgttgtgcaggcagtctctcccagagtgcagttcagaagagctcgcgtcactgaaggatgttgggatcaagattgtggagagatgtgatggccatcctctagcaatcaagatggttgctggtgtcctaaggtctagaggcaagagcaaggctgagtgggagatggttatgagaagtgatgtttggtccatgcggccaatcattcctgagctgcctcaagctctctacttgagttatgttgatctgccttctgaattaaaggagtgcttcctccattgctctttgtatccagaagaattacccattcagaggtttggtcttatccgacgttggatagctgaaggccttgtaagtgacaaagacaataagttgctagaagattctgctgaagagtactatgcagaattggtaagcagaaacctgttacagctttatgctggtaatcttgatcagtgctggataacgcatgatcttcttcgctcactagcacgctttctgataacagatgagagtatcttaatcagcggccaacagagattgagcacagacccattgtcattgtcaaagccacgacacctgacattgtgcaacatggaaaacagatttgatgatccaatttcagtaaagcagcagatgagcctaaggtcattgatgctcttcaatagcccaaatgtcagatcaatagataatctcgtcgagtcagcatcatgcttgcgtgtcttggatctgagcaagacagcattaggtgctctcccaaaatccattggtaacctgcttcatttgaggtacctcaatcttgatgaaactcaggtcagagacataccctcttccattggctttcttataaacttggagactttgagccttcagaattgccagagattgcagagacttccttggaccgtcagggcattgctacagcttagatgcctttcgctcacaggaacttctcttagtcatgtaccaaagggtgttggtgatttgaagaatctgaactatcttgctggtttaatcattagtcacgacaacggtggacctgagggttgtgatttaaatgacctacagactttgtcagaattaaggcaccttcacatagagaacctggatagagctacttcaggcgcttctgcacttgcaaacaagccattcctcaaggatctacacctctgtgaacaggcaccattgatagaggagcagcaatctgaacaagaacaagagaatcaagatgaccaaaaggaaacagaggaagaagagaaggaagtacttgatgtaaccaatagccaatttagtagagaggaatcaatcaaagcgagcgaaaagatatggaacgaactcaccccaccccagaacattgagaaactagtaattaagaactaccgaggtggaaagtttccaaactggttgacaggtccaaagctgggcatatcattccctagtcttgtgtacttggatatcgacaactgcatgtcatgcacggcactgcctgctcttggcctcctaaaccaactccagtccttgcaaatctcgaatgcagactcagtcgtcaccattggtcctgaattcctcggtgctgcttcatcatcatcggccactgcttccttccccaagcttgagatattaaagctcagaaacatgaagaaattggaagagtggtcattagccgtggaagagaatcagatattgttaccatgtcttaaatcactgcacatacagttctgccccaaacttaaagctctaccagaaggactgaagaatgtttcgctgcgtgagcttcatgtcgagggtgcatatagcctaacagaaataaaggacctgccgagaatatctgatgatctccaactcaaagacaacagagcacttcagaggatctctagcttgcccgtattgcagtctctcaccattgacaactgcccaaagttgaagcatgtttcaggccttgacacactgcagcatctcaggctggcgttccctccatccacagagacattttattttgatgagctgatcatcttctggagtattgcattcccacggtggctggagctgttgatccgtaagcgcgatgggctgtgccatttcgagcttcagtgcagcctctcattgctcaggagctgcctggacggtggcaagaactggagcatcgttcagcagatccccgaggtgcggatcaccagcaccgatggcaagaggtacatccggtacaacaaacgccggtgcatctatgagacgaatgctcaatctgaagattgaagccttcgtgaaagtcccagtgcagtacgttttttttttttcatcttcattgtgcagttcatcttgtcaaggttctcttgttcagttgtgtggtgtcattacttacagaagtgtatattttcgttgatttattggcagtggtttgggttgttacaaggacacatctcagttttcctgggtagtccttccatgagttttgtttgcaatatttgccaacacgtgcattcacacaggctattatgtaagcctttgttctatcttttctaattaaaaaaaaattgctctagatcgcga

SEQ ID NO: 70905 - DNA, 948 bp, Oryza sativa
  Clone ID: PAT_MRT4530_71430C.1
atggccaccaccaccgcgccggaggacgcgccgtccgcggccaagggggctaaaggagaggcgaagaggaaacagagcaactggcgtgggggaggaggaggcggcggcggccgcggcgacgggggtcaggggcagaagcggaagaggaaggaggtattcgtctacgggaactacaggaactactacggctaccggattgaccgtaatgttgatgaagaccctcgtcttaaaatatttaagagagagtggtttgaaagcaaggattgtcttgatattggatgcaaccagggtttggtaacgattggtctagctgcgaaatttaaatgccaaagcattcttggagttgatattgattcaggtttgatcgaaactgccaactggaatttaagaaggatgtctcgactggataaggtggttgtagaaaacaccaaggctcacaagtcatcagattcaccgtctgaaagctgtccggaaaaagtggcacctgagatatcaaatggggatatttctaatggcagtcatcatgatatttttaaagttgtttcttttcgtcgcgagaattttgtggacagcatgtgtacaagttcagaacagtatgatacaattgtttgtttgagtgtgaccaaatggatccacctgaactggggtgacgatggcataattactttatttgtgaagatctggagacttctaagaccgggtggagtttttattatggagcctcaaccttggacctcatataggagaaacagattggtttcagaggttgccaaagagaacttcaataccatcctaatacatccagataaattccgggagatacttctagacaagatcggattcaggtcggtagaggtggttacggacaaactggagggcgctgttactggttttgaccgcccaatcgaagtttaccacaaagtgatgggaactggatcaagttcttga

SEQ ID NO: 70906 - DNA, 166 bp, Oryza sativa
  unsure (1)..(166): unsure at all n locations
  Clone ID: PAT_MRT4530_71431C.1
agtgttggtgntncaggcatgtncaattgtgttgncctgantacccattgtcnctttttgacagcanatttgcttactggaaacnctcaactcaanaactanaggcatttggaaattgagatgtttaaccagttgattcccaaaaaaaaaaaaaaaaaaaaaaaaa

SEQ ID NO: 70907 - DNA, 394 bp, Oryza sativa
  Clone ID: PAT_MRT4530_71432C.1
gttcctttcgattattatgagaactacacttatggcttttgtgctctgttagttggatgaaacgttaactaaacagtgctgagatggaaaagaagcactaggaagtgtttgtctcgtagtaaaaaaaaataatgttgcaaaattgatgctattaaacattctgtttgcatgttcctttatttacatatccatcctatcactgagattttgagcatgcacagatgcacttatgacaaaaaaaagcattttggtactgttatatttacatactaagtcaagtcaaattgtatatctggactatcatcaagattagtaataaagatttagttaaacatgttccagtgcctacgtggtgttcataactaataaggattcttaaaaaaaaaaaaaaaaa

SEQ ID NO: 70908 - DNA, 243 bp, Oryza sativa
  Clone ID: PAT_MRT4530_71433C.1
atggccgtccaaattttggaggtgtttggatggtgggcggtactgggatatggccaccccctagagaatattccctccagatgccagctccgtgcatccggccgattcggccggacggggcagcccaggaccgcgcgcgactcgcgcacgcggggtggttcgacggagcgggtggccgcgctggggacgagcggcaggcggggcgggcggcaggtgtcggcggcgcgggttctcgccctctag

SEQ ID NO: 70909 - DNA, 2231 bp, Oryza sativa
  Clone ID: PAT_MRT4530_71434C.1
aacacaacaatggtaaattatataaaacttacatatcaataatgtcttactattaaaaaatgttaacaaagaaaaatcactctcatttagatgttctcattccgtttaactgatagccttgctccaacagctaaggaatttgcgataaccgcaagaggcatgcctttcgtttcaggcaccttaattaacacgaatataaaggagactatgcagacaacagcatatatcccacaaacaccaattagacctatggagcttagcataacaggaaatgcataagtgacaataatggaaacaatccaaaatgtcaatgtacaaatagacatacaacggttacgacaactaggaggaaaaagctctgagcaaagaacattgggaattggtccaaatcccataacgaagcaacaaacatagatgataacaccaaatgtggataaaatagctccaaaaattgcttctaagttcataacattgaccacgatcaatataataagtgatactatcaacattggtattgtgtaaagaaggagtgatcttcttccataacgatccatgcatttcattgcaataccaatagaaggaagcatcgtaaaggtggttagagcactcgtcaaaatagatgatgaggaagaactaacattaaaccattttaacaaaattccagctccagcttgctcaagtatttgaggagtgtaataaagaatgccactaattccagcaagctgttgaagaatttgtattgtgacacccacaatcaatccctgctttaccccgggttgtaaaagatcagaccaactttgtccttcggtagacaagttgaatttggatggatgcaccattgcaggtccaatagaatggtgaaaagaaggtgtgctaaccaaagcggttgcatgggaaacacggccagcttgaagaatatcaccttgtagaaaaatttgttggaagtcatcttgtgtttgcccaaattcattctctctttgaacaaatttccaagctatgtgccatcctccattaacacatgcatcatctattccttccatataagatccttggtgaaatagaagtggatggccgaggtcatcttcataatcagtatcaagatcttcttggctctccaaatctgttttaggttgttctatatcatttgacatgtttccagaactagtgaattcaggtgtattcaatatattaccatggatactatcaaaaagtgtgacaataggatcaagcaaattaggtataggactatggtcactttcaacaacattttttcccttgaatggacgtgcaaaccaagtcacaccttcttcatggccatacaatttggttgtttctgtgtttgaaattgattgatcatcaaattcatcattattatgaccaatcatgtaatcttcgatataattatcttggtcaactgtcaagccttgaataagaaaggctatttcacttgagacttcatttgttcctcttagtcttttcataacattttttgcttcttctatctttcctttgctcacaaggaatacaggagactccggtaaatagaagatgcacagtagtaaaaagacaaatgaaggaattgataaggagccaagcatgattctccagttgggatttagtgtaagtgacattaaaaataccataatgtaagatagcaacattccaagagacccattgaattgtggcaatgtatttaataaccctcgcatatttgtaggcgcagtctctgagatataaagtggggcatatgtcaccaccaagcctgaaccaaagccataaataagtctcgccaacagtagcatatattcatttgaagcctgaaacatgatcaatgcactgatagagtatagaattgccgcaacagaaagcaatggcctcttcccaatagaattggtaatcatccctgatagtgcagtgattatagttgcaccaattagtgacattgctaggataagtccctccatcattggatcgttttgtaggttgaattcgttctttatgtacataatagcacctgcaatggctgcattgtcccatccttgtagtagattgccaatagatgccacaatagcagcgagcactgcattagccgtcgagccatccgctgttgttgtcgaaagttccagacttgattcggagaagacggaagaccctaagctgatcggcgaggatggagagtattgttgccgcgtgttcttccaggcacccaagtccgctgctgcataccccat

SEQ ID NO: 70910 - DNA, 690 bp, Oryza sativa
  Clone ID: PAT_MRT4530_71435C.1
atgatgagctcgttggcggcagatgcgcaggaggacgggaccgaggcccggtcgacctcgtcgagcccctcgtcgcagaggatgcggacgagccagaatgttgtccccgcagcctccccaagattacatgtcctctcgcgccactatggcctcatcgagctcccgctcgcgccgtggccccccgcctcacctactagatcgggtgggtggcccccgtttacgctcaaggagatggaaatgacgccagatcctgccatcgacgccttcaacgtgcgccaatgtgtcatctcctctctcccgagcagcggcagcagcgtcaccaagctcgacgatgctacaatggatgtggatcttgagttcaaggtcacgagagcagctgagagctactccaaatatggttgctgccgtctgggccgcttgataaagaggataagtcgttgctgccttactcctcacctgcctgacgctgcccctctccagttagctgctagcatagagatcatgaggaagaaagaggagaggtggaaagatggagaagagaggaggtgggtctcacttcatttttctgacttgaagtgccacaaagatgttatgcgagatgaagatctagccaatatgccgagtggacgtcacttaagccataaccgggctcaatactaccttagagactgtatttgcaccggtttttga

SEQ ID NO: 70911 - DNA, 687 bp, Oryza sativa
  Clone ID: PAT_MRT4530_71436C.1
cacaagtttttttttttgaaaggtttttttttttttttttttttaatctggacttcaaaagcaccgcccaggtatttcatttataccaattcagctcaagatttttgtgtagtacaaaagggggaaagttcgacacccacaaaaataaatcaataatgatacaagtgaacaaaaaaaaagtttttttcaaagctatacttgatgggtaacttacagtaaccatggtaaagtaacactaacaagatgaacaacgagacagaaaaaccttgcatggttgagcttttcaaagacttccatggcaacgtcccaatgccaactatatgttgtatatcgagcatcaaacatgtatcttgggagttgaaatttagcatcaaaatctttgagcagccatatcagagataactcatataagtctcagttcgtattcaccagccattgtaatgtatctaacccaaggaagcgcctggtacccactcttttcaatgatcttcagatagcgaacctgaatacccgacacagtgaaatatggtatctcaaatttcactcgtattggtgccttcttttcaggagctgcttcttctgcagttatacttggaagactaaattcagctctgcacatgtaatccttgccccaggaaatgattttactttccagaccattgcatctctctcaggtgcatatgcagc

SEQ ID NO: 70912 - DNA, 2961 bp, Oryza sativa
  Clone ID: PAT_MRT4530_71437C.1
atggctcctgctgctaagagaaatttgggtaaagcacctattgtagatgattctgatgaatctgattgtgatggagagctttctcgtcgtgaacttgatgatattatatatgaaatttttagaaaggaggttgttaaagatgttaagaaagaaatattgaatcgaaaatcttgttctcatgcttttcgttatgcgaaggtgaactacacatttgattttaatttttatattgcttgttgttatgataataagctaaaggaggctgcaaagattgattcatcatttacaaggttttccaccaagtatttctgtcgagttatatctgcactttctccacatcagaaaactattattcagggtgctggttttcagaatttgcttgagttcaacagcaattatgttccaaataaatttgctacttggattgcaaaacatgtggattttaagacctcacaaataattttaagagacaaagtaatttcagttacaaagcagactgtttgtgacatttttggtttaccttctggtggcttggagtttggaaaggattttgaagctggaaaggaatacattctttcgatgtatgggcttagttgtttgccttcagtgaggttctttggagaccagttcattaaaaaggaacctttgacaaatgagaaagtgattacttcatttcttattgttgctttggcttgttttctttgcccgaattcttctatattgccaagcaccaagtacctcaccatttttcaagatgttaataatctgaggaattatgattggtccaaattcatatatgattggtcaatgaactacatgaagaagtttgtgaagactaacagcttgggaggatgtttgtacatgtgggctgtggtgtaccttgacaatgttgaatttggtgataacaatgtttcaaatgaaattccacgtatttgtgtttggaaaagtgacatgatccatgcttattctgagtttgataaaattgatgatgacacttttggtcttaggcctctaagggattttaaatctacttgctatttccagcctcaaccttgtgatgaaagaaggatttcttttcagcagaaacttgactgtgctcttcagaatatgttgccagtttacatgaaagagaaaatatgttctatgtttgatagtcattgcacttcacttcatactattgatgattcatcttgtggagatcttttgatttctgttcttgctatgattggtgaagctagctgtaatgaatcagatcaaaatgttgtaattgaggaaaatgtaattgagaatgttggcacttctaaagctgatgatgacattggtatttcttctgctggtattagtgctctttattttgttaatgcgttcgttttatatgcagaagttcatgtgcctaatgataatgtgttacctcattctcctattcataatgcttttcatggaaatgaagatgcttttgtttctaaatctgctgttgaacttaatgattcaagacaatgtgatgatgatctgaattttgttacccctcaagttggtaatgctaatcattccaaacagtctgttgatgatcttttggatggttctggaattgctgctgcagctgctgctattcatcgtgttgcaaaaaaatttagatcaagatttaatgattatgggaatgtggaaaatatctttaatcagtcaaggcccttatttagtttgctagattctgaagatgatgttagtgattatgaacatgttttctcagttcagaatgaagatgaaggctctgaaaatgtttccccttcttcaacccaaccttttatttcttttcaatcactccctgaaactccagacaatgatacttgcaacactgtcattaatgaaaaccctggaactagtgcagcacataattctcagaattcgaacaagaggctttttaaagatgttacaaattctcctgatgttgtttgtttgggtgaaaataaaatttgtgattcatcaaaaagaatgtgtgttaaagctgaacagttatataattcaacaaatcaactgaacaagtacattcgtggaatgagttcttctggcggaaagcttcctatacatggtccaagaagggttttagttcctgctaggcatgcttctgatccttttgtcttttctccaaggcgtcgttttacagtttctgatcaagagaatagatattatattgcaatttgtcgtctttcagatagttcaaagtggcagagttactatgcagttgatattgacaatgtcaaagcaaagttctacagttttggtcattccctcaagaagaattgtattgtgtcaccttatgtcatttcagtcttctgccgtgttttgtttcaagatagtcatccatcaaagtctaaaagaaactacttttttctatcaattggtgctgaattgattaatgatataagtgataaaggactggaaaaggttaagaagtcattcgaaggagctaccaatgctagaaaattgcatctttgtgacatgttatattttcctattctacatcttcagcattggtttctattcattgtggatttaaaggatagaatgcttgtcatactagattgtgtatatcatgaaggagatgatttctatgaacctattatgactcaattgataaataatctccagactttttgggacaaatttgaatgctctccaatgaattttagcaatttcaaattgaagtttccatctgttctagcccatatttctagtgcggattctgggatttttgttatgaaaagcatggaattgtggtctccaagagttattctgcaaaatgaattctcaaatgacaatatcagtaacattcgagttcagtatgcaaatagaattttcttccatcctagcaacaagcttttaagtactgaagttgaagatgtagttctcaattggtttgaccctgctaagtttccacgtgttgatactcctggtgctgcttga

SEQ ID NO: 70913 - DNA, 473 bp, Oryza sativa
  unsure (1)..(473): unsure at all n locations
  Clone ID: PAT_MRT4530_71438C.1
ttcgtcatcaccagctcagctgtggccggccgcgcgcgatccaagttgctagctagctaagcttttgtaactgagagtgagctagctaggtagctgggtattgggtattatattgcgagagatagagagagatgagctgcaacgggtgccgcgtgctgcggaaggggtgcagcgacgcgtgcgtgctgcggccgagcatcgagtggatcgacggcgcgcagccgcaggccaacgccaccgtcttcgtcgccaagttcttcggccgcgccggcctcgtcgcctccctcgccgccgtccctctccaccatcgtccagcgctgttccggtcgcttctgtacgaggcgtgcgggcggacgataaacccggtgagcggcgccatcgggctcatgtggacgggcaactgggacctctgccaggccgtcgncgacgccgtccttcgcggcgactccctccgcgccctctcggccgtgcca

SEQ ID NO: 70914 - DNA, 2310 bp, Oryza sativa
  unsure (1)..(2310): unsure at all n locations
  Clone ID: PAT_MRT4530_71439C.1
atggctcctgctgctaagagaaatttgggtaaagcacctattgtagatgattctgatgaatctgattgtgatggagagctttctcgtcgtgaacttgatgatattatatatgaaatttttagaaaggaggttgttaaagatgttaagaaagaaatattgaatcgaaaatcttgttctcatgcttttcgttatgcgaaggtgaactacacatttgattttaatttttatattgcttgttgttatgataataagctaaaggaggctgcaaagattgattcatcatttacaaggttttccaccaagtatttctgtcgagttatatctgcactttctccacatcagaaaactattattcagggtgctggttttcagaatttgcttgagttcaacagcaattatgttccaaataaatttgctacttggattgcaaaacatgtggattttaagacctcacaaataattttaagagacaaagtaatttcagttacaaagcagactgtttgtgacatttttggtttaccttctggtggcttggagtttggaaaggattttgaagctggaaaggaatacattctttcgatgtatgggcttagttgtttgccttcagtgaggttctttggagaccagttcattaaaaaggaacctttgacaaatgagaaagtgattacttcatttcttattgttgctttggcttgttttctttgcccgaattcttctatattgccaagcaccaagtacctcaccatttttcaagatgttaataatctgaggaattatgattggtccaaattcatatatgattggtcaatgaactacatgaagaagtttgtgaagactaacagcttgggaggatgtttgtacatgtgggctgtggtgtaccttgacaatgttgaatttggtgataacaatgtttcaaatgaaattccacgtatttgtgtttggaaaagtgacatgatccatgcttattctgagtttgataaaattgatgatgacacttttggtcttaggcctctaagggattttaaatctacttgctatttccagagtcgacctgcaggcatgcaagcaaaatgttgtattgagnaaaatgtaattaagaatgttggcacttctaaagctgatgatgacattggtatttcttctgctggtattagtgctctttattttgttaatgcgttcgttttatatgcagaagttcatgtgcctaatgataatgtgttacctcattctcctattcataatgcttttcatggaaatgaagatgcttttgtttctaaatctgctgttgaacttaatgattcaagacaatgtgatgatgatctgaattttgttacccctcaagttggtaatgctaatcattccaaacagtctgttgatgatcttttggatggttctggaattgctgctgcagctgctgctattcatcgtgttgcaaaaaaatttagatcaagatttaatgattatgggaatgtggaaaatatctttaatcagtcaaggcccttatttagtttgctagattctgaagatgatgttagtgattatgaacatgttttctcagttcagaatgaagatgaaggctctgaaaatgtttccccttcttcaacccaaccttttatttcttttcaatcactccctgaaactccagacaatgatacttgcaacactgtcattaatgaaaaccctggaactagtgcagcacataattctcagaattcgaacaagaggctttttaaagatgttacaaattctcctgatgttgtttgtttgggtgaaaataaaatttgtgattcatcaaaaagaatgtgtgttaaagctgaacagttatataattcaacaaatcaactgaacaagtacattcgtggaatgagttcttctggcggaaagcttcctatacatggtccaagaagggttttagttcctgctaggcatgcttctgatccttttgtcttttctccaaggcgtcgttttacagtttctgatcaagagaatagatattatattgcaatttgtcgtctttcagatagttcaaagtggcagagttactatgcagttgatattgacaatgtcaaagcaaagttctacagttttggtcattccctcaagaagaattgtattgtgtcaccttatgtcatttcagtcttctgccgtgttttgtttcaagatagtcatccatcaaagtctaaaagaaactacttttttctatcaattggtgctgaattgattaatgatataagtgataaaggactggaaaaggttaagaagtcattcgaaggagctaccaatgctagaaaattgcatctttgtgacatg

SEQ ID NO: 70915 - DNA, 287 bp, Oryza sativa
  Clone ID: PAT_MRT4530_7143C.1
cctacctagaaccttagtgtacaatgcttgaaattatggtaatttatttgagctgatggataactgctaatatgaggaatgactgctgacttgatgggtggacaccaatgagttacaatggatggatatggtgccagaatccgcaatgttgtggacccaatgagttatggaatgaggttggaatgattggtgttaatgcaatggtggtggtgaacttgactggaaagggtggatgaatgcccgtggttgcacaaatttggagtgatattcatccatatatatgctgc

SEQ ID NO: 70916 - DNA, 925 bp, Oryza sativa
  Clone ID: PAT_MRT4530_71440C.1
cccacgcgtccgcccacgcgtccgcccacgcgtccgcacctctgctctgcccattcgacggcaacgcgctgccgcgccatcgcgccacgtcgcctcgtcttgcctcgcctcgtccaaggtcaacgagagcatgggaggaggccgggaggaggaggcggcggcggcggcgagcaaggtggggtactcctccggcgacctcccgccgtcggcgccgccgcacctgcagggccaggacccgcagcagtaccagtacggcaccttccagccgccgccccatcaccatgccgcctcgggcgagctcgcccgcccccccgtcgggttcccccagcccgccccgcctccaggcttcgccggcgccagcggcggcggcggccactaccaccaccaccatcagcagcagccctacgcgccggcggagccctactacgcgcagggctaccagaccgggccaggttatggtcctattgctgagggaaggccagtaagaatgcgccgccttccttgttgtggtcttgggttaggctggcttctgtttattgctggatttttccttgctgccatcccatggtatgttggggctttcatactaatatgtgtccgagtacatgactacagagagaaaccaggatatgttgcctgcactgttgctgctgtaattgccgcaattgtcatccccttggggttaaccaaaggagcacacgtatggtgagctgcctccgagtttctaaggagtcactgcatgtaaatggcctgttattatttgagaccctgcactgggtcatatgatcatatcacttgtatatgtgtatggatggtaatatagtgagcaacttcagtgtggtaatcttatatcgaaccattggaccctcggtgttcatatactttgtaataaaggatcaatcatacaagaaccttaataaggagt

SEQ ID NO: 70917 - DNA, 528 bp, Oryza sativa
  unsure (1)..(528): unsure at all n locations
  Clone ID: PAT_MRT4530_71441C.1
gtgaaacttgaggtacgcacaaacacaatggtggtccaaaatgtggtggctaatgctgtttgggtntcaaatttaagcgtcttgttgttggtatccctgaggaggtcttggtgtgttatgttacttggaagctagtggatatgggaaatacttctgggacctggaaggttcgtgtatagaaacacacaatatgtgccctatccnccacacacaaattgatgacgcactcaaatgttgacgcaaaacaaaatggggtccaaaattatggctgaatacgtcaagatgcagacgcctgctacgctggtgtggccctgcttgggtggcgattaacttggaagctagtggatggccaaaaactggttggactggaagctggatggcaaccccttgctgttggctggcttggtttattgagtcataagaaatttgatagttgagaggattcttcaagaaanttctttgggtttcctgggagngctttagttacacggctaaatgaagagncggatttcttaaaaaaaaaaaaaa

SEQ ID NO: 70918 - DNA, 561 bp, Oryza sativa
  unsure (1)..(561): unsure at all n locations
  Clone ID: PAT_MRT4530_71442C.1
tttgtgttttttttttttttttttttttttttttttttttttttttttttttttttttttttttttcttgtttctttccttgtattcgtcaaacctttccctatagcgtgccggctttcagttttgcgtattcttttttatattggggtggtgtgtgaaattggtgtttgctgtgagttatttttaaccgctcaccctttcgcataacatacaaaccctgaggttaataattaaagacttaactcccttttgtttgatttaactcacttttctttttttttgcttaatgcccgctttccaatttgcaataatgaatcgcccaatgccttaataaataaggcattgctcatagagaggcgggttgcttttttttctaccagggagattgtctttttattattgacattgacaacctgttattgccatttaccctttaaccctttcacacttgttagctgcagcacgcgataattttgtccaatgggggataaccctaatttatgacatgtgctggcttacgtttacataaaccctattacggatttatncttaccaattccc

SEQ ID NO: 70919 - DNA, 616 bp, Oryza sativa
  Clone ID: PAT_MRT4530_71443C.1
ggcacatatagtgggtaatttaccagtgggacagatcaaagttgaacaaagaagttgtgagttagctattgatgatagcaagattcctgggacatcactacatcgtgcaacatgtagcacaggaccctgtgttgcaatctcaaaaccaattgaggaagcaaaaacgatataccgcattctgtgccaatgtgaccaccccaacgtgctgaaacccataggtgtctggaagaatccctcggacgacgctagtgcatacctggtactagaggaagttgaggcatctcttggctctaaagacagagaattcatgttctctgtcgaggactctttcatatatggtttttcaaatattggttttaaaattttcagggcgctatgtaatgtggtgaattacattaacggactttacatgaatagtgctgctgggaccagtagtagtgttgctggagcaattccgttgacgcccattaaacttaactccagcatgatattttataagcttatggtagaaggggaggtggaggttgtggtgactgatttctgtgtaagacaaccccgagaccttgtaaagaaaaccaggaagggtcgcccaaaaggtccatactgtttcaaatag

SEQ ID NO: 70920 - DNA, 824 bp, Oryza sativa
  Clone ID: PAT_MRT4530_71444C.1
ccggattcccgggtcgaattcccgtccggacccgtcgtccgacaagagctaattaaattgtctctgtgcatgcacttgtgtttgctgcactacgacacatgcacaagcttgtgtaaggacaacatggcttgttgttcttctctcctccggctgatgattctgccggttgcttttgctgtcttggtcatcgcttcggttgctcatggcgctgttgtggagcacactttcaatgtgggcaacctatccataagccggctgtgccaaccggagatgatcatcacggcggtgaacgggcagctccccggcccgaccatcaacgtcaccgagggcgacacggtggtggttcacctcgtcaatgagtcaccctacaatatgaccattcactggcacggcgtgttccagcgcgggtcgcagtgggccgacggcccatcgatgatcacgcagtgtcccgtgggccccagcgacaactacacctaccgcttcaacgtcagcgaccaggagggcaccctatggtggcacgcccacatctccttcctccgcgccaccgtctacggcgccatcgtcctcaacccccgcgccgccgccccgttccccgccaagcccgacaccgagcacgtcgtcctcctcggcgagtggtggaacgccaacgtcgtcgacctcgagcgcatggcgttcctcaccggcatccccgcacggaacgccgacgcctacaccatcaatggcaagccgggcgacctgtacaactgcaccgccgcgaaccagacggaggtgttccgggtgcggcgcaacgagacgcacctgctacggatcatcaacgccgcgct

SEQ ID NO: 70921 - DNA, 311 bp, Oryza sativa
  Clone ID: PAT_MRT4530_71445C.1
atggccggcggcgccatgccgctggtcgtgctgctccttgccaccatcccgctcctgttcttcaccatcaagcgctcggcgcagcgtcgtggcggcggcggcggcggcgaggggaggctcccgccggggccgtgggcgctgcctgtcatcggccacctgcaccacctcgccggcgacctcccgcaccgcgccctgagcgccctggcgcggcgccacggcgcgctcatgctgctccgcctcggcgaggtccaggccgtggtcgcctcctccccggacgccgcccgcgatatcatgaggacccacgacgccgc

SEQ ID NO: 70922 - DNA, 242 bp, Oryza sativa
  Clone ID: PAT_MRT4530_71446C.1
gttcgatggactgcgggcgctgatctagctgcagcgtttatttactgcttggttggttgagtcctgcgcgctgccaagaagaagaggatgtcctgctgcggcggcaactgcggctgcggcggttgctgtcagtgcggctggccttgtggcggctgcacgaagttctcagttgttgctccctcttctgtctctcccactccttattttttttcctcctctccctacctctttttccttttcct

SEQ ID NO: 70923 - DNA, 1119 bp, Oryza sativa
  Clone ID: PAT_MRT4530_71447C.1
tcaacatgccctggccttaaagccaaagttcatggcttggatgtcaaaaacaagcttaaatgatctgacagctctattccctagcatttggacccctcggacacctgcatcatccggcagaaaagtggagcaaattacattgtttgagctttcatagaatgcattttccactggcagcttcaaggtagacctgataagtttcatctccactgttggaaagtcattccagtttgctgagccactgtttgaaatgaagcaaatcctcctttcatcccatcctctggtatatcccttggcttgcatttccttcgtcatcgctttgtccagtgcatcaaacaccggggataaaatgtatgtatcagcagtgccagaatcaacaattgtcatcttggatatatagatatatggatcaatttcaagcctgattccattgaccatcatatcaagctgctgaatagcatatgctggtttatgatcgtagtagatcaattttgtccacataagattgatatctctggcatatggcccaatggtcagtgacccttcattctcatgatctctggggaagcagtaagaaaacgcggtataatctgtctgctgacatacctggttgaagaatgagtaacttttagtcccaaaaccaattatcccagcattgactccattgtaaagattatcttctccacagccaaagatgaaattatcaatgcttctgttgctggcaagagtgagcctgtctttccctaagtacccaactgaatactctcctgacccatatcttaagctgtagatacaagtatcatcctcttctacacacccatactcaacagcaagatccatgtgcatgccattgcaagcctcagttgagcacccaactttactgtaagttgaagaattgtaagggttgaatatttgtccagcttttgcagcttggtcatagcattttatctgacaatttttacactgaacccaggagagagttgagccggtgtcaatggtcacaagattgaagacaggtggtgtgccaaggctgatgcccatgaaatacttgttcttgcgcatgctatcatcgcctatgacggtggaggagtctgcaggtatgtttgctggctggatcat

SEQ ID NO: 70924 - DNA, 161 bp, Oryza sativa
  unsure (1)..(161): unsure at all n locations
  Clone ID: PAT_MRT4530_71448C.1
ctccgatcagttccaacttccaagctccgatgccaacgagaaaaccaatanctgacancctctgcctcnngcaacgcggcgcgcggccgtnngctgcgatcgatcnngaccggccggagtnccggcatgggcaaatgggagctttgcctggcnngcgggcg

SEQ ID NO: 70925 - DNA, 2008 bp, Oryza sativa
  Clone ID: PAT_MRT4530_71449C.1
ggctactacctccgccgcgccggcggcgccactcgtccccggaggcatggccgcggcgatcatcggcggcggcggatgcatacgcacaaggcaagaaaaaaagaagaaacaaagagagaagaattccaaggaccaagaaatcgaggcaatggctaagcagctgacgcgcgtgcgcaccgttggccggggcgcttccggcgccgtggtgtcgctggcagccgacgacgtctccggggagctcttggccatcaagtcggccggcgacgggggcgccgcggcgcagctccggcgagaggggagcgtcctgtccgggctctgctcgccgcacgtggtcaagtgccttggatttgtcgacgccgccggcggctgcggcggcggcgagcaccagctgttcctggagtacgcgcccggcggatcgctcgccgacgtggtggcgagaaacgggggtcgcctcgacgagggcgccgtcaggacgtacgcggccgacgtgcttagagggctcgactacctccacgggaagctcgtcgtgcacggcgacgtcaaggggagtaatgtgctcgtcggcgccgatggccgcgccaagctcaccgacttcgggtgcgcgagggtggcaatgcccggtggttcgaagcagccggtgctcggcggcacgccggcgttcatggcgcccgaggtggcgcgtggcgaggagcaagggctggccgccgacgtctgggcgctgggctgcaccgtcatcgagatggccaccggccgcgccccgtggagcgacatggacaacgtcctccccgcgctccacaagatcgggtacacggacgccgtgccggacctgccacggtggctgtcaccggaggcgaaggacttcttgcgcggatgcctgcaacggcgcgccggcgaccgtcccacggcggcgcagctgctacaacacccattcgttgcctccgccgcggccctcgaaggctggcgggaaccggcgaagcaaacacgtgcatcccccaagagcacgctgcatgacgcgttctgggactcagacaccgacgacgaggacgacgagatgccaaccggcgcggcggagaggatcggtgcattggcgtgcgccgcctcggccttgccggactgggactccgacgaaggatggatcgaggtgcacgacgaggtctccttcgccgccgtcacgccgccggccagcgacgcggactacttcgtctgggcagaactgtctgacccagagatggagcagttcgccgtcgccgcggatggcgtcaaccatgtcccgcgcaatgaagcagaagcgatcgaatcctccattaggcagggcagttacctgcacgtacatcttggcagtggtaaaaatgaaatttttcacccgttcgatactgacgggactgaatcagtgagattcgattgtgtttgtaacaggaacagagtaataaaattaaattccgctcaaaaaaaaaaaaaaaaaaaaaaaaacgtctccattaatgtagcaaacaaaacagcagcaatagagcagagggtgacatcaatggcgtgctcgccgtcgtcggtgccggactgggactccggcaaccaaggctggatcgatgtcctcagcagcgtctccattagcatagcaaataaattagaaacagcaacagcagcagataacgtatcttcagagtgtccagccaagtgggtgagagcaatggcgtgctcgccgtcatcggtgccggactgggactccgatcaaggatggatcgatgttctcggtgcatcacccgatgtcgtagcggcggaagaattcgatgtagcggcagccgccgatcagatttccggccaagctgtgggtagcattgttgtaggggtaggtagcagtgagcaatctgtagttgttgagaaccaggaggatgagttcacctccttgagttcttgcagcgagcgagttttgcttgtaggtgttcatgctgctgataataatgcggcctctcggaaggccggaataaaaagatgttccaatttttcgtgctag

SEQ ID NO: 70926 - DNA, 313 bp, Oryza sativa
  unsure (1)..(313): unsure at all n locations
  Clone ID: PAT_MRT4530_7144C.1
atattattatttttgagcttattttcaaccttctaaccctttactgataaaacatattacaagacaccgtctagggtggctaccggacagagagcaccataccacctaaagtacacaccatatctaaacccacgccaaaagacaacacgactggacccccaccatattccaatcaaagcagagatcaccaaactgctgcagggggagctgcaaccctatggcctgaacaacganaaggacccgcacaaaaaaaagatccccccccaacacgagctgcttcctgacttgtttgtttctcaggagaaacacaccc

SEQ ID NO: 70927 - DNA, 1578 bp, Oryza sativa
  Clone ID: PAT_MRT4530_71450C.1
atggccgcggcgatcatcggcgtcggcggcggcggatggacgcgcctccgcagcatcgggcacggcgcgtccggcgccacagtgtctctcgcggcggacgacgcctccggcgagctcttcgtcgtgaagtcggccggtgatgcggtcgccgccacggcgaggcagcagctccggcgagagtggagcgtcatgtccgggctctcctcgccgcacgtgctcaggtgccttggctttgtccaggccgccgccggcgccggcggcgagcaccagctgctcctcgagtacgcgcccggcggatcgctcgccgacgtggtggcgagaaacggggatcgcctcgacgagagcgccttcagggcgtacgcggcggacgtgctcagggggcttgattacctccacgagaagctcgtcgtgcacggcgacgtcaaggggagtaatgtgctcgtcggcgccgatggccgcgccaagctcgccgacttcgggtgcgcgagggtggtgatgcccggtggttcgaagcagccggtgctcggcggcacgccggcgttcatggcgcccgaggtggcgcgcggcgaggagcaaggcccggctgccgacgtgtgggcgctgggctgcaccgtcatcgagatggccaccggccgcgccccgtggagcgacatggacgacgtgctcgccgctctccggatgatcgggtacacggacgccgtgccggacctgccgccatggctgtcaccggaggcgaaggacttcttgcgccggtgcatgcaacggcgcgccggcgaccggcccacggcggcgcagctgctacagcacccgttcgtctcaaagtcatgcggtctcaagaaagaagtcgtgaaggcgacatgggtgtctccgacgagcgcgctcgacgcagcggcggcgttgtgggagtccgagacgtcgtcatcgacagacgatgaggaagctgacgacatgtcgaacagccccaccggccggatcatagcaatggcatcctccggcggccagacattgccggactgggactccgacgaccatggctggatcgaagtactcggcaccgtctccattaacatagcaaaaaaaaaaacagcagcagcagaagattacgaagcttcagagtctccggccaagagggtgagagcaatggcgtgctcgccgtcgtcggtgccggactgggactccgacaaccatggttggatcgatgtcctcagcgcgtcaccggccgacgacaatggcggtgaagggaatgcgcctgaagaattcgatgtagtggcagccgccgatcagattttcggcgaagctgtgggtagcattgttgtaggagtaggtagtgaacaatctgtagttgttgagaaccaggaggatgagttcatctccttgagttattgcagcgagagaattttgcttgtagctgttcatgctgctgataataatgcggcctctcgaaaggccggaataaaagaatgttctcatgatcctcgtccctcgatccccagtcgatgtgctcataacctttttctctccctaatcttcatacagatcgataattcgaatgtagtccccttcgctccgaaatattga

SEQ ID NO: 70928 - DNA, 1414 bp, Oryza sativa
  Clone ID: PAT_MRT4530_71451C.1
tcagcatgtggttgccaattgaacaccaatatctagatcacttccaaaggttcgatcaatccagctcgaatgtggcaatcttgagctcagattccactggtgtttttgcaatgctgtgagccggtgggcatcaagccctgattcagtcccgtcagtatcgaacgggtgaaaaatttcatttttaccactgccaagatgtacgtgcaggtaactgccctgcctaatggaggattcgatcgcttctgcttcattgcgcgggacatggttgacgccatccgcggcgacggcgaactgctccatctctgggtcagacagttctgcccagacgaagtagtccgcgtcgctggccggcggcgtgacggcggcgaaggagacctcgtcgtgcacctcgatccatccttcgtcggagtcccagtccggcaaggccgaggcggcgcacgccaatgcaccgatcctctccgccgcgccggttggcatctcgtcgtcctcgtcgtcggtgtctgagtcccagaacgcgtcatgcagcgtgctcttgggggatgcacgttcttgcttcgccggctccggccagcggtcgagggccgcggcggaggcaacgaatgggtgttccaggagctgcgccgccgttgacctgtcggacgcgttcctctcgaagcagccatccaggaagtccttggcctccgctgacagccacccgggaacctccggcacggcgttcgtgtacccgatccggtggactgcggcaaggatgtcgtccatgtcgctccacggcgcgcggccggtggccatctcgatgatggtgcagccgagggcccagacatcggccgccggcccctgctcctccccgcgcgccacctccggcgccatgaacgccggcgtgccgccgatcggccccgccgagtccatgaccctcgcgcacccgaagtccgtgagcctcgcccggccgtcgctcccgatcacgacgttcctcgccttgacgtcgccgtgcaccagcgaattcccgtggaggtacgccagccccctcgccacgtcagcggcgtacgcccggatggccggctccgggaggcagcccccgttcctggcggcctcgtcggcgagcgacccgccgggcgcgaactcgaggaacagctggtactcgccgcccgcggcggcgcgcgatccgaggcaggggacgatgtgcggcgagcagagcccggacaggacacgcccctctcgccgcagctgcgccgcggcgccgccggcggaggccgacttgacggccatgagctcccctgagtcgtcgtcggacgcgagccacaccacggcgccggacgccccgcggcccagcgtgcgcacccgcctgagctgcttagccattgcctcgatttcttggtccttggaattcttctctctttgtttcttctttttttcttgc

SEQ ID NO: 70929 - DNA, 318 bp, Oryza sativa
  Clone ID: PAT_MRT4530_71452C.1
gctatagcttaaacacttgcatcgttttgtaatttagttcttagttaattaatcaattattagttcagcattgtgcaaatagctagcaggcaaaaaggatggtttggacacagacggcaaaaaggactgtttattgctcggtcttgtttgtaaattgtgatcaagatgccagctaatcggtgcaagttgccggagttgattagctatagatatgcatcagatttcattgcattattttccgttagtctatattttttcgcttccatttttcggcgccgcttggagcctggacgtataatcaatttctaatattctctt

SEQ ID NO: 70930 - DNA, 588 bp, Oryza sativa
  unsure (1)..(588): unsure at all n locations
  Clone ID: PAT_MRT4530_71453C.1
atgcggcggtgcgggcaaggcaacaggggcggagggcaagggggggtcggcgaaggatggggccggtgcggaagggagaaggagggggagggacccgagcagacggaggacaggatgggaggacaggcggcgccggtggggcaggcgagagggcacaagagaggggccggagatgaccacagcgccagaacagggggggcaggggaaaagggcgcaccgcggggaccgaacggcgccaggacgggacacaaggacggggggggnggggggggcccggcaggagggccgccagaacagaagggagaggaggggcggatgggaggggcagcaagggcagccaaaagaggcagggaagaagcgcggagggggaggccaccgaacggcaagcggggcggacgggcacgggggccgggaggggggtggccgctcaccagggaccgccgggggagcgtggcagcgggctggtggatggcgtcgcgagatgacacggcggcacggttcgacgccacgacgacaaagaaaacccggggagggtcaccgcccggaactggtcagaacgctactcgggtgcgttacggcggaagatag

SEQ ID NO: 70931 - DNA, 817 bp, Oryza sativa
  unsure (1)..(817): unsure at all n locations
  Clone ID: PAT_MRT4530_71454C.1
acacatccgcgacccggtccgataagtgatcgagttgagacacccgcagcggccccccccggctggcccttgccaggcacgcaccctccccgggttttctttgtcgtcgtggcgtcgaaccgtgccgccgtgtcatctcgcgacgccatccaccagcccgctgccacgctcccccggcggtccctggtgagcggccacccccctcccggcccccgtgcccgtccgccccgcttgccgttcggtggcctccccctccgcgcttcttccctgcctcttttggctgcccttgctgcccctcccatccgcccctcctctcccttctgttctggcggccctcctgccgggccccccccnccccccccgtccttgtgtcccgtcctggcgccgttcggtccccgcggtgcgcccttttcccctgccccccctgttctggcgctgtggtcatctccggcccctctcttgtgcctgccggccccccttctgcctgcccctgcggccttccgccgcgctgctgctggcacccgcgccccacctcaacctgagcttgcccctccctctnaccctctcgcctgccccaccggcgccgcctgtcctcccatcctgtcctccgtctgctcgggtccctccccctccttctcccttccgcaccggccccatccttcgccgacccccccttgccctccgcccctgttgccttgcccgcaccgccgcattccccccacgcccttcccacctttgacagtgtgactcctctaagctgtacaatccggatcatcgatgaatgactttccagcacgctcgcgcccgcaccacgccc

SEQ ID NO: 70932 - DNA, 321 bp, Oryza sativa
  unsure (1)..(321): unsure at all n locations
  Clone ID: PAT_MRT4530_71455C.1
tttcatgtctgatctcggcatgcagacccaactgccttcgntccctttgctgaggccaatgctggngactctggtgcggctgcnggntcnnnggnctnncgttctgtncgcnntccgcngcgtnntggccgttttttttcttttccctgtccgggnttgtntgaggtggggggggggggcgngctcctctttgttctcntgtntgtgttttgctgcgggggtgctgttgtacgtggtcctcgtgcttggctcggtctttcttcttcttggtgtttatcggtccccccgttcctctttttttgttctggcctgctttgttgt

SEQ ID NO: 70933 - DNA, 906 bp, Oryza sativa
  Clone ID: PAT_MRT4530_71456C.1
atggatcccaaagttgttgttgctctcgctctgtcccttattggtggccttagcacctctcttggtgcattgctggctatactaaactgtgccccaaacaacaaaacactcgggatgttacagggttttgctactgggctcatgttaagcatgtctttctttgacttggcttatgatgctgtcaacgcgattggttttctaaaaggaaacctttggttttttgctggggcactcctgttttccactattgctgaggttttccctgaaccagattgcaatttagcagatgagaatgacaaacatttggaaaataagactggtaataacaacatagcagggaaggaacttatgatgagacaccgccgaagagtaatctttagtgtcgttgtcacagcaatagttgctggtgtgagtttgcaaaacttccctgtgggtactgcggcatttcttggaaccacaaagggcttccgtgttggccttaacttgtctcttgctatagctctacactacatcccagagggtatttcagtagctctccctgcgtactttgccacttgcagcaaatggcaagccttcaaactagcgacgctatctggttttgcagagccactaggtgtaattatcgtagcatacctattcccaagcaacttgaatcctgaaatattggaaggcctacttggattagtgggaggggtcatggcgtttctaacgttatatgaaatgctaccaatagcatttgaatacgcaggacgcaaggatgctgtgaaggctgtatttgttggcatggcttttatgtccatgagcaagaaatatttagcagagattggttataacaaaatattgcgttcaaaatttgggttatggcatagggggtgcacattcgctaaggcaggcatgagcgcatga

SEQ ID NO: 70934 - DNA, 892 bp, Oryza sativa
  Clone ID: PAT_MRT4530_71457C.1
cggtgggagaggggagcagaggtggtgggacccgcagtggcgcgccgagcggctccggcagatggccggcgaggtggaaaaggtcgatgagaacgagtggtggaacaagataagacaattaagagaagggtctcagcaggagctagttgttacgcggaattttgggcgtgatggacaaaacatactggcagatatggctcagagacaagggctttacttatagcaatgtgtacaacaaagggaagacaattgttttacagcaaagttccactacctgattatcgagcagaccttgatgagagacatggatcaacacaacaagagattaggatgtctaatgagactgagagacgagtggagagccttttggccaaggcaaagtcaaatagtaatgattctgcaagcacatctactctaacaacgaggcaatctcggccaagcacatcttcgtcagtaactgaatcaacaaaagatattgataaagaaaggctcagttctgagcttagggatatacagaactcaaggaagatgatgccaagtgctaggtcgatgcaatcttttagggataaactaccagcattcaaaatgagagaggagtttttaaaagcagtagcagccaatcaggttctagtaatttctggtgagacaggctgtggtaaaacaacacagcttccacagttcatactagaagaggagatagataaccttcgtggtgctgattgtagcataatatgtactcagcctcgccgtatatctgccatatcggttgcagctcgtgtagcatctgagaggggtgaagagcttggcgataccgttggataccagattcgccttgaatcgaaacgatctgcacaaaccagactgctattctgcaccacaggagttctactta

SEQ ID NO: 70935 - DNA, 6597 bp, Oryza sativa
  Clone ID: PAT_MRT4530_71458C.1
ggagctgaactcgaaggtgttcttctctcccctctccccctccgcgtgacagttctttgtgcccgcggtttctggaggagatccgtccggattcggattgattcctctgccttcagttaaacacatccgggttcttttgaatgcgttgtgcagtactaaaaacgcagtttcgttttttttttgttcataataaaaaggtagtaaaatttttgggcccagattaaccccccttcatgccctgcgttaggtcgggcgaactgctgcgaattttgctgtgctcgagtttggtgaaattgtgttcttccatcgaaaaaaaaacaaagaagttttcttcttttttttttgggcataccgcaaattctcgtgttgtggagtatccgtgatattttggtacaagttgtgcttgacttagttctgtgctgaattatgacgcgaatcttgtggttggttgtcacattgtactagttggtgataatcttgaatgtgctatcaaatgttaggtgattgtgtggcgagatgggaagagcaggttacatgatagagaaggatggagggtaggaagattgagagggggagattgaggggcttcgtccggcggatggcaatggagtgcctgtgctccggggagcagctgagggcggcagatgagatcatccggtcaccggaatctgcaatcaccaaagattgctcggccagcgggtactcgtcccagaacggagagatcgagcagtaccttgataatggcaacattgaggaggccgagttgtcgctccgggagggtgtttgccttaactatgaggaagcaagggcattactaggaaggctagagtaccagcgtgggcatgtagaagcagcacttcgtgtatttgatgggattgatatacctgctttagtccctaagatgaaaatctcaattgctagaaaagtggatcgtcggaagactcgttcacaatgggattctccaccaatgcccttgcatgctgtcagcctactcatggaggccatataccttaaatcaagagctcttcatgatcttggaaagttcaaagaagctgcacaagaatgcagaatgatattggatatcgtggaagcagcagtgcctgagggtttaccagcaggctttggaaaagattgtaaattaaacgaaataatatgcaaggctgtagagttgctccctgaactatggaaactagggggattttcacttgaagccatatcttcatataggaggtctcttctcaataattggaaccttgatggagagaccatagctcgcatacaaaaagaatttgccatttttctcctatatagtggctgtgaagcacgacctccaaatcttcattcacagttggatggttcatttgtacctcgcaataatatggaagaggctattcttcttctaatgattctattaaggaagttcaatctcaagagggttgagcgggatcctactataatgcatcaccttacatttgctctgtccatctcagggcagctaaagtcactagctgtacaatttgaagaattgttacctggcatgctggataaaagagagtggtcatacaatgttgcgttgtgttaccttgcagaagaagatgattcgacagccctgaatcttctcaaaaggatattaaaatctggagatgattctgacaatttcaaagaactcctcttagcttcaaaggcttgcactgaaaggagtgcccaaactgaaggtgcttcctacgcacagagagcaatagccaatatgcagggaggatgtgaacaaatggcgggtgttgcagacctgctgcttggagttaacctttctaatcaagctagatgtgccacatctgatacagagagagcttcttggcagtgtgaagctctggaggtgcttgaaaatgctgaaaataagatgcatgggaaagatcctcgtgcaatgtacagtctcagccttgaaaatgctgaccagagaaaattagatgctgctgccttttatgccaagaaattggtgaaattagaggctggatcggaattgaggagttggcttcttttagctcgaatactatctgctcagaaacagtttgctgatgctgaaaccattattgatgctgctctcgatcagactgggaaatggagtcaaggagatttattgcgaaccaaagccagaattcaggctgcacagggccaactcaggaacgctgttgagacatacaccaaacttctcgctgtcattcaactcagaaccaaaagtctcagtgctgggatctttttggcaaagggcactaaggatgatataagcctggaaatagagacctggtatgatctagctctgttgtacctacgcatgtcacaatggagggatgcagaggtctgtgtatccaagataaggaccatcagtccatattctgccttggcttggcatgttaaaggaaaactctatgaagcaaaaggtcaaccaaaagaagccttgggatcctatttcagagcattagaccttgaccgtaaacatgttccaagtttgatatcaactgcctctgttcttcgagaaattggcaacaggccattgccttcggtccggtgctttctgaccgatgcgttgcaactggatcgaacaaatcatgcggcttggtttaatcttgggctactctacaaagaggaaggtggtcggtcagcagcagaagctgcagaatgtttccaggcggctgctcttcttgaagaaacagcacctgtagaacctttcagcttttcgactgaggaagatatccaatcggaagcaaagggacacaatgtagacttgtttcaaagaaaaattctatcccatgttccgttcggcccactggaaatatccgcccacggtccaaacccatcggcccagccaaaacgtctccactcttcctttccggtattcccactgggatccgcatccggttggatatatttcctcctcctcctcccccaccagatgctcgtccactcctccgctcgccgcctcctcgtctcccgcggcggcggcagcggcagcggcagcttcttccccttcgcggcggcggccaacgcttgctcacgcagagccctcgctcctgtatccgctagcgccatgtcctaccgcggcggaggcggcgggcgtcgcggcggcggtgggggcccgaactcccagcgcgggcgcgggcgtggaggtggtggagcggggaggggagggggaggaggagggcgtggcggcggtgggagaggggagcagaggtggtgggacccgcagtggcgcgccgagcggctccggcagatggccggcgaggtgaggggtggtgccctacgcttgtgtgtgttcgtcgtggcgatgggggatgagggtgctgcgcatggatccattgttttgcgtagagtatccgcggtagttgatgtggaaaaggtcgatgagaacgagtggtggaacaagataagacaattaagagaagggtctcagcaggagctagttgttaagcggaattttgggcgtgatggacaaaacatactggcagatatggctcagagacaagggctttacttatcatttgatgcctttttccgtatctctaacttacacttggaggctgacaaattccattttcattatcctgtttttaacctgggggaagatagcaatgtgtacaacaaagggaagacaattgttttcagcaaagttccactacctgattatcgagcagaccttgatgagagacatggatcaacacaacaagagattaggatgtctaatgagactgagagacgagtggagagccttttggccaaggcaaagtcaaatagtaatgattctgcaagcacatctactctaacaacgaggcaatctcggccaagcacatcttcgtcagtaactgaatcaacaaaagatattgataaagaaaggctcagttctgagcttagggatatacagaactcaaggaagatgatgccaagtgctaggtcgatgcaatcttttagggataaactaccagcattcaaaatgagagaggagtttttaaaagcagtagcagccaatcaggttctagtaatttctggtgagacaggctgtggtaaaacaacacagcttccacagttcatactagaagaggagatagataaccttcgtggtgctgattgtagcataatatgtactcagcctcgccgtatatctgccatatcggttgcagctcgtatagcatctgagaggggtgaagagcttggcgataccgttggataccagattcgccttgaatcgaaacgatctgcacaaaccagactgctattctgcaccacaggagttctacttagaagattggttcaggagccagacttagttggtgtaagccatttactagttgatgaaattcatgaacgtggcatgaatgaagattttctcatcataattcttcgcgaccttctgccaaggcgtccagacctccgccttgtattgatgagtgcaaccataaatgcagaacttttttccaaatattttggagaggcaccaattatgcatatcccgggcttcacatttcctgttaccgagttgtttttggaagatattttagagaagacccggtacaagatcaattctgaacgtgacaattttcaagggaactcaagaagaaagaggcttgcatcagttaagagtgatccaatatctgatgcttttgagctactcgatccctccagttcaaaatgtaaggcatataaattttaccttcatagtacagagccacataaggatgttgacatttataaggaatatggaaattacagcgttgcaactaggcaatcccttgaagcttggtcggctaccgaactaaatttgagccttgttgaaggtacaattgagtacatctgtcgtcatgaaggagaaggtgcaatccttgtgttccttactggttgggatgaaatttcgaaacttttggataagattaaggggaataatctccttggaaattccaatagattcctggttattccactccatggttctatgcccactgtcaatcagcgtgaaatttttgatagaccaccagccaatatgaggaaaattgttttggcaacaaatattgcagaaagcagtattacaatagatgatgttgtctatgtaattgattgtggcaaagcaaaggaaacaagttatgatgccttaaataagcttgcatgccttctaccatcatggatatcaaaagcttctgcccatcagaggcgaggtcgtgcaggacgtgttcagcctggtgcttgctataggctgtatcctaaagtcatttatgatgcgatgccacagtttcagttacctgaaattcttaggactcctttgcaagagctctgtcttactatcaaaagcttacagcttggagctgtagcctctttcttagccaaggcactgcagccaccagacccgctttctgttaataatgcgatcgagcttttgaaaaccgttggagcattggatgacgtggaggagctgacttctttagggcgacatctttgtacacttccgctagatccaaacattggaaaaatgctgcttattggatctgtttttcagtgtctggatcctgcattaacaatcgctgctgctcttgcatatcgtaatccatttgtgctcccaatagataggaaagaagaagctgatgctgtcaaaagatcatttgctggtgactcctgcagtgatcacattgctcttgttaaggcgttcgaagcatggaaggaagcaagacgcagtggaagagaacgctctttctgctgggaaaatttcctttcacccatgaccctgcagatgatggatgacatgcgtaatcagttttttgatctactatctgacattgggtttgttagcaaaacaagaggattgaaggcatataattattatggaaaggatctggagatggtatgtgctgtcctatgtgctgggctttacccaaatgtcgttcagtgcaaaagacgaggcaagaggacagcgttttacaccaaagatgttggcaaagtggatatccatccatcatcagtcaatgcgggaattcaccaattcccattgccttatctggtttatagcgagaaggttaaaactgctagcatttatgtcagggattccacaaacatttccgactatgctcttctcctctttggtggttctctcagtgagagcaaaactggagaaggcattgagatgcttggggggtatcttcatttctctgcaccaaggcgtatcatagagttgatccaggaaaagagattaagaggtgaattggacaaactcctccagaggaagatcgaggagcctgcacttgacatattttctgaaggaaaaggcgttgtggcggcagcagtagaactgctgcacagccaaaacgttcaccactagatgctatctataccggttccatatagcagttttagaactaaaataacagctataccagggagtgcttttgtatactcccttcaatttcgtttgcttgttagagttgaccccttattttttgtgattttccgggagcaagttgctttttacatggacaaacgggataaaatagataaatcaatataaaaatttaatacggacaaaaacttcgaaacatttttttgatctaaaaaaaaaaaaaaaaa

SEQ ID NO: 70936 - DNA, 524 bp, Oryza sativa
  unsure (1)..(524): unsure at all n locations
  Clone ID: PAT_MRT4530_71459C.1
tttttttttttttacttgaagttaantttgaagccctcaatgataagtatgttctgtaaattacacaataataatacaaacaaaaattttcttgcatgcatacatatatcctatgaaacatttcagtgaagatatcatggcttaccaagcattgcttggatccaaggaccaagactaaacctttgtttaaactcatgtccaacaaggaaactacaacatgcaaaaatggaatgtgccaatttttagatgacatgatttggcattgtttgtaatttccgcagatatatatacatacatcaaatgttgtcaattctacgatcaatcttggtgctcaactgaactgtacatcccttttgtcgcaaactgtaatgccattctgctaggtctagcatccagcataataatagagtgctttttgtttagaatgatttggcatagcacacccgtggtaataatatttgggacttcaggtccttcaagatctggttggttggcgcatccacataagcaaattcgtgtctcaa

SEQ ID NO: 70937 - DNA, 1503 bp, Oryza sativa
  Clone ID: PAT_MRT4530_7145C.1
atggccgaggagagagaaagcttcgaaagtcaatgggctccctccgatgtaacggatgagaacttgaaggagatggtagcacatggcgttcttccggcaaaggagatcatcgggtggcgtccggcatgcggcgaagcatttctgacccctgacacacacgaggtcgtggtattttctcacttcttatatggtggttttcctctcccaacctcaaagttctttagggggattgtggagttttacggaattagcttgcatcacctaaaccccaattccatagttcacattgccaatttcatccatgtctgcgaagcttttctagggattaggccacattttgccttattccgccgcatcttcttcctgaagccccagccaaacaagaacaagccgtgcgtcgttggtagggggaccggttttcagttaaggggaaccttaagccagaaatacttctccatgcccttcaaaacctcaaacaagggctggcatgcaaactggttttatgtgcaaaatcctgagctagcactccccgagtactcctgccttcctccaacatatcaagacacccggaactcgcttccaatgggagatgaggctgcccaagcactttctttgatggaacgcatgttgaaacttaaagagcagggtctgcaaggggaacaaatcacccggcatttcatcaagagccggctggcacctatcaaagagagatctcgcactgcctttgagtttgatggcaagaatgaccccaaccgtgaagatccagaatctcttgagtttaaaatcatgaaggagagaatgtacaaaatcttctcaaacgctatcgcggttagctgttcacacctgctgccagtggtgccatataatgctttcaaccctcctccaccggaattttctttaatgaaatctgatcctccaatcgctcaacgccgctcaccccgccggcaggctggtcaggccagtggagggccgaaaatccggtctgatgctcagccaagcatctcaaagccaactaaccagtcggactctcgcaaaaggaaattaattctgagtgacgacgagggtgacaatgttgaaaaagctggcaacaaagaggtgactggaaaacagccaaggcaagctaacccgaagaagaaaacatccagtcgtccaataccaaaaatcaggaagtcatccagaattcatcttaggaatgaagcaaaaactgcaaccctcgagaaactggttcctcaccatggaaccctggaagagacaagagcccaactccatgaaaccagggagcttgccaggaaaactgaacatgatcttagggaccgaatcgccaagctccaagattccaatttcgagctgagtggttcatccaaagtgcaagttgccaagatcaccgagctagaaaagcgaatcaaagctctggaaaaagacaagggtgaattgaccaaacagagggactcggctctgaaagacatcgaaggctcaattcgacatcttggtcaacaaaattaa

SEQ ID NO: 70938 - DNA, 616 bp, Oryza sativa
  Clone ID: PAT_MRT4530_71460C.1
acaaggcggccccccgcaccagtaccaaattcgccctccgggagggcgcaaaggggggccgcctcttcttcatttctaatctagattcattaattttctatgaatttaaactatatatatatatatatatatatatatatatatatatatatatatacctatatatatatatatatatatatatatatatatatatatatatatatatatatatatatatatatatatatatatatatatatatatgaaacacatatataatctaattataacttttccaaaatataacacaaattactggccatatactatttgtgtatcctaatacactttccttatcataataatctcctttattctcgcgccaactccgtttacaaacaaacaaccacccactctctttttccacacgacatctcacttagtcatctatcattatttttacaacagtattcgtgacatcaaattagcatgtagctatatatatatatatatatatatatatatatatatatatatatatatatataagtacgcctattcctatacacacacacacacacacacatatatatatatatatatatatatatatatatatatatatatatatata

SEQ ID NO: 70939 - DNA, 447 bp, Oryza sativa
  Clone ID: PAT_MRT4530_71461C.1
gttgttagctctcacggggcctccttaccctcggcgtcgctcctatccgggggagcctgggcacggccgacgaccttctccccatccgccggcgctacacgcgcgcgcgcgcggtggaggtccaaagcaagggccaccaaggcaacttgcacacactgaagctgatggggtacggaaacccgacggtgcctagccccaacctggtcaagcttaaggaggccaggacgccgttcgatttcaagacaggagtcaagaagcgcatgaagacggcctacactgggatggcgcaatccacgaggacgcatgcaagagcccagggaccactggtgcgcgccacaccgacacacatgcaagaccaaggctgcaaagaaggataggatccggacaagaaactagagcaatgtgcagatacggtggctgaaaaactgcataaataggacccacaga

SEQ ID NO: 70940 - DNA, 553 bp, Oryza sativa
  Clone ID: PAT_MRT4530_71462C.1
cctgaccaaggtttaaaccatcactgcctatcaaagtcatttgactgatatctgattgacgtcctcaacggttgacacatactcatcggtcaagtcctcaacgtacatggagttggataagtttgttcaatccattagcaacaccaatgcagagttagttttttggtggtacaagatggttatgcacatgagcaagagagcagagagcaagtgaaggggcgcaagcaacgatgtatcacacaactcacactcactggtgctttgtccagcaccaacctcagcaccagatttttgtccataatcacatcagcttgggagatgtcttcctgatgcggtgggcaaaggtatcgagggccatggaaccgattgatagcccgaggagcaagagggatttacaggaggtggaggacacgggaacgcatcgcagacttgttctgtacatgtttattagatcattgtgacagagtgacatgttgcactatcaagtaccatagttggttgggattggaatgatccaaatgagttgttcatgttttaaaaaaaaaaaaaaaaa

SEQ ID NO: 70941 - DNA, 225 bp, Oryza sativa
  Clone ID: PAT_MRT4530_71463C.1
atgggacaaagaaccaccatagaagacacccatgacaatcaatatacgcccactagaagccacaacatacaagccaaaatacgccaagacaagccaccggatatcgacatcagagatacgcctggatcgaccctatccgtcgggcgcgagctcgaggaggaaggctaccctgttgtcgactacgagtcagatcgtcagaccgctatgtcgacaacagttagatag

SEQ ID NO: 70942 - DNA, 879 bp, Oryza sativa
  Clone ID: PAT_MRT4530_71464C.1
ctgcaggaatcggcacgaggtcttctcttctcctctcctcccccaaataaccaaaccaaaccctgtataggctcgtataggccaaggcagaagcttcccaaaccctcgctctgcccgtcgatctccgtcgccttctgatccccgcgcgcgcggctgcctatatataagttgcggtgatcggcgggcggctgcaccggcatggggctggagatcatgacggacgaggctgctgctgcgccttcgcccgctgcggcggcggcgcgtgtcgagatttacccgctctgccgctactacttcggcgccagggatgttgccgctggtggcgcgggtgcggggttggagaccgccgccgaccgcgccctccgcctcaaggccaacttcgcggcgcacgggctccggaccagcgtccatggcgtcctgctggttgagctctttgatcatccgcacgtgctgctcctgcaagtcaggaactcctccttcctcctccccggtggccgcttgagaccaggggaacaagatgtccaagggctcaagcgcaaactttcaaccaagttatcggtagctggacatcaggatgacgaagacggcgacggggacgacgaatggcagattggagagtgcattgggatgtggtggagatctgagtttgatgctgctccatttccatatctacttccaaatgcccgtgcaccaaaggaatgcataaaactgttcttgattaaactgccggtgtctcgccaatttgtcgtgccaaggaacatgaagctgctagctgtgcctctatcccagattcatgacaatgctcaggtatatggctcaatcatagctggaattccaaacttgttatcgaagttctccatgaacatcatcagtgactga

SEQ ID NO: 70943 - DNA, 507 bp, Oryza sativa
  Clone ID: PAT_MRT4530_71465C.1
atggcctaccacccaccaccgtctctcaccgccgctgcccaccactgccgtcgccaaacgcccgccggcgctccgttgcagccaccagggcgtactggtcgccaccgccgcgccgttctatctgctgatttgtgggcgatttgggatgggatcagacttcaatcggctgattcaatgggccaaaaaaggattgatcttccatgtggagcctcgaggcagatcgatttagttgaggctgtgctgctacttcaacaaggggcattactgcaagatgaacctgctgaacttgaaatatcatgctgggagaccgctgcctccaccgccgttgttgttgccgccctgtccgaggcccaccgtcatcatccccgcagtggcaagcgacggatccgctccgccgccaccaccctagccaatgctgccgccgccgtcatcgatgccgctgcctctctcactgatgcagccgcccccgccacccttgacgtggccaccgtcgccgggaatgggtag

SEQ ID NO: 70944 - DNA, 574 bp, Oryza sativa
  Clone ID: PAT_MRT4530_71466C.1
tttttttttttttttttttttttttttttttttttttttttttttttttttttttttttttttttttttttttttttttaaaaaaaagaaaaacaactttttttttttttatatcccccaaaggttcacagggcaaaaaggaggaaatcggggcttatttttattttccgaaccactatacgggaaaaactcattacaagacccccccaggggggggaaggggccggggggccccaaagcccctgggggggaacccatatttagggggcccgtaaaaagccaacagagctggggctggggccaaattccgaacaaaggagaaaccaccaaacggggggggttggagctggggccctagggcccgaaaaaggttaagggcccgaaagggagaaggggggccccccagggggggggggggccaaactgggtggtttctcagttgaaacccacctgtttgcaaaaaggggcttgccgttatgccaaacgggggccttaaaaactaattataggggctaaacacatgttggtgaaccaggacaggcgaccgcagctgatattgcctataaccgggacc

SEQ ID NO: 70945 - DNA, 297 bp, Oryza sativa
  unsure (1)..(297): unsure at all n locations
  Clone ID: PAT_MRT4530_71467C.1
cacgttcgtgataatggcgncgtgctgctgctggcggcgncgatggtggtggtggtgtcgcgacgggcggcgcgacggtacaatgctatctacancttcgcgctcatctccgcaccgcaacctctgcgcgcgctgccgcgtggntacaccggcagcccctacgcaaaccttcttcggcgcccaccggcgtgtccncggcggcgcgcgcttctcgtgagactttgggtgcgtgcgcgcgtcgaggcgcgcgcttaanagggcgacatgcgtatcgcgcactcatgacgcgcttttaag

SEQ ID NO: 70946 - DNA, 267 bp, Oryza sativa
  Clone ID: PAT_MRT4530_71468C.1
atggagcgggatgggccctacgacggcctttgtcgcttccggattcacctaggcatgggaggggactgcccgctgtcgtggcctctttccgcctcccttggatatatcctgcatcataccctactcttccggtatgacttgctgagtacattaggtagcactcagtcttgctctctcttccccactccagagctgaagttcttcccagttggagctgtgtcgaagaagttggtttcgtcgctgctgtcaaggatgcctgtggaatag

SEQ ID NO: 70947 - DNA, 432 bp, Oryza sativa
  Clone ID: PAT_MRT4530_71469C.1
cgttgctgccctcttcattcgctcgctcccctcctcgccgcgccgccatctagggtttcgtcttctcctccgccgccgaccgccatggctcgccgcagctcaggtaacccccatcctctctctcccccctagccccagtagccatgcggcgtttgggattgggttctcgcgttgaacgcgcccgttgttgttcttgttcggatctgtggccttcgtttggattgggtagattttcgattcggatcgatctgcgccgcgcgattgggcgattcgtggtctcacgtttagcgtttggtgggatgtaggatcaggaagtgccctccctcttgtattggcgtatttagctgctagattggtcagatctgtcctcggtgtatacataagactctacccgtggttgggggattatcgaagggggtctttttttttttt

SEQ ID NO: 70948 - DNA, 935 bp, Oryza sativa
  Clone ID: PAT_MRT4530_7146C.1
atgtcctcctgggaagacgacgactcggccgcggccgccgcggcggcggcggcggcgagcactgacgtggagcttctcaagcgagcgtggcgcaacgagaaggcgtctccggagatccttcgcttcgactctcccctcgtctcccgcgtccgcgagcagatccagctcctcgaggagacgctggatgacttcggcgagagcggcgtcgacgacctggtggtgtcgctctaccagatggatctcgatcgcacgctcttcctcctccgatcctacctccgcctccgcctacaaaagattgagaagtacatgatgcacatctccaagtctgaagatctcttgagccggctgtcgcagcaggagcagcgatttgcgaagagttgtacggagatgatggagaagcatctcgagcagtcagtgctgtcgaagcttccatacgggtatgactccgtcacgaggcaatcattgtcgagcacggaggatgacatgggtattccttttgatcctataattattccagagcctcagcttgacacctttgtcttctgcaaaaccaagagtgacgtaggagcattccagctagatgatataggggaggaggttgtggacttagttgctgatgatttgtatgtcctccggtacaagtccatcaagggccttgttgagagtgggcaaatcgaccttatttgatgcgaatcacaaggtaaatgctagcaagtgaccactgaagatgcaaactctgtgacagacgtatcagaaacaagtcttctttggtttttcgtgatctctaagtgggtcaactatggaggtgagggtgacccgatgtgctgattcctgtgaaagaggaaattatgtggcatcctattgtatgtagtcaacagtaatcagttaggagaatgcaccatcgttacatgttctaaaaaaaaaaaaaaaaaaaa

SEQ ID NO: 70949 - DNA, 3063 bp, Oryza sativa
  Clone ID: PAT_MRT4530_71470C.1
atggctgaccttctgcaaaagctaggtatcgatagtcatttggtctgccccgtctacgctcaagatcctgagacagcgaaccacattatccttgattgtgtgttcgctcagagttggcggccggcgggagtcgacgagggcggcgaagagttgccggcggtcggccaccgtcgcctcctctggagcggcggtcgtctggagttaacaaagtcggctggaggctgctgttcggcgcccgtagccggccacggcgacggcgagatcggacggagtggcggcgttgtacctgtcgtagagaagaagcgaacggtgggcggccgcaggatgtcggagctggaggtgtatagcttgctgcagaagatggcggcgatgagggacggcggcgactggccggccggtgcggagttggagttgcaggagttgtacaccgtcctcgagaaggtgcagcgcaagatggctcacgcggagccgctggtcgtcgtcgacagcggcaactccgcccgcgccgcctactccctcttcctcgcagaccttcgccgcgtcacgttcaccgtcgaccaagccctcgatagctactccgccagcgcccgccgctccccgttcatgcaccgcgtgcgttcggtggctctgatggggatggcggcatatggtgttttcgcgtttctctcggcccgttcgtcttccctgctgcaggaaaagcttttgccgcagccgctagagctgcgccccaagatcgccagaaagttggaagaggccgtgaaggacgtgaggatgcttctccgcctcttcagtacctacgtcgccgatctcctgccgccgccggagcaccagcagccagagcctggcgaagatgctgaaagcttctggtggtctctaaattcagatctaaatgaaggcttgatcaataagaagcatttgcttgtgctcgatggcgtctggaacgaagaccctcgtaagtggaaggaactgatggatctcctctacggcaattgcacgcaaaagaccaaaatcatcgtcactaccaggattcctgcggcggctgctgctataagctctgcagtaatctaccacctgcacccgttctcggtggagcataccttggagatgctccaaacgatcaatggggagctgcctgagaagttgctcggcggtggcagtagcaacgctaccgtgtctactgctgcggctaaagaattgagtaagaggaaggtcgcagagaaatgcagcggtttgcccaccatcataaagttcttgagctcttctcttgaatctatctgtgcaaacgaggttgctgatccactaaaacagtttgatatgatgtgtgctggcaaccaaggactgctgcacatcgctgaggccagctataaccatcttccaccacatctgaagcggtgcttcctctactgctccttgttcccatatcatcacatctttgatactgacgagatgattagcctgatggttgctgaaggtttaacacagactacaagcagggaagcccaagtggatggtgatatcagcaggcttcagagtgaatgctttgatcttgtcaataatcctgggtctaatgggggaatcagaagaggatgcatgatgcatcgagtattgcacatccttgcacggcacaaagggcaagaactatataaagctattgtgggtgatcattctgctgctttgaaagaacattccaatatcagatatatgtctctcacagttgatcatacaactacggagctcccagggtcgctgactgcgcacacagatttgaggacgctgatcctactcagaacgcagaagatggtcttgtctggtcagaagtctgaaatcaaagagatcccttctgattactgccgctatctcacatacttgcgtgtattggacctgcaggcaaccaagatcaataagttgcctgagaaagtcgaaatgctctcaaatctgaggtatctgaacctttcccaaaccgatattgacaaactgcctgaatcaattggcagacttcagtacctggatataagcaacttgaaaaatgtgaaggagctaaatgtactggaatgtccctcactggataaaatgccttgtgggctgagtgcactaaccaagattgaagcattgccaaggtacattgcaaccagtggtgacaacaatcccatattggagctgcgggatttggtaaaattgaaaagactgggtttggaaaacattgcaaatatttccaatgaggatgccgagaaaatacaactgcaaaagaaacatgagctcgagcatttgacacttaattgcaatatggatgctgaaaacagaaaatcaagttctgaagtgaaggagctactggactgtctagagcccaacccagggttgaaaatactggagatcatttcttatgcaggggaaacgttcccgtgctggatggccaacacaaatccacaacttaagaagctcactcagatcagaatcatcagattgattaatctgaagtgcagcagtctcccgccgcttgggcagctacatcaacttgagactctagagatcagtggaatgaatgccataaaaaatgtcagcagtgagctacacggtgaactgaatgctgatacattccgttctctaaagaagatcgtcttttctcatatggttaacctacaatgttggccggtggaaaatggtgctatatgtgaacatcttaaagagttgtcaattatccaatgcccaaaatttcacaagctgtcgatgaatcttaatattgaaaagctgactctattgatgagtcctcacgaattgcttggcagagaaggattggcaggtgttgctaggagtctaaaaagcctatctatttcactgtgtgaagagctatcagcatcatcaaattgtgagggtctaacgatgctttctaaccttgaggagttaaagatttctggatgtgatgaactggagaacttaccgccgggctgcagctctcaggggaacccgataatgcaacagacgacgcggaagcagcaacaacaggagcaaaggcagtggaaaccaatgaatgaatacccaataccacaggcaatagcttggaactag

SEQ ID NO: 70950 - DNA, 891 bp, Oryza sativa
  Clone ID: PAT_MRT4530_71471C.1
aatcaaccgagctagcttctatatatgatatatgaaagtgtgcataattatttgggcttatagacatgattgaggcagacaagcttgagtgcatgaaaagctaaacatgcaggatataggtatgcagcgatctgcatatgtagaagtttgccatttagcagagttcatgtaaatgtactgaaagataagcgtacgtggtacatttagcttctcaaaaggaagctacatataataatccatacaagtcgttatactaattggagatttggagaactccagagtaataatatgtctggtaatggcttccatcaatttttcatctgatttcttgggcctgcttgaccttaattatgcatatatataatgcattgctgccttaattatgggtgaaagggtggatggtgatacataacgagtgagatggaagaaaaccagaaatgaaggaccagatcgaatagagaatggatcgaaagggaccctgacctagttagtgtacaagaaaaaaagaaatgaagatgtataggtgaaaatgaaatatgtgactacgtactacaaattaatacacaattaattgaactctttcagtagcccccacaagcttctgtggagacatcttgaactaaagctgcatatgaaaaatcagcagcgactctaccacatattatttcccctgcactctcttccttaagaggtacaaggcgcatcaaaacttttcctagaagctaagttaacatgaacacactgattaactgaagatgctaacctgtgacctatacatgcaggatggttaatttactcgtgtactagactgacgacacatccgatgagagaatttcttgtaaaaaattaatgcaacgttcgccttaaaggagaattaagaagaccttaatt

SEQ ID NO: 70951 - DNA, 147 bp, Oryza sativa
  Clone ID: PAT_MRT4530_71472C.1
tgtccaaattccgatccgcgaatcacgtatggagtgccattcgtcatatcgaatccgaagtacgggggcgcgatagcggcggaagcagaatacagatatgtacggatcggaaaacggatagatccgatgtggttccgatgcaaatga

SEQ ID NO: 70952 - DNA, 249 bp, Oryza sativa
  Clone ID: PAT_MRT4530_71473C.1
tcatctggggtggtcgagccactgctttgataattgatatgcatcattctgggaaaactttgcatttcttgccacctccatgtaggttgggtaatgcctgtgcagcctcacctccactgcgtacatcccagtgtggctgttgcagttctggtccacaagccggtccctaaacttgtaccgctgtgtcatcccggtccttaaactcgcaaatcgaccgttcaaatcctcaaacttgttcgactgtgtcat

SEQ ID NO: 70953 - DNA, 1355 bp, Oryza sativa
  Clone ID: PAT_MRT4530_71474C.1
atggctgaccaacccaaaattaaaattacattggtggcatctgcactacagcatttcctaacatgccacttggtcatgaataaaaagaatttgatgtatttacatttggctgaaattcatcgatcgaatttgcagcggcaggcagacaccggctccggatcatcgtctgtctgcaattctgcatccatggtttttggaaaggcaggatttggcaagatatactacaacaactggtgcttctcatttggtgctcgaatactcgagaagaggatgcaggcaggtgatcagagcaacaggatcgccatcatcatctctccaagagccgggagctccaagatcctgccattcgagcttgtcaatggtgccgccaatgccggctcgcaacggcacgctgatccagcagaatccactcctgaagctcatcatcatctatggcatccagtagacctcccaaagataaaaccaccagttcctcttgtcaagaaggtgggtgcagagttctttggcacattcacactgatcttcacagtgctgtccaccatcatcatggatgaacaacacaaaggtgtagagtccctcctcggcatcgcgacatcggcaggattagcagtgacagtactggttctgtcactcatccacatttcaggctgccacctgaacccggctgtcagcattgccatgactgtctttggtcatcttcctcctgctcatcttcttccttacattgctgcacaaatcctcggctcgatcaccgcatcgttcgccgtcaaagggatgtatcatccggtgaaccccgggattgtgacggtgccaaaggttgggacagtggaagcattcttcctggagtttgttacaacgtttgtcctactgttcatcatcactgctcttgccactgaccccaatgcagttaaagagctgatagcagtggcagtcggagcaacaatcatgatgaacgctcttgtcgcagggccatcgacaggagcatcaatgaatccagcaagaacacttggcccggccattgcaacagggagatacacacagatttgggtttatttggttgctaccccacttggtgctgtagctggagaagggttttattttgcaatcaagctgtagttaccttcagggaaaaaaaagtgatcattggagcatgttaaactacctgaacttaaatacagcacattctttacaaattcatgatattgatcaagcagcatgttaggactgcctaaaatgtagatgtatacccaaagtagtagtgatgatgaattggtggtctctcttgtactgaaattgtacagttcattttttttcattttaatgtataaataataaaatatatacagttcaatttg

SEQ ID NO: 70954 - DNA, 1528 bp, Oryza sativa
  Clone ID: PAT_MRT4530_71475C.1
atcgacgccacgcgtgcgcgggcctttacctctactcagcttcgcgaattcgcgggagatcaaaaccctagccaacccctcctcctcctcctcttcctcgcgatccaccggcgatggcctccgccctcggggctcaggcgtctgtcgcggcgcccatcggtgcgggcggctacgggaggagttcctcgagcaagggtagcaatactgttaacttctgcaacaaatcatggattggaaccacattagcatgggaaagcaaggccctaaaatcaaggcatatgaacaagatcttttccatgtccgttcaacaagcaagcaaaagcaaagttgctgtaaaacctctggaattggataatgcgaaggagccaccccttaacttatacaaaccaaaggagccttacacagccacaattgtctcagtcgaaaggcttgtaggccctaaagctcctggtgaaacatgccatattgttattgatcatggtggcaatgttccatactgggaaggacaaagttatggtgtcattcctccaggagagaacccgaagaaacctggttccccaaatactgtccggctctattctattgcatctactaggtacggtgattcttttgatggaaagactgccagtttgtgtgttcgtcgtgctgtttattatgatcctgaaactggaaaagaagaccccacaaagaaaggtatctgcagtaatttcctatgcgactctaaaccaggcgacaaagttcagataacaggcccctcaggcaaaatcatgcttctacctgaggatgatccaaatgcaacccatatcatgattgctactggcactggtgttgctccctaccgtggctatctacgtcgtatgttcatggaggatgtcccaagtttcaagtttggtggtctggcttggctatttctaggtgttgctaacactgatagccttctgtatgatgaagagttcacaaactaccttcagcagtatccagacaatttcaggtatgataaagcactaagtagggaacagaagaataagaatggtggaaagatgtatgtgcaggacaagattgaagagtacagcgatgaaatttttaaacttttggatggcggtgcacatatctacttttgtggtttgaagggtatgatgccagggatccaggacacactcaagagagtagctgagcaaagaggtgagagttgggagcagaagctgtcgcagctcaaaaagaacaaacaatggcacgtggaggtttactaagttactaaaaagcacgggctgtgattttgtgattgttttgcagcgagttgaaacataaaacagtaaaaagcgatgattctcgttgcattgtaaaattgtcaatcttattcataagcttctgcttgacatggtgaataaaatgaagcatatgctaattttgacttaaaaaaaaaaagcggccgcgaattctcatgggcatcatgcatgataaaaaaaaaaaaaaaaaaactcgagactagttctctctctctctccctcgtgccgattcctgcagcccg

SEQ ID NO: 70955 - DNA, 190 bp, Oryza sativa
  Clone ID: PAT_MRT4530_71476C.1
atcagacaaaaaaataagcatttttcagagggcaactagacatgtagacacaccaaaaactattttaaattacaatatattagacgcacacaccttccatacaccattaaaagtggttggcactagtggatgatctttttaaaagcctattgttcatgcaaatcatttcttcatttgggagatatggtag

SEQ ID NO: 70956 - DNA, 264 bp, Oryza sativa
  Clone ID: PAT_MRT4530_71477C.1
ggctttggagaactcagtggggctcaggccatcgccatggcactgagaagtggcagtggaagccacggaggagagggcagcaggaggtggtgaggcacgggagttcgagagcagccatcgccagccagtgagggggacagatcaccagtgcttggcttgccggcgacaaggtggaaaaggttctagatcgcgagcgccgctctagatatccctcaaggggcccaagcttacgcgtacccagctttctttacaaagtgtccctat

SEQ ID NO: 70957 - DNA, 497 bp, Oryza sativa
  Clone ID: PAT_MRT4530_71478C.1
caatagattataattagctgctacaatcagtaatatacagcttgtgccaagttcaaaataggaggatgggttggcttcaagaatgttcatttaacagttcaacagcgaaaactacagtgtgcagtttataacatttcattcaagcataaacggtcactgaaagtaaacaacaggcctaaaccagcagcagttttttactctttaccagttgagttggtgttcgatgttgaatcacgtgacttcatttgcgacgtcacatggtgtgatatatacctttcgttgacctcgactatctgaccttgacccacatattactgttgtctgtccattccagtttccacgcttcgttttccaccccaggggttgaaggctcttttgccaccccacgggttaaaaccctttttatgcagaggtttatctgaattgaactttcttttaccaccccaagggttgaaagcccttttgccacccccagggttaaacgctctttttccgcc

SEQ ID NO: 70958 - DNA, 676 bp, Oryza sativa
  Clone ID: PAT_MRT4530_71479C.1
gcactaacaaacaaaaaatgtatattacactaacaaaaataggtgcatcagtcggtagcaataacttgttcagcagaccgcaaatggcttacaatttatgaacataggatgcgcgtgaggacatcaaacatgagatgactttgaggggtatcttctgcagctcgtgcaaggtgttactattacacaaaaaggacgagcgtcggacactcggggtaaaattttgccagacagtacaacattattaacactattcagcttgctccatccaagattgaacaaagaatcatgtactaccctcccctaatgccctttttatctagcaaccaaaatgagacaacctccatcacgccaaaaaaagactgtaaaagtagcaacagcgttcctatattcccattcacaactcagaagggcaagaacctggtcactcgtaacacgaagcttgaagtatgtgaacatccttccaaggggcatacagccaaccgcagaagtaccacatgtcctctcacaagtcacgaccattccagttaacatattttactctcctacggtcattccaaaaccaaacttgtagttcttctttgaatggtcaatctctgcagaaagaagaaattaactcccatgttcaatctctcttccaaatatgcagcaacaacaccatttgagtcaaattttcccc

SEQ ID NO: 70959 - DNA, 283 bp, Oryza sativa
  Clone ID: PAT_MRT4530_7147C.1
atggccgaggagagagaaagcttcgaaagtcaatgggctccctccgatgtaacggatgagaacttgaaggagatggtagcacatggcgttcttccggcaaaggagatcatcgggtggcgtccggcatgcggcgaagcatttctgacccctgacacacacgaggtcgtggtattttctcacttcttatatggtggttttcctctcccaacctcaaagttctttagggggattgtggagttttacggaattagcttgcatcacctaaaccccaattccatagtct

SEQ ID NO: 70960 - DNA, 975 bp, Oryza sativa
  Clone ID: PAT_MRT4530_71480C.1
atgtgccggcgttggaggagggcggggtgggcgaatgtggagcaaggcgaccatggagcgaggcgacggtggtggcggcggatggtgcggcgagaagcagtggaggaagagggggtgagcggccatggaacaaggggcactgggcgacgacagatctttttggagcgtcagcatcgtcctcactgcgcgccagcgacgacccctgttatcgatccaatccatcaagaactgtctcgcgcgcctctccgctgcagccttgcaggccaacgcatcttcggccccttgaagctagctcctattggagttacagacccatcaaaagtgtttggcaaacttttagctccagatctgaaaaaaaatgaaaaaaaaagaaaaaaaaaggaatccccgccgccaggccgcgcgccgccgccagccggccagcccccgcgtcgccgccggcccccgcgccgccgccgagcctatgcgccgccgccagcccgcgcgccgccggctagcccccgcgtcgccgccagcccccgcgccgccgccgagcccgtgcgccgccgccagcccgcgcgccgtccgccagccctcgcgccgccgagcccgcgcgccgccgctagcccgcacgccgccgccgagcccgtgcgccgccaccgccagcctgcccgccgccagcccgcccgccgtcggttgccgccgaatcttgccggagaagatgggagaggagagagaggatgggaggaggagtttaggggtagttcaatggcatttctgtgtaaatacatcaaaattttaaagggtagtgggtcttttggggtggagtggagctctggagcagcaaaaacccagctccacccccgtagtacaaatttatggagctgctctgccaactccgctccaaaaaacagagaatttgtaccgtttggcacagctccagctctaggtaagttggagttgggagctggagctgtgccaaacggggccttcatc

SEQ ID NO: 70961 - DNA, 239 bp, Oryza sativa
  Clone ID: PAT_MRT4530_71481C.1
catgcatcctagagtagcgatgaaaaacagtggcaggatttccacttttgggcccacaaagcaacttcagaacttaatttcagcagggaaccacaaatggtcactggcgacaattccaccaattgatgctgcatactgggactgctgccatagattgtggattgtggagatgcaaatgcctgatcgctgtagacgctgatgagtttttgagtctgctgagcatacaggctcctgactgt

SEQ ID NO: 70962 - DNA, 608 bp, Oryza sativa
  Clone ID: PAT_MRT4530_71482C.1
cttctggagcacccaacttttattgaatgcgccaccctaattgctttaccaagagtaatctaccacttggcgtatactagcgcacctcgagcacagaatcctggccaagtggtccacaacatatagccaatgctattccctcggctaacttctttacttgggtatagaaccatatacacgaggccccgcatagataaataccaattcatagaacgagcgtggctaagaaaaacagggtgcgccacatgcagagctacattttcttgcgtacttagaacacctgttaaaaccttaggcttgacagtttacagtctacccacctcagatgagcgactttaagggcgccaagcttgtttatgacgctccatgatttgcacaaaaacgctaatactgattgtactccatcgagagaagatattggcaacggagggagggacaatgacatctaagggcatgagtggtgtaagaagcttgctgcataggtcaccaagggccccacgaacatgcatatgatgacagcagaccagggttggaattaatggatagaactctctgatgagctgcttgcatatctggagcgtcatgatacgcattccattgaaaacctt

SEQ ID NO: 70963 - DNA, 156 bp, Oryza sativa
  Clone ID: PAT_MRT4530_71483C.1
atggcttctacggtcctcccggggccgaatcttgctatggcgaagtcgtcccccttcggcatatactcttcgccctacatccttcgcccaggaggcctctggcttggcgagggcctcatgccatatcgccaacaagcccctcacgagcaagagtaa

SEQ ID NO: 70964 - DNA, 285 bp, Oryza sativa
  Clone ID: PAT_MRT4530_71484C.1
atgagcccgccgacgccgccgcttcacatgctggagtacatcacttcgcctcctccaccaccaccgctggcacatcccctcgcaaagcaccaccacttcgatgacgagagcacccagttcggcatggacgacgtgcccaccacccctgggctctcgcctcacctcctcctcctcggcggcagcggcatcactaagagtatgagcttctccgccaccgtgccgtcgtcggccgtcgtcgcggcgctgccctcctcgtggcatcggatgaggagaaggaaaccgtaa

SEQ ID NO: 70965 - DNA, 759 bp, Oryza sativa
  Clone ID: PAT_MRT4530_71485C.1
atggcgagcgggagcagcgccgggtggccgctgtcgccgtcgccgtcgtcgacaagggggaggaggagggtgagtgtgaagccgtggcggttgtggtggcgaaggtgcgctgaagttgcgccggtgatccagtccaagatccatcgccgcgccgtgcggtggccgggcgggcatggtggtgggcgccggcgccgcgaggccgccacggcgtcgacgcgggagcgggaggggtggtgccatcaccggagcttcgcgccggtctacgtcgacgagctctacagccatcccaagacccaccacgtcgccgtccacgaggcgcaggcgcagcagccgaacaccaccgctgccaagaccaacgccggcgccgccagcggcaaggcgcgcgccgtcgccgccgccgccgccaacaacaacaacaacgctgtagccgcgaccaacgctagcgccatgttcgccgccaagaacgctgccgctgatgctgcgaccaacgccgctgccggggccagaggcaaggggcgggtgggcggcggcaagaaagctgctgccgctggcgcggcgaccaacggcggcggcgccaaggcggcgcgcggcggcgtgaggagcttgctgatgagcccgctgagaggaggaggagcgtgtgggatggggaaggtgaatgtgagggcgaaggtgttcatcagaaagttcagggaggagatgaggctgcagaaccagaaatccgccgaggaattccaagccatgctcgcgagaggcctatga

SEQ ID NO: 70966 - DNA, 147 bp, Oryza sativa
  Clone ID: PAT_MRT4530_71486C.1
atgttggatctcagcgccacttccgatggcactgaggtcgcgggtggtgagggcctagggaaacgacggctgctcgcctcagaggagcagaagggcgttgtaccttctcggcgtggatctccagcgaagaacggaggagagcactga

SEQ ID NO: 70967 - DNA, 1989 bp, Oryza sativa
  Clone ID: PAT_MRT4530_71487C.1
atgacgtccacgtcgtctgaaaatgcgcccgaccacgaccacgaccacgacgcctcttcgccggcgccggcgacggcgacggcggcggcgctgccaccgatgatcccggcgtgcgacccgcacgacgggccggcgtgcctggagctcatcgaggtgctgaccacgcgcgccgccgccgtccagcggcgcgtcctcgccgaggtcctcgccatgaacaccggcaccgactacctccgccggtttctcggcgacgaggtcgtcgccgccgccggcggcgaggacgagctcgccgcggcgttcaaggagcgcgtgccggtggtggagtacgaggacgtgaagccgtacatcgagcgcatcgccaacggcgccccgtcgtcgctcatctcctccaagcccatcaccgagctcctcacgagctccggcacgtcaggcgggcagccgaagctgatgccggcgacggaggaggagctcgaccgcaagaccttcctctacaacctcctcgtccccgtcatgaacaagtacgtggaggggctggacgaggggagggggatgtacctgctgttcgtgaagccggagatcacgacggcgtcggggatggtggcgaggccggtgctgacgagctactacaagagccgccacttccggcggcggccggacagcccgtacacgcggtacacgagccccgacgcggcgatcctctgcccggacagccgccagagcatgtacgcgcagctgctctgcggcctcgcccgccgcggcgaggtgctccgcgtcggcgccgtcttcgcctccgccttcctccgcgccgtcaagttcctcgagggccactggcgcgccctctgcgccgacatccgcgccggccgcgccgacccggccgtcgtcaccgacgccgcctgccgcggcgccgtcgacgccgtcctcgccgcccgcgccgaccccgacctcgccgacgccatcgccgccgagtgtggcggcgcgtcgtggcggggcatcgtgcggcggctgtggccgcggaccaagtacatcgacgtgatcgtgacggggtccatggcgcagtacatcccgctgctggagttctacggcggcgggctgccgctggtgtcgacgatgtacgcgtcgtcggagtcctacttcggcatcaacctccggccgctggacccgccggaggaggtggtgtacacgctgctgcccaacatgtgctactacgagttcatcaaggtggagaaggacggcgacggcgagaaggtccgcgacggcgaggtggtggacctcgtcggcgtcgaggtcggcgcctactacgagctcgtcgtcaccaccttcacagggttgtaccggtacagggtgggggacatcctgcaggtggccgggtttcacaacgcggcgccgcaattccggttcgtgcaccggcgcaacgtcgtcctcagcgtcgacaccgacaagacctccgaggacgacctcctccgcgccgtcaccgctgcgaagcccctcctcgaccccctctcctgcgtcctcgcggagtacaccgcctacgccgacacctcctccatccccggccactacgtcctcttctgggagctcaccccctctccctcgccaccgccgccgccatgccatgacgacgccgacgacgcagccgacatcggcgaggacaaggacaaggtggcacacgtcatggcggcgtgctgcgccgccgtggaggccgggctggactcggtgtaccggcggtgcaggagccgggacaggtcgatcgggccgctggagatccgtgtcgtggcgccgggggcgttcgacgcgctcatggacatgtgcgtgtcgcacggctcgtcggtgaaccagtacaagacgccgcggtgcatcaagcaccccgacgccatcgccgtcctcgagcagcgcgtcgtcggccgcttcttcagcgacgccgtcccgcactgggagcccctcaaggtcgacggcgccgccgccgcccccgccaccggcagcgaccagtga

SEQ ID NO: 70968 - DNA, 525 bp, Oryza sativa
  Clone ID: PAT_MRT4530_71488C.1
ttagctcctggaagaaatgtgtccgaattatattctgaatcagaacaaacttcagtcttcagcaatatacggcgacggcgacgacgacgacgacgcccccacggacgacctggacgacaaccggcggggctcccgaccaccacgggcgacggccgccgtcgagaagcctccccatcaagctcctcaagccgctcctcctcttcgtcgtccttgtcgctggcttcctcgtcgttgccgccctcctcctcctcggcggcgctggcgcctcctgcagtcggggagcggtggacgcggccaccgggggcgagcgcttagcataacatgagcaacgaggagctgctctaggcggcgtggatggagccacgggttcggtggtttggagcgaggcacgacgacgagcgacgaaatggcacaaactcgatacccagggtaccaggtatcagtcgatacccaggtaccaaggcctgatacctacgtatcagctcgatacctagggtaccaggtatcagtcgatactagggtact

SEQ ID NO: 70969 - DNA, 636 bp, Oryza sativa
  Clone ID: PAT_MRT4530_71489C.1
atggtggcggcgccggcggtggctggcgcggtggcggcgggcacggtgccggcggagaaggctagggaggacggtggcggcgcgacgctgttgtcccacgccacgccccgcccagcacgcctccttgctcgctccctcagccgaggcgctcgtagagccgcgtccctctactggggacggcaaagcgacggagcggcgacggccgtgagcagggacacgctccgagggatgcctcgccggctcgcctctgccgcgcccacctcatccgcctccacctccgctccccttcctccccgcctcgaccgtccccaactgacgaccccgtggtcacgctccacgccatccgcgccgccgacgccgacgttggcggtctccatctttcgtgccaacccgtcgtcccagccactcccgttcttccaagcggcggaggcgcgcccgcacggcggagtcgttggtgggcatggccatggcgaaggcacggcgcggtggtcatcagaggtggaggcgacgacggcggcggccgggacgggggcctgtggcctgtggttctccatggaggagagctcgcgcgaaggcggatggtggccgccggcgagagctgatgatggagggaggaagaagatgagaggagggtaa

SEQ ID NO: 70970 - DNA, 2175 bp, Oryza sativa
  Clone ID: PAT_MRT4530_7148C.1
atggctgaggagagagaaagcttcgaaagtcaatgggctccctccgatgtaacagaggagaatttgaaggagatggtagcacatggcgttcttccggctaaggagattatcgggtggcgtctggcatatggcgaagcatttccgacccctgacacacacgaggtcgtggtattttctcatttcttctatggtggtttttctctaccaacctcaagattcttccgggggatcctggagttttacgggattagtttgcatcacctaaactccaattccatagttcacatcgccaatttcatccatgtttgcgaagcttttctagggattaggccacattttgccttattccgccgcatcttcttcctgaagtcccagccaaacaagagcaagccatgcgtcgttgggggggcaggttttcagttaaggggaaccttaagccagaaatacttctccatgcccttcaaaacctcgaacaagggctggcatgcaaactggttttatgggcaaaatcctgagcgagcgctccccgagtactcctgccttcatccaacataccaacacacctggaactcgcttccaatgggagatgaggctgcccaagctctttctctaatggaacgcatgttgaaacttaaagaacagggtctgcaaggggaacaaatcactcggcatttcatcaagagccggctggcaccaatcaaagaaagatctcgcactaccttcgaatttgatggcaagaatgaccccaaccgtgaagatccagaatctcttgagtttaaaatcatgaaggagagaatgtacaaaatcttctctaacgctatcgcagttagctactcacacctgcttccagtagtgccatacaatgctttcaaccctcctccaccagtatgtaacagacatctcggcctttctgatggtatccttttgtcttttgcaaggaaattaatactgagtgacgatgagggtgacaatgttgaaaaagctggcaacaaagaggtgactggaaaacaaccaaagcaagctaacccgaagaagaaaacatccagtcgtccaataccaaaaatcaggaagtcatccaggaagccatctgacatcgatccttctggaaaagactctgaaccgactagcatggagactggtcctacaacagaaactgggctgaccgccgaaaatcgcccgagtagtaatcaaccagcaaccgataatatagaggccagcaacgagcccccaaccgggaaccagtcggccgaagctgatcaggagcccccgactggaaaccagttgggcccaatgatcggtgatgaagaagaagttcttcggattcagtcggctgaagattctcgcccacctatcttagtcaaatggtgggatgacgaaatgcagccacaagggattgtaataaataagcagaaagaagacgaggaagggtctttgcttgcaaagacgctcaatcaggccactcgtcttgtaaatagaatccatcttaggaatgaagcaaaaactgcaaccctcgagaaactggttcctcaccttggaaccctggaagcgaccagatcccaacttcgtgaaaccagggagcttgccaggaaaaccaaacatgatcttcgggaccgaatcgccgagctccaagattccaatttcgagctgagtggttcatccaaagtgcaagctgccaagatcactgagttagaaaagcgaatcaaagctctggaaaaagacaaagatcgcaaaattaaatctcaggctcaattcgacgtcttggtcaacaaaattaagaagcttgaaggagctagggatgaagttgccaacgccgctacaccactcatccaagccatgttttttaataataatggtccgagttcgttcgatgctgttgaaatcttcgacaagctaagagctgctccggatacatactttaaaaacatcaaggaagctggatgcatgggggcgagcatggtattggcaatgaccaagtccttaaacccgaggatcgatattgacgctgtcgaatgctttgcagacgggacaagtgaagaagacgcccttgacctcatcaatgatgcacagaaggctgctgacaagatcgttgttgatgcagttgagaggtttctagacaacaatctcaggccgactgtgtctgatgattctgataatggaaaaattgagtctgattga

SEQ ID NO: 70971 - DNA, 528 bp, Oryza sativa
  Clone ID: PAT_MRT4530_71490C.1
ctattcaccatcgggaacagactggcccagtagaaagttggcccaaatagcaccgcaaaaccctacccatgaaccgctcccccttctcttctccattctccgagaaaattgacattgtgccactcctcctctcatcttcttcctccctccatcaccatcagctctcgctggcggccaccatccgccttcgcgtgagctctcctccatggagaaccacagaccacaggcccctgcggggacccctcccatggctcccctccccgtgcctcctcccatcgcccccatcccagccccacctccgcgggcccccgcacctatcccgaccgccgccgccatcgcctccacctccgatgaccaccgtgccgcgccttcgccatggccatgcccaccaacgactccaccgtgcgggcgcgccttcgctgcctggaagaacgggagcggcttggacggcgggttggcacgaaagatggagaccgccgacgtcggcgtcggcggcgtagatggcatggagcatgaccacggggtcat

SEQ ID NO: 70972 - DNA, 1795 bp, Oryza sativa
  Clone ID: PAT_MRT4530_71491C.1
ggccgcttttttttttttttttttccgtgaaaaccgattttttttttttggctttatgaaccctgcatgttggtacttcacatacaatactcctgtcatggtatgaaatctgcttccgtgcttgctgtgcacgaatattacatggatggttgaaagcagtgtttcttgttatccaactggcttcgcagcaatcgcattttctagacagtaacaactgtacactacaatattctaaacaatactgccgaacattttgtatctcgtcagtaaggtcaccgaatactctgcatatagcaccgaaagcttctgcgtccatgagtctcattaccaaaaactcctagtacacgcatcaatcactttcctgagaagagagtatccgcttcagagcacggggtaggctcagcacaatctccgcaaacgcttctggcaaactcaaggtcttcagcgcatcctcggcgtagggaaggcggaacggtactagttgagcagatgctgagcgactagctctgcgctcagttactgatattccccgcgaagagcgaagtggccaagccaggaccctggcctgacttggcagggtgaacaatagatctgagtatcggatactgactgtaaccttgcactcaaaatcctccattacaaattctatcaaattgtaagagagactgtggaacagttctccaatttggttcccatatagttccttgataagccgaacctgctccctcctgtcaacataagactgcaaaatctcttcaagatgatcaataaatttaatagcattagatgatagaaattcactttctacttctcgtattggcagaaagaaaggtaaggtgtgctcaatcacagtcatcttttcaaggaatgacttgctttccaaaacacaatgataaatttcacaaggttctccagcaaaataagtctcatactgtataccaattctcgcaccatccaaacaatagataaccttgttttttactctatatgtagtccttgactggaattgaggatctgctggaacatttgcttggttagccatggccttcctatcagcctccatatggaccttttcacggatggttgccagcaaaccatcgttccactgctcatcatctattgggatctcttcagtttgggcagttcgtgcagcctcaaattctctctgtagccgctcaaaaatcagtttatcagattcccctcctctcatcttcttcctccctccatcaccatcagctctcgccggcggccaccatctgccttcgcgcgagctctcctccatggagaaccacaggccacaggcccctgcggggacccctcccatggctcccctccccgtgccccctcccatccgcccccatcccagccccgccctccgcgagcccccgcacccgtcccggccaccgccgccgtcgcctgcacctccgatgaccaccgcgccgcgccttcgccatggccatgcccaccaacgactccgccgtgcgggtgcgcctccgccgcctggaagaacgggagtggctaggacggcgggttggcacgaaagacggagaccgccgacgtcggcgtcggtggcgcggatggcgtggagcgtgaccacggggtcgtcggttggggtcggtcgaggcggggaggaaggggtgcggaggtggaggcggacgaggcgggggttgtcggggaggaaggggagcggaggtggaggcggatgaggtgggcgtggcagaggcgagccggcgaggcatcccttgtcagaggtggaagaaggtagtaacaggggtatttttgtccgttcgggcat

SEQ ID NO: 70973 - DNA, 157 bp, Oryza sativa
  unsure (1)..(157): unsure at all n locations
  Clone ID: PAT_MRT4530_71492C.1
agtgagcattccagtgttggttagattacatagnatagctgactgtctagatgatctgttgttgcgatacctcccttctggatgcactagattatattttaaccnttttaatcatgataaatactaccagtctacccaaaaaaaaaaaaaaaaaaaa

SEQ ID NO: 70974 - DNA, 1718 bp, Oryza sativa
  Clone ID: PAT_MRT4530_71493C.1
gtattacgctacatagcggcccgaacctgtataatcttggcacctgtgcacgatctcgaagaactcgaggcggatacacgatctcgatcaatgtaccctttcccccggccgaactcacaaaaggggatctctcgatcacctcctccatcatcagctctcgccggcggccaccatccgccttcgcgcgagctctcctccatggagaaccacaggccacaggcccctgcggggacccctcccatggctcccctccccgtgtcccctcccatcgcccccatcccagccccgccctccgcgagcccccgcacccgtcccggccgccgccgtcgtcgcctccacctctgatgaccaccgcgccgtgccttcgccatggccatgcccaccaacgactccgcctcctccctagccttctccgccggcaccgtgcccgccgccaccgcgccagccaacgtcggcgccgccaccatctcctccccgatctggccgcggggggaccagatccgcacacgccggtgccggatctgccccctctagccggcgacgggcggcggccatgaccgccgccgccgtcaacgcctcgcgcgtcatgcgccgccgcgccgccggcgaggacctgggcgacggcgacttctgggccggtggcgccccgcgcctctacgacttctcccagcaggagcagaagccgttcttgccggcgccgccgtcgcccgcgcccgtcccggcgtcgccgccgtcccccgcggcggagtcggtggcgcctcccgcgcgcggcgctgcgggaggaggcgcgcgcccacatcggcgacacgggcctcctcgaccacctcctcaggcacatcgccgacaaggtggcgcccggcggcgccgagcggttccggcggcggcacaacgccggcggcgggctggagtactggctggagcccgccgagctcgccgccgtgcggcggaaggccggcgtggccgacccgtactgggtgcctcctcccggatggaagccaggggacccccccgcgcccgcgcccgcgccgccgtcgcccgcgcccgtcccggcgtcgccgccggaagcccgtcccgcgcggggcgctgcgggaggaggcgcgcgcccacattggcgacacgggcctcctcgaccacctcctcaggcacatcgccgacaaggtggcgcccggcggcgccgagcggttccggcggcggcacaacgccggcggcgggctggagtactggctcgagcccgccgagctcgccgccgtgcggcggaacgccggcgtggccgacccgtactgggtgcctcctcccggatggaagccaggggaccccgtctcgccgggaccagccggacgtcgacggcgatggcaccaccaccaccaccaccaccagcagcaatggtggcagcgggaagagaacatcgaggaagtgcagcgtgcgcatctccaagccgcagggcgcgttccagtggccgacgccgagcctgccgttctcgccggagctcgccgcgccgccgtcgccgccgctgaccccgacggcgcccgtcgtcgccggcgccgccaacttcgccaccatggacgagctctacgagtacatgatggccggcggcctccccacgccaccgtccaccaccagcaacgccgggaagctcccctcgctgcccgccgccacggcctgcgccacctccaccgtctccggcgagccctccaccgccgccgccgccgccgcgagat

SEQ ID NO: 70975 - DNA, 484 bp, Oryza sativa
  Clone ID: PAT_MRT4530_71494C.1
tcgttgttggtttctagctttaatttggtgccctagagtgattgctcacagtttacgtgattgatttggccaccgaagttcgtgttcatgttcttggttgtgaaccagtatatactgttaagttaaaattctaagctaattgttcggtttggacaagaaagatattgagggttactgggttaggattttgtgcttcagtttgatcactccattgatgatatccaaaaagttgcataccacatcatgtgacgcgaacactaatccgttaagaattacaggaaaacaaaagtgtacaatctcatttgtagtaatatgatttacagacactgcaaattataaagtacggcaataaacacaccagtctgaaatacttagttatcttctttaatatgatcatcgagatatgcagatccgagctaaattagaagtataacatatactgtcttttgatttttcaaatgttgaatatgaaaattatgatatt

SEQ ID NO: 70976 - DNA, 250 bp, Oryza sativa
  Clone ID: PAT_MRT4530_71495C.1
cacaatatatagagagctccatatgaatctcctctctctgaccataacgaatacaacatcgccgaaagcacactcgctatgtagccaaccataactaccaccacgatgagctgcaggcatgcgtgttattttttatcaagaggggggggagactgcctgtctcatgaagaactaactcctaagctacgtgagagagagctgcctgcttttttaaacaaacagacgcacagactccccatctacagatgac

SEQ ID NO: 70977 - DNA, 227 bp, Oryza sativa
  Clone ID: PAT_MRT4530_71496C.1
ttttgtgttttttaccttggactgtcaataaagatgctggccagcatgtaataaaggtaaactcggaaatatgaacctccatgtgtattctgagtgcaagtaccaaatcattttacagttggcagggacatataacatgtgtgaagtaggatcaggaggcgctttagccaatagctaaaatcgttgaacattggctcgatgacaaagggtgagtggattaacgctca

SEQ ID NO: 70978 - DNA, 644 bp, Oryza sativa
  Clone ID: PAT_MRT4530_71497C.1
ccggccgggatgtctagatcatcttctctcgtgtaggtaattactagtatagcacctgaggggaattatacgcacgtatgacttcaagaagaagcacctaattaatcgatttcatacagcaatgggcgatgtgtcgctcgcgcggtcatgggatgtggtctccggcgaatgtgcctatgacgtcgcacatgcgctgggataagcgctagttcatttcctgcatctccctcaacaagcgtcgcctcttcaacttcctcctccgattcgaatctactacgaagaacaagcttgcgtacttgaatggcaacatcgacatcctacagagcaaattggtcgtgattgaggttcgagcgagcagagctacaaccagtccatgcgctttcaactagcaagctgcaggataagggccgcctgcttgcacataatcatcgctttcaatgtgttatgggctccatcgtacacagctttgcacgtcagcatggaggccggaagaggacatgccggtgctgagagtctctccgtctggatgtctgctcactctatgatcgacaaccatgctatctacctcgtctgcagtgatgtcatccagaacgacgttatcaacatcatgaccattgatgactgccttgctgacgagcttatta

SEQ ID NO: 70979 - DNA, 737 bp, Oryza sativa
  Clone ID: PAT_MRT4530_71498C.1
ctaatcgcaattttggccgacggtggcagacggcgcggttgacccaccgtctgccacgtcagcttgccgcccaccattggggcggcaggggctattttcgccgccgccgacgcgctctcgatccctcccctggccgcggcggcatggggaatactccggcggcggcggccgatctccggttctgcttgctcgaggaaggccggccgcctccggtcgcagccgcgtgcaacccgacgcccccatggctcctcgcgattagggtaagccgtgttgatttcctcagttttttttttctcgccggattcgatcgtagtctgatgtggcttctcccgcaatggttctgcatcatcgccgccgtcgcgatggtggccgtgttcgccgccgagatcttcccctggtgcgagagcaagggcgatgtggccctgtgcgccatcgccctggccggcgcgctgctcatggggccgatcctggggttggcgatgacggcgtgcgccgccgacgacgacgaggccgccgcgcgcatcccgtcccggtacaccaggagcgaggagaacatggggcgagccgccatcatggccgtggcgctgctggggctctacgtcatctacctcgccgccgtgcgcggcggcgacagcggcaggttcctggacgcggcttgctacgtcatgatgggtctcgggctgatcgttggtcactccgttacgtggatcgagggatgctttctgcgccgtgattag

SEQ ID NO: 70980 - DNA, 279 bp, Oryza sativa
  Clone ID: PAT_MRT4530_71499C.1
atgactaaatcagagcttattgaaaaattaatagcgttaaatccgagtttaccagaaaaggcagttgaagacggcgttaaagatattttggaaaatattatgctcactttggagcaggctaagagagtggaaataagaggttttggcagtttttctttacattatcgtcagccacgtattggtcgcaatcctaaaacgggggcaagtgttaagttagatgcaaaatatgtgccacattttaaagcgggtaaggatttaaaagaacgcgttgatttagta

SEQ ID NO: 70981 - DNA, 1842 bp, Oryza sativa
  Clone ID: PAT_MRT4530_7149C.1
atgacaaagaataatattcgagccaacaaaccgggaacgcaagtatgctcacaagtagcctactggaaattcatacagactctggacaaagaccagctgcaagccatagatgatctaggatttgggggcttaacaaaaatgaatggagtccaaattcgccggattttatgcaagcaaattgctagggagtatgatgagcatactggagctttcaatataaatggaaccatgcatgagataaccattgaagatgtagatcacatactcggcgtgccatcagaaggtgttgaactggttgaagtgccacaagcaatccaagctgacgttgatgacccaaaggagaaagaaaaaaacgaagctctacaggcaacaaaggccgctctgtttgcattatataaagacaaaagggagactaagataactctgtcagccttgcgggattcattgaatttgaataaatcttgtgacgatcactttaaaaggcagtttgtgctatatacaattggtctgatcctatgtcctacaactgagagattcgtccattcagattacctaaatctactcataaatatagcagatataaagagaaccaactgggctagcttaaccctaaaccatctgaagaggtcaatcgtcagtttccagcatgataaggtcaatcttaagggcaaccaaattcttctactggtagctgtaatttcaattcaagttatggtttatgcttgtatggagaagtttcgagtgagtcacatacatccttccatagattacaccggacgagacagaccactgatacaatactgggatgtgaagaaagccagaaagcgtgaaaaaatcctgtatggagtaggacagattgtgaatgatatcaagctcccaatcgaggccaccaaagagtataccactaaagatcactccggaacagatgccaaccaaccaagtaacatggataatactaaggcacagacaacagatatggtggatgtccagttgcagcttaaaacaatgaatgaacatttaatcatattaagaaaagaaattcaggccaagaagaaaaaagatacaagtaactcgcctattgcaaaaagggtgcaaacaacaggaagggcccgcacatcaactgtacaattaaacactgactttgtgtacccagagaaccccaagaacaaacagaaggcaactccagcccccccccccaatacattccgaaggcatgccttgcacaaatgcttcaaaaatttcgtaacacaacattttatatttgtcattgaaattaattgggttgtgattgcagagtttacatgcaccgaagaggatgagttcctcatcgactacattaacacttcaccgcctgaccgtgttttgatcatcgacacatacataatgtacctggaacataaataccttgaagagtcacaagctcgcagaagagtatatatgatgaaaacgttcatcacaggtaaaatatcgattgactgcgtgcacgaaatctccaagcggcagttggaaaagggatatatatcaagaattactaaccaaattgcccagaacgaacagatctttatccctataaatagaaataagaatcattggtacctggctgtcgtccatgttaagcaacgccagattcaactactggactcatcacctagcaccggattatctttctataggtcttcatgtggtctcttcatgctgaagtgcatggaacactggaatggatcaaagttaaccacaaaatttaagcagggtgatatagacatcttcagacgcaagctagcggcaattttggttggctccacatcgaatgataacaccgacatcccaacatacaacaaatag

SEQ ID NO: 70982 - DNA, 687 bp, Oryza sativa
  Clone ID: PAT_MRT4530_714C.1
gttgttctctttttccactacgcactagtagtaggactctggtattctcccatggcgactgcgaccgcggaggttgccgctgcggctgctgccgccggcgaggcgccgccgccgccgccgccagcggtggtagaggaggcgaaggaggctctggaggcaccgaagccggaggaggcgccgaaggctgaggagggggaggagaagaaggcggagggtgagaaggagaaggagaaggcgaagaaggagaggaaaccgagggcgaggaagccccgatcggcggggccacaccacccgccctacttcgacgtgaggggaaaatcaattgatcgatcgatgcgcgtggcgtctattgaggtgattgtctgccacttcctgcctcaggacgacatgctctgggtgcgcaactgaatgaagcagctacctgcgcgccatccatggctaattaagctccttcctatattttcgatctacctgccggctggctatcatgttatcatcgcgtgtgtgtgcgcgccgatccgacatgcccacactacacgtcgacactacacgtgttttattttgttaattaataagtctggacaaccaggtcatcttgtacggcacttctcccctctgtcccgaaataaaccaacttataaagattgaagtttgtcgcaaaataaatcaacttctaccttcttggct

SEQ ID NO: 70983 - DNA, 237 bp, Oryza sativa
  Clone ID: PAT_MRT4530_71500C.1
atgcttgactttgatctaaacaaaaccccattgttcttggcggcggatgaagatatggacatggggctggatccatttgaaagtagacttgataaaatttccatgaagtacttgcacgcccaaatcagacttcgcatgaaatcgtggcggtcgtcagaagttggcacagtcctgcagtccgaatccaccccgcgcaaatcctctccccattggatcctctccatcgttccggagtaa

SEQ ID NO: 70984 - DNA, 591 bp, Oryza sativa
  Clone ID: PAT_MRT4530_71501C.1
aggctccgctcgccaatcacaccggcctccatttcttcctcctccccttcgccgaatcccccacaccaatccgccatggctagtgttctcgccgtccccctcctgctgtgcctgctcgcctccgcctccgccgcccgcttcgccccggcggacaaccacctcctcgcctgcggcgcgacggcaccggccgtgctccccgacggccgacgcttcgtccccgactccggctgcgcctccacgcgcctccgctccccggcacctaccctcccgtccgcggcctccagcgcggccccgcagccgacccctctccacgccgccgcgcgggtcttctcctgccgcgcgtcctacgacctcgccgtccgccgccgcgggtaccacgtcctgcgcctccacttctaccccttcgagcccgcgctcgcgtccgcgcgcttccacgtcggcgccgccggattcctcctcctccacaacttctccgcgtcggcccccgtcgtgaaggagttcatcctacccgtccactccgacgtcctcgtcctcaccttcgtccccgagtcgggttctaacgccttcgtcaacgccatcgagctcgtctcg

SEQ ID NO: 70985 - DNA, 440 bp, Oryza sativa
  unsure (1)..(440): unsure at all n locations
  Clone ID: PAT_MRT4530_71502C.1
attacttcattactgccttaattgctatggatagcatagatccactttcaaccacttcgtccccccgcgtttaccgggagtttttatgaatttcttattgtagaagtacaacttcgcccatagatagacacacagctcatgatcccagctcacctcatgagtcatgactgatgagtagcagtagcatcaaagatataaaatgcaagttaaaaaaggcaaaaagcgatgtgccctttttcttggccatcccctgagattcatgggctgttcctactctttattagcaaaaggaaaaaacagaggcaaataaatgcactnccttaccagcatggaattttttgctcataggataaagtcaggtacagnatccaagctgntttaattctagtaccaggttgggaaacttgtctcatgtgtagggttttacaccaccagaaagt

SEQ ID NO: 70986 - DNA, 1854 bp, Oryza sativa
  Clone ID: PAT_MRT4530_71503C.1
atggatgccgcggggtcgctgcagggggagcgggagttccacaacgagatcgccgtcgcgtcccacctcctcgcgtcgtcgtccgcgccgggatcccctcctgtccccgacgccgccgccaagccgggtgggaaggggcgggactccatactgctgccgttcgcgtactcgatgtcgtccgcggcgcggggcgaggggcggccgcggcggatgatgctggtgtacgacctcatgcccaacgggtcgctgcaggacgcgctgctggggcggcgctgcccggagctcgtggcggagtggccccgccgccttgccgtcgcccgcgacgtggccgccgcgctccattacctccactccgtcgttaagccgccggtcgtgcacggcgacgtcaagcccagcaacgtcctgctcgacacggatctccgcgcccgcctcgccgactttggtctctcccgcatcaattccgacgcagatgcggacggcaagcctgagagcggcgcgattgcggaaggatgtgacgtcgatgggggatgtgatgatgacgcctctgtcatagcggagagcacggtcaccaccacggtgaatggtgaggggaaccccaaatcaccggaggatgacgatggcttcacatcggcatcaccggcggaagctgcgtccacttccgggtttgaccggaccagtgttgagagtggtatgaatagccgcagctgcaacggtggagggtcacgcaccggaggtaccatgggatcaggtaccgggagtgactggtggtggaagcaggataatggtgggggcagcaatggtgtaaaagattatgtgatggagtggattagatcagagatcaagaaggagcgccccaagaatgactggattgcaggggcagctattaccaatccagctgcagacaggaagaagccaaagaggagggcacgagaatggtggcgagaagaatatgctgatgagcttgcgaaaaagcagaaacgacgtgcacttgctaaatcaaagagcgagcaggcagggttgcaatggtgggagcgggatattgacgatgacttggatgcaaagggacgatccaaatggagtatgatgaagagctggagtcggagaagcaatggcagcactggcaatggcaatggcaacggcaatggcagtattaactggtgggtcaatggtgcaagaagcacccgtgattgggcaagtggggaattcgttcccaagagtagtggcgcggtgagcagcacaccgagcatgcgcggcacggtgtgctatgtggctcctgaatacggtggtggtggtcctttgtctgagagatgcgatatctatagctacggtgtcttgctactggtacttatctcaggacgccggccgttgcaagtgacggcctcacccatgtctgagtttgagaaggcaagcctcatatcgtgggcgaaacatcttgcgcgcgtgagccgcttgattgatcttgttgatccagccctacaggatgtgaaccgtgatgaggttttactctgcattacagtcgcactcctttgcatccaaaggtctccagctcgtcgaccatcaagtgaggaggtactccgaatgctgtctggcgagggagaacctccgcacctcccattggagttctcaccgtctccacctggtgggttccctttcaagtcccgaaagaaagttcggattgctattgctgatctaaagtatgagggtcaacctggtcattatgtcttctggaaaggctttattgaggcaaaaagtttcattctaaggcttgtttggatgcaaaggagtattgctgaatgccccaatcccttcggattgtggtttcaagtcgaagaaaatctcctctcatcaaagtga

SEQ ID NO: 70987 - DNA, 313 bp, Oryza sativa
  unsure (1)..(313): unsure at all n locations
  Clone ID: PAT_MRT4530_71504C.1
actctgcctcccanttgagagangcgnctcnancgtcaaggcgggcagttanctcatcnccggaaaaagaaggcgacggcggcanccccaaccanccgggttgncaacgtggccccttgaacngtggggangaaagcngccgtngccactcnncattgggaangangtnaccgtggcgngccccccnncgggcgacagcggcanctccactttngaaannaaagcgggnggtgccccctcnnnctccngaaaagantctatagcggtnngccgccccnngttttcngntncccccggccttttnccccncccc

SEQ ID NO: 70988 - DNA, 723 bp, Oryza sativa
  unsure (1)..(723): unsure at all n locations
  Clone ID: PAT_MRT4530_71505C.1
ccggccgggaatcctccccagtgacgccatgtcgtcttcgtcgtcgtcgttcaagcccaacccgctgtcgctgagtgtgccggaccctgctctcgaccgctggctccgcgactccggctacctcgacatcctcgactcctcagcctcagcctccgcctccgcctccacctcctcctccccctccgcaacgaccaccaccgccgccgcctcatccacatccactctcatcaaccccacctccgccgccgccgccgtcctcgccttcgcccgtaccctcgcctcggtcctcgcgctcaaccccttcgctcggctgtctactaccgacctcgccgcgcccactccctcttggtccctcgccttcctcggtccgcccggagccgcgtcctactcctggcccccgacctcgacccaggcccgactccgcgtccaggagaacgttcgccgctacgcccgcaattacgccgcgctctccatccttgtcttcgcttgctgcctgtaccggatgccaatggcgctgttgggaatgttagccatcctcatcgtgtgggagagtgtgaggtactgccgggagcgttggggactcgccacccgggcgcccggggttgggcagtttctccttcattctgcacagattgctactgctattctggtttatgtgtgcagtctgcagtttgctcttgtatatgncattgngnntgagtatgcagtgatgatgttgcatgc

SEQ ID NO: 70989 - DNA, 927 bp, Oryza sativa
  unsure (1)..(927): unsure at all n locations
  Clone ID: PAT_MRT4530_71506C.1
tttttttttttttttgaacgactcgtacaagacggtgcgaagttcgatggatagagtaggaaaaaattacaagattacaaccctggagaatcgtaagccaggaaaaaggaaaaaactataccaccacccacacgccgacatcgccaacacacacgaccaggagaaggctagcaccggattggccgccgctaagcgtgaccgaccgccacggcagctcctcctcacacctaggtcgccttcttcaccgccgggcgcgcctttttgcgctaagccggcctcctctactggacgcgcctctcgcgccaatccggccttccttcatcgggcgcgccttccgcgccaagccggccttcatctncgccggccgtgcctttcgcgccgagccggcctccactgccatcggctgcacttctctcgccgtcattattcccaactcgtacccgactccttccccgccgccgacatcaccaccgcctccgcaaaacctttgctgcaccgtcgccctccaccaccgagcagctaacagctcaacgccatggcttccaccaccgttgccagttgacacggcagccaccacgttttcgcctggccactgccggcgccgccgacgacaccacacagacgtcgtcgtcaccaactaccgccggtatctagatccggccgagaccgtcgccaactaccgccggccgtcgtccttgtcgtcgccaactaccgccggccaactgccgccaccctgcagctccggccgagaggcgcggatctggggggtaccgccgccggcgcccttgacatcgccgtcgccctccccgccgccgttgcccccaccctcgccgccgctagtcgctaccccgccagatccggccggagcgggctggatctggtggtcaccgccgctccgcctaggacggccccctgcccgcccggaag

SEQ ID NO: 70990 - DNA, 1120 bp, Oryza sativa
  Clone ID: PAT_MRT4530_71507C.1
ctagaccaacaaaggcacggctggcgcaccgatgctccaccactccacaagctttgctgacatgtgggaccccttcaccggcgtcccccgccggccagccttcttgcgccaaagaccgcgccacacccaccggcagctcctcctcacacctaggtcgcctcctccaccgccggccccgcctctctgcgccaagccggccttctccaccggccgcgcctctcgtgtcaatccagcctccctccatcggccgcgcctctcgcgccaagccggcctccatttccgccgctcgcgcatctcgcgccgagccggcctctgctgccatcggctgcgcttctttgtgccaagccggtttccgacccctccaccgaacgatgccgcgccggccagcaccaccacagccttggttgccgaacacccagccacctcgcccctgactccttccccaccgccgacgtcgccaccgcctccagagtcacagccgccgtcgccgctgccaccgacgccaaccaccgcctccgcaaatcgccgctgtgctgtcaccctccaccaccgagcagctagcagcccgacgccatgtcttccgccgccatcgccagatgacacggcagccaccacagccggggaccgccaccaccgtcgccaacgccggcgtccagatccggccgagaccgccgtcgccaactgccgccgccgccgtcgccacaccgtcgctatcgtcgccgactgctcccaccctccagatccggccgagaggcacggatctgggggcaccactgccgtcgccgccaggcatcgagccgccggccaaagcagccgcgcctccgagcctgctgcggccgcccgcgcctgcgccgccgtcgcgcctgccgccgcctaacgcggctgtccgcgcctgacgctgccgcccgaccgcccgcgccttttgcgccgccggcacgcctgccaccgcctgtcgtggccgcctgcgcccacgcctcgccgatgccgtgccggcgcctccgcgaccggatctagctgcgggtgcgccagatctagtggtggcgacgctggatctgccaccatgcacctcgacgccggcgccgctccggtcggccaccgccttcctttctctttcttccat

SEQ ID NO: 70991 - DNA, 1031 bp, Oryza sativa
  unsure (1)..(1031): unsure at all n locations
  Clone ID: PAT_MRT4530_71508C.1
gaccgccactaggccaacaaaggggcacagacgagattctgcgaaaccacgtttgacgcaccgatgctccaccaccacacaagctttgccgacatgtgggacccctgcaccggngtcccccgccggccagccttcatgcgtcgaagaccgcgccacacccaccggcagctcctcctcacacctaggtcgcctcctccatcaccggccgcgcctctctgcgccaagccggcctccatctccgccgcctgcgcntctcgcgccgagccggcctccgctaccatcggctgcacttctctgcgccaagccggtttccgacccctccactgcacgatgccacgccggccagatgcagccgtctcccacgccctcggctagtcaaccgaggccgccatgcctccgatgaccgcaaacacggtcaccaccaccacagccttggctgccgaacacccagccacctcgctcccgactccttccccgccgccgacgtcgccaccgcctctagagtcacagtcgccgtcgccgctgccaccgacgccaaccaccgcctctacaaatcgctgctccgccgtcgccctccaccaccgaacagctagcagcccaacgccatgtcttccgccgccgttgccagatgacacggcagccaccacagccgccaccgccgtcgcccactgccgtcggccaactgctgccgccgccgtcaccacaccgtcgccgccgtcgccgactgctctcatcctccaaatccagctgagaggcgcggatctgggggcaccgctgccgtcgctgcgaggcatcgagccgccggccacagcagctgcgccttcgagcctgccggggccacccgcgcctgctccgccgtcacgcatgacgtcgccgcccggccgcccgtgcctgcgccaccgtcgcgtctgccaccgcctgtcgcggccgccagcgcccacgcctcgccgacgccgttcccgcgcctccgcgaccggatccagctgcgagcgcgccagatccggtagtggcgacgccggatccgccgccat

SEQ ID NO: 70992 - DNA, 809 bp, Oryza sativa
  Clone ID: PAT_MRT4530_71509C.1
taccaccacccacacgccgacatcgccaacacacacgaccaggagaaggctagcaccggattggccgccgctaagcgtgaccgaccgccacggcagctcctcctcacacctaggtcgcctcctccaccgccggccgcgcctctctgcgctaagccggcctcctctactggacgcgcctctcgcgccaatccggcctccctccatcggccgcgcctcccgcgccaagccggcctccatctccgccgcccgtgcctctcgcgccgagccggcctccactgccatcggctgcacttctctcgccgtcatcatccccacctcgcacccgactccttccccgccgccgacatcaccaccgcctccgcaaaacctttgctgcaccgtcgccctccaccaccgagcagctaacagctcaacgccatggcttccaccaccgttgccagttgacacggcagccaccacgtttccgcctgcccactgccgccgccgccgccgacaccacacagccgccgtcgtcaccaactaccgccggtatctagatccggccgagaccgtcgccaactaccgccggccgtcgtccttgtcgtcgccaactaccgccggccaactgccgccaccctgcagctccggccgagaggcgcggatctggggggtaccgccgccggcgcccttgacatcgccgtcgccctccccgccgccgttgcccccaccctcgccgccgctagtcgctaccccgccagatccggccggagcgggctggatctggtggtcaccgccgctccgcctaggacggccccctgcccgcccggaag

SEQ ID NO: 70993 - DNA, 279 bp, Oryza sativa
  Clone ID: PAT_MRT4530_7150C.1
acttggcacctgacgtggggctgcattggctttcgatctccggcgaaggggtaagtcctacgttcggccggccctaccaattgtatcgactacattggtattgttcaaagctacatcgcttcgacctcttggatcgctctggtttggttggtatacttgcatacatatttatcatatatcttagttaatctagtttagcatcttaatttacttttgtatcagctgagattcgttttagggtttatgctgtatcggctaaattatcttgctaaattatat

SEQ ID NO: 70994 - DNA, 1173 bp, Oryza sativa
  Clone ID: PAT_MRT4530_71510C.1
ctaactgttttcagcttcctggtaggcatcatttagcttgcgcttcgttgcctctagtcgcaaatcagctatgtcggtgttgtttctcttccctatacctaccttgcagccttctaatattgttgcttgcctttccaacttactcacatgatcagggagtggctttctgacaacagcaataggacgttgttctgttatggctatagcatgatgttgagccagtttcatctgtagatttgcttgcctcattggaggaccatgttgtcttgataaatctttccccttgcgcaatatgttttcatccatatttgctacaggttttgcaatctccatcttgtacccgccaaaaccacaatcatttttagcattgggtattagactttcgtcatcatcatcatccgctttatgtaaaaactcagatacatattgctcggcagcggactggggcaaaaagaacgctcccacatccattggtggagttggaaggccgaagtcatcttccacggtagatggatttgatatgtctggagaagtgtctgcatttgcagaagaaggtcctacccagtcagcagctactcctttccagcctttggcgagatcacgtgctattttgcatattaccggtgacctatgcttgttcaacggagcaacagcttctgcaatctgagtactcttcagcaccgagatagacagccgcatcagctgcagcctcctcagaccgtcgaacaaagtgtcaaccgactgctccttgtagttgatgaggatatccttgatgcggagcacctcgttgatcacctgcgtatcctcctcgatctcgtcgtagagagcctcgagtatctgctgatcgatcagcgaggtttgtgcctcggcggcggcgaagttgccatcgttgtcatcatggtgatggccacctccgtcggggatggctgctggtggtaggcgatttccggcgccgtcgacgaccctgccgcaggcgagcggcgccggcaccggcaccgtcaccggcgcgacggcgaacagccactcgatgatgccttggcggcggcggagcagctcccgcggcgagtcggcgccggcgatgaggatggcgttgcggatcacgtcgtagatgtcggcgccccggaacatctcgcgccacctctccatgccgcttccggcgccgccgccctccat

SEQ ID NO: 70995 - DNA, 1051 bp, Oryza sativa
  Clone ID: PAT_MRT4530_71511C.1
caccacccacacgacgacatcgccaacacacacgcccaggagaagactagtaccggatcggctaccgctaagcgtggccgaccgccacggcagctcctcctcatacctaggtcgcctcctccaccgccggccgcgcctctctgcgccaagccggcctcctccaccagacgcgcctctcgcgccaatccggcctccctccatcggccgcgcctctcgcgccaagccggcctccatctccgccgcccgcgcctctcgcgccgagccggcctccgctgccatcggctgcgcttctctgcgccaagacccagccacctcgcccccgaatccttccccgccgccgacgtcgccaccgcctccagaatcacagccgccgtcgccgctgccaccgacgccaaccaccgcatatgcaaatcgctgttgcgccgtcgccctccaccaccgtacagatagtagcccgacgccatgtcttccgccgccgttgccagatgacacggcagccaccacagccgccaccgccgtcgccaactgccgctggcccagtgccgccgccaccgccgtcaccacaccgtcgccgtcgtcgccaactgccgccggcgtccagatccggccgagaccgccgtcaccaactgccaccgccgccgtcgccgactgctcccatcctccagatccggccgagaggcacggatctgggggcaccactgccgtcgccgccaggcatcgagccgccggccaaagcagccgcgcctccgagcctgctgcggccgcccgcgcctgcgccgccgtcgcgcctgccgccgactaacgcggctgtccgcgcctgacgctgccgcccgaccgcccgcgccttttgcgccgccggcacgcctgccaccgcctgtcgtggccgcctgcgcccacgcctcgccgacgccgtgccggcgcctccgcgaccggatctagctgcgggtgcgccagatctagtggtggcgacgctggatctgccaccatgcacctcgacgccggcgccgctccggtcggccaccgcctcatctttagttccggattgtgcgtc

SEQ ID NO: 70996 - DNA, 306 bp, Oryza sativa
  Clone ID: PAT_MRT4530_71512C.1
atggagaggaggagcgagcctccttttccccctccagctgcaaccaccaccgccttccctcccgccggatctagcggaggagaggacaccgccaccaccgctaccatcgccaaaggctgccacctcccctcccgccaaatctggcagatgggagaacacagcccctgctgccatcagaggccaccgcctccctcatcgtcggatcaggcggaggggagggcacgccgcgcgcctgctgccacggccagcacctgccgccccaccgcctgctgccgcctgcccaccgccgtcggctgccggatgtga

SEQ ID NO: 70997 - DNA, 1068 bp, Oryza sativa
  Clone ID: PAT_MRT4530_71513C.1
cacctgcgaatccacagctgacacaccgatgctccaccaccacacaagctctgccgacatgtggaacccctgcaccggcgtcccccgccggccagccttcgtgcgccaaagaccgcgctactcctatcggcagctcctcctcacacctaggtcgcctcctccaccgccggccacgccactcacgccaaaccggcctcctccaccggacgcgcctctcgcgccattccggcctccctccatcggccgcgcctctcgcgccaagccggcctccatctccgccgcccgcgcctctcgcgccgagccagcctccgctgccatcgactgcactctactgcgccaagccggtctccgaccccttcaccgaacgatgccgcgccggccagctacagccgtctcccatgccctcggttagtcaaccgaggccgccatgcctccggtgaccgcaaacacggtcaccaccaccacagccttggttgccgaacacccagccacctcgcccccgactccttccccgccgccgacgtcgccactgcctccagagtcataaccgccgtcgccgctgccaccgacgccaaccgccgcctctgcaaatcgctgctccgccgtcgccctccaccaccgaacagctagcagcccgacgccatgtcttccgccgccgttgccagatgacacggcagccaccacagccgccaccgccgtcgccaactgccatcggccaactaccgccgctgccgtcgccacaccgtcgtcgccgtcgccgactgctcccatcctccagatccagccgagaggcacggatctgggggcaccgctgccgtcgccgccaggcatcgagccaccggccacagcagctgcgcctccgagcctgccgctgctgcccgtgcttgctccgccgtcacgcctgacgccgccgcccggccgcccgtgcctgcgccaccgtcgcgtatgccaccgcctgtcgcggccgccagcgcccacgcctcgccgacgccgtgcccgcgcctccgtgaccggatccagctgcgagcgcgccagatccggtggtggcgacgccggatccgccgccat

SEQ ID NO: 70998 - DNA, 1212 bp, Oryza sativa
  Clone ID: PAT_MRT4530_71514C.1
atgtgggacccttgcaccggcgtcccccgccggccagccttcgtgcgccgaagaccgcgccacacccaccggcagctcctcctcacacctaggtcgcctcctccaccgccggccgcgcctctctgcgctaagccggcctcctctactggacgcgcctctcgcgccaatccggcctccctccatcggccgcgcctcccgcgccaagccggcctccatctccgccgcccgtgcctctcgcgccgagccggcctccactgccatcggctgcacttctctgtgccaagccggtctccgacccctccaccgaacggtgccgcgccgaccagatgcggccgtctcccacgccctcggctagtcaaccgaggccgctatgcctccggtgaccgcgaacacggtcaccaccaccacagccgctgctgccgaacacccaaccacctcgccgtcatcatccccacctcgcacccgactccttccccgccgccgacatcaccaccgcctccgcaaaacctttgctgcaccgtcgccctccaccaccgagcagctaacagctcaacgccatggcttccaccaccgttgccagttgacacggcagccaccacgtttccgcctgcccactgccgccgccgccgccgacaccacacagccgccgtcgtcaccaactaccgccggtatctagatccggccgagaccgtcgccaactaccgccggccgtcgtccttgtcgtcgccaactaccgccggccgtcgtcatcgtcgtcgccaactgccgccggccgtcgtcgtcgtcgtcgcccactgccgccgaccaaactgccgctggccaaactgccgccgccgtcgccaactgccgccaccctgcagctccggccgagaggcgcggatctggggggtaccgccgccgtcgccaccaagtaacgtgccgtcgccgccacgagagcaccaggccgccgcctccgtgccatcggccaactccatccccgccgccatcgccatccccgccgccttcagccaccaccgcccagcgtcacgcgcccttgacatcgccgtcgccctccccgccgccgttgcccccaccctcgccgccgctagtcgctaccccgccagatccggccggagcgggctggatctggtgctggatcgagttgggctgggcgtcaccggcgccggagttataggagaaggagctcaggcacaaatcttggtgcgaatttga

SEQ ID NO: 70999 - DNA, 1770 bp, Oryza sativa
  Clone ID: PAT_MRT4530_71515C.1
atggcgactgccgatggcggcggcggcagcgacagacacggcgtcagggcggctcctagcaccttgctggtggacgttttgctggtggaggccgactccttcccctttactggtggagggcaacggcgcagcggcaggacgttttgctggtggaggcagactccttccccttgctggtggagggcgatggcgcagcgacggtttgcggaggcggttgctggcgtcggtggcagcggcgatggcggccgtgactgtggaagcggtggcgacatcggcggcggggaaggagtcgggcatggcggcctcggacgcctagccgagggcgtgggagacggctgcttctggtctgcgcggcatcgtttggtggaagggtcggagaccggcttggcgcagagaagcgcagccgatggcagcggaggccggctcggcgcgagaggcacgggcggcggagatggaggccggcttggcgcgagaggcgcagccgatggagggaggccggattggcgcgagaggcgcgtccggtggaggaggtcggcttggcgcagagaggcgcggccggcggtggaggaggcgacctaggtgtgaggaggagctgccggtgggcgtggcggtcttcggcgcacgaaggggtgtgatgttcctgtacttgtaccagcagaggagcatggcgacgcacctgcggaagatgtagaacctggacctctgctcccgcgccgccgcctgtaggcaggaggcctgcatggcgaagtcatcgaagcagctgatgacgcactgctcgatctccacgcccagcgcctccagcgcggccagcgtcgacggcagcagctcggggatcgccgcgcatgccatctcgatcctcgtgcttccgttctccctcctctccacctcgaacctcgtcgagtttctgataagcggcgtctcttcgccggagctcgacgacggcggaggcttgagcgtgttcagcttcagcatggagagattctccgtggaggaggaggatgagtcaccggtggcggcctcgacctggaggttcttgatccgatccatcagctccttcacgtagccgatggtgtcgccgagaatcgaggtcctgtccatcttgctgatcctaggcacgacggagcggagcatggagaggcggtcgttgagccgcttccgccgccgccgctccgccatcaggttcttggacggcgcgcctggttgcggcggcctgcagcttcttgggcggacgctcgccgccgcgccgccgccgccgccgaacacgaacatgggcgccagctcgccactatcaccaccgcctccagcgccacgtcgcgccttgcatctctcctcctcctccaccgccgccaccgccaccgcagacgacgcagcttcgcgtctcggatccatggcggccaccatcacctgagcggcggcggtggcacggacagcgccgcctgatctcttgtacgggttgcacacttcacccaagcaatcaattgaatcaaactcaaagctgacctcgtgcagaggcggacaaggagtcgtcgtcgtcagaggcacaggcagtgggaacgacggcggcggcggcgaggcaagcgtgttcctcgcgttgccgcccccgacgaggaggtcaccgagcatgacgccgtcgccgcacatcgggctcatcatcatcgggtacgcctgaagccacagatcttccggcgtcgtcgtcggtgtgcctctccggagcggcgccatgagctcctccaggagggacgacgagccgtcgtcgtccattagctccat

SEQ ID NO: 71000 - DNA, 1775 bp, Oryza sativa
  Clone ID: PAT_MRT4530_71516C.1
aattgggacggttataagaagaataaataggtcagcagctattgaggtatacagtactgagccagaattcagctggctttcgtttacttgtagcagccacaggcagacgctttcgtcagaagtaaatggttataatgcacacaacaacctgcagcacctataattctaacatgctaatcgcttctgctcacacaaacaagacagagaaaagatagcattacatccacaccaactacatatacaaccattatcatatcaaaccccaagcttgtcttgcttctccaggagcatcaaagaccacaacgtctgcagacttcttcatggacctactcaactggaacacagggtgcctgcaaagcctctcgacacctttcctaaaactaaatttgtcgaacaggccttccacatttctgttgccaaattcttttccagggctgctgacttggttattcgaatcattaccaagaggagaagcttcgctatggcgcttcggttggcctatgtcatgcttctccggtccttcaaatttgttgttctcacgatgatcaaggaattgtttaggtccaaacagcagctgatcacaagtagccatatcaaacataggtttatctatgcctttctgatctgaacaaatgatgggtctctccaaattctctggcgtcggaggtttatcttgtccgtttggagaaccggagcatggttccgttgtcttaggtgttccggctgcctctctttcctttaaagtcttcaagatcaatgtcttgaggaaattcatgacctgaactgcatgtatcagggcagtcaatggatcggccatctgagtcatgtttggcgcaaagaccatagcgatgtttctagcattcatcttgttgtagttttcatgctccacaacatcagccatcagattgatagcccaatcgagtaatgcggcttccactggtggtagcattgaagcaaggagagcacagtcctcttctgtgttgcaatgcattacttgttccggtgtcagtgagtccaatacaccggttgggagttcccgaaaccatgcctttatcaaccctgcaaggcagtgtaagtcaacctcatctggaaccacaccactgtttagttgtttcctgacacagatttcctggctattctctgcgttaattctgaagatcccttcgatcttaagtccctctcgttcatacaacttcctctgcatcatcaacagtattgtgggcacgctatttcctttgtgatcaaatgaacattgcaaagaggttggtgaaacaccaaatacatttacactggcgctgggcgtggggctgggaacttcgggctcgaggtcggcggggaggccgaggaagccgccgaagcggtcgaaggtgacgtgggagacgtgccgcacgtccgtgggccgcccgatctccatcccctcctcttcctcgtcctcgctgtcctcctcctccccgaccttcccggcgctgcacatcaccagcgacctccgcagcgcccccaccaccgccccgaccagccctccccctcccttctccgcctgcatcatcagcggcggcggcgagtccgtcccgtcgtcgctcagtatctcctcgtactcgaacccttcctcgtcctcgtcgtcttcctcctcctcgtcggaggagcgcgagggggacatccggaggccgaagcgcagctggaatggcgccatgacgcggctggtgcgggagtcgtagccgcgcgcgcgggtgcggactgcggagaggatggaagcgaacgaggcgggtggcccgatg

SEQ ID NO: 71001 - DNA, 106 bp, Oryza sativa
  Clone ID: PAT_MRT4530_71517C.1
acgagggcccagatccgctatgatgtgcaatgccatggacctgccagtagtggaggacaaagttggtgccatggctctaatgcatgatagtcattgctgtgaaccg

SEQ ID NO: 71002 - DNA, 599 bp, Oryza sativa
  unsure (1)..(599): unsure at all n locations
  Clone ID: PAT_MRT4530_71518C.1
nngcccccgccgcctcgctccccatccacagtgcacgccacccgctctccctgctcccgagcgcaccgaagaggaagccctagctcccccacaatccctgcccccaagctctctccatcccgcgctgccatgcccaatccccctccggagatctgggcgtcggcgtgaatcagatcggggcggcgacagggagttcgaagcacgaagtggcggcatcgaaccggaaaccccacggcgagcgccatcccttcccgcacttgctcgatccctcccctcctgccgcagtctgcagccatggcattccgatgtagtgggcttcgagctcgaaggcggcgggcaggcctgcgcgagcaccgggggagcaggagctgcggccgtccaagtcgtgggggatcctcatcttcgggcttccgcctcattggcgccaccaccaccaccaccaccttagtggtgagaagctctgcttttgacgcgccaagcatgctagctttgctggtttagtttgacgccttccgtgatgactgattccatttagttgtggctattaatttgctcttgtgcctgcaattcagcatcaaacgctccaattaagctgtttg

SEQ ID NO: 71003 - DNA, 265 bp, Oryza sativa
  unsure (1)..(265): unsure at all n locations
  Clone ID: PAT_MRT4530_71519C.1
cgattggcccagcccatgaaaaccatttccctgntaccctangaaacccttttgntgattatgaccaccaaactgccatgccaataaattgaaccgccttgttcgntggctccacctggtggtatttttgtatccattcttgaagtgggaggattttgntaagcgaaattttcttctccggatttcgtcggattctccacttttgattttctaatcatgcatctttatatgggtcacccaaaaaaaaaaaaaaaaaaaaaaaaaa

SEQ ID NO: 71004 - DNA, 729 bp, Oryza sativa
  Clone ID: PAT_MRT4530_7151C.1
tcatctagtcgcttttttaacactaaggttaatagagtaatatacccagagaacactcctgaggataagacattgttgtttgttgttgttgcctctgttggtgttgtcattctcgtctcctccaataccgctgccaacatgttcaccgttgacgcctccaccagtcgacatgttgatgaagatgaagtagacgttgacgaatattgagtagtcacgccttgcactccccaaaaactgtgccacgatgggaggctcagatctaggtggaggggagacgaccggcgggtggcggcggcggttcgtccacagtgagggcgacaagataagcagcgtcgagctctctcccctctccaccagcgagatcgagcctccaccaccgctataggtgtggatccggcctcgttctcgccagatactatgcgagaacgacaagggcaaggaggagacgacgacctcgacggtgttagtgaccgcgaggagcaggaggccactgtgaaccggtcgtcggcggtgcccaagaccatgtgtggcggccatcgggagcgcagatctggcaccaatgacgataagtactcccttccaaaggaagtacttatctccgtcctcgtcaagtcctccctcgctcctccgtgcaccctctggagctcgggcacccaattgctgcttgtgtgcactctcgacgtccactgcttgcgtgcttgtgtgcaattgtgcatgttcaatagttga

SEQ ID NO: 71005 - DNA, 1788 bp, Oryza sativa
  Clone ID: PAT_MRT4530_71520C.1
gcacgaggacgtctaccatggaaccaccgcgcgcgtcacgttgcaacgggagagagagcgcgtagtcggcgtcttttctatccaggttcattgtaatgggtcatattcttatttagattgagttatcggacgcgtgggggagtacgcacgcgtagcaaggtctctcttacactataaacaccaaggcgaagcagccgcatgagtcccacccacctctcctcccccggcaatcaaagacacaccccaagtactcgatcgcctgtgtagcttcttccctgatcgtgccatgggctcctacgttcaaggcgaggatgaggttcccgtgtacgaatctggagcagagatcgtccagaagctgcaggagaaatggaagtcgacggcggcgccgttcccggcgatgtactcgagcgtgctcggcggcatcatcctggacccggcgatgatgtccgtcccgctcgacgaccacatggtccaccgcggccacggcgtgttcgacaccgccatgatcctcgacggccacctctacgagctcgacccgcacctcgaccgcttcctccgctccgccgccaaggcccgcatcggcaccccgttcccgcgcgacacgctccgcagcatcctcgtccagatgacggcggcgtccaactgccggagggggtccatccgctactggctcagcgccggcggcggcgacttcctcctgtcctccgccggctgcgccgggccggcgttctacgccgtcgtcatcccgaccgactactcccagtgccgccacggcgtgcgcgcggtgaccacgtcggtgcccatgaagccgccgctgttcgccaccatgaagaacgtcaactacctccccaacgtgctgtccatcatggacgccgaggaccgcggcgcgttcgcgtcggtgtgggtggacggcgagggcaacgtcgccgaggggcccatggtgaacgtggcgttcgtcacggccgccggcgagctggtgctcccggcgttcgacaagatcctcgccgggtgcaccgccaagcggctgctcgcgctggcgccgaggctggtggagtccggcctcctcaaggccgtcaccacccgccacatcgccgccgacgaggccaagcgctgctccgccgagatggcgttcgtcggcagcggcctccccgtcctgcccatcgtcgagtgggacgaccagctcatcggcgacgggaaggtggggaagacgatgatggcgctgtcggatctgctctgggaggacatgaaatcggggccggacaggatcgcagtcccgtacaagtgatggattattggagttgggtgaggctcctcgggcgtacgtcagaaagaggtgtgctaccgacgtgtggattcatgacggtaagcttcacctgttagggattcacgtctcttcgactttatatgagaggagctacgtccatcggagataggaggagaagggcaacgtgccgagtatatatgtgtagtgtacgtacgcgtgagcgagctgagatggatatgatgcagtatcgtgtcgtttcgtttcgtttctccttgtgttcatgtgtggtttgtatggttttttatctgtacgtgtcgtcaatgtaatccttgtattttgcggtgtatcagtactgtatgagtgtatgtgtttatcgattgatcattaagtgaatgaataatggattctctcgatttcaaatgtaaaaaaaaaaaaaaaaaaaaaaactctaaagacccgtgccggttccctgcagccccgaagaaaaaaaaaaaaaaaaaactggagactagttccctcgtgcg

SEQ ID NO: 71006 - DNA, 1354 bp, Oryza sativa
  Clone ID: PAT_MRT4530_71521C.1
gcataacttaattcataaaagtaaagatttgagaatttgaaatcgtttaggatactctttgaaatagggcagatcactagagcctcgccaattgtgcccggaacccctcgaggtgttcgtctgttacgcacgacgccaccacgttgacgccatggccgtccatcatcgagcacggcgcgcccggggagatggacggcagcatcttcacctccgagtaggggatcacccgcgccggcctcccgccgccgaagtcgacgccgtcgagcccgagccccgcccagctcgacgcgtacagcgcgccgtacccgcacagcgcggcgacgagctcgccgccgccgctgtcgtcgagcccaagcgtcttggtgctgaggagcaccgggatccgctccttggcgtccttgatcagcttcaccaagtcgacgacgtcgccgttcgccaccgcgtcggccgtggcgaccaccacctgcgacatgatgcagttgccgtagtacccgtccttggctccgacgtgcttccgcacgttcgccgcgaacacgagcggcgcgagggcgccgccgccgtggccattgatggcgcgggtccggcactgccacatcgccgcggtgaccgcctcgaacacggagcaaggccggtcgccggcgtgcctgctcccgaactcggccttgacgcggttgacgaagctccacgggatgatgacgtcgcagtaggcgaagtcgacgtgctcaaattttacgccggcggctagccgcttgaggaggatggtggcaagctgcgggatgtcaggcagcgactcgtcgtacctgaccggcacgacggacggcgagtggagaccgcgggcgagctcgccgacggcgcgtagaaactgcgccaacccgcacgcgtcggcgacgccgtggttccacgtcgccgcgacgacgaacccgccgcacgcgaactccgtcacctgcatcatcatcagcgggtcggacgccgcccggcatggcccgccgtaccggacggcgaggtcggcgagcgacatgaccaccggtgctccgaggaagttcacgtcctccagggtgcagttcgccgtcgcgcggacgaacaccacgccctcgccggtgcacgagaacacgacgtcgtcgccgctgccggcgaggcggccggcgaaggggtagtagtggaccagggcacgcgacagcgcgcgcctgatggtctccgccggctcgtcgacgccgcgctcgaacacgtggaacgacgtgaacgacatgcccaggcgtgtcatgtcagtggaggttggccggatggtcgccgccggcgtcggctccgacgggcggacgagcaccgacggcgacgacttggttaccacgaacgtcat

SEQ ID NO: 71007 - DNA, 293 bp, Oryza sativa
  Clone ID: PAT_MRT4530_71522C.1
tccaaattaatccacttggaatacccacaaatcacacgttgaaggggaaaaataacccaatgcaatgaaaaaggaaatttggaaaatgggagaaccacatggaatctgggtgctgcaaaagaaaaggatgaatgcacaaggtatacttgcaaagcggcagtgcaaaaggtgcaacatctgtttggtaaccacatgtgcacatggaatgatggtgcaatggtgcacaaatttcttaccagcttcaagaagcttaggagactcttgggtgagattaacatgaatgatcctgttat

SEQ ID NO: 71008 - DNA, 688 bp, Oryza sativa
  Clone ID: PAT_MRT4530_71523C.1
gaagaacggcacgtccgatccggccgccaaatccgccgccgcgcgcggccggcgacgtgcggcgcatgcacgtacaccgcgcgccgccggcggtggtgtgcacgcgagtgtcgcgcttcgcattgcgttgcacgttctgcgcaccgtagcggtggcgcaggacgacgtggacggtcggcgcgcgagggccggcgacgggcaccgtcgaggtgctcggcgacgacctcttccgcctcccttcccccgccgccgcgctggtgcgtgccacgctcgcggacaggtccttccgcgctcgccaccacacgccgccggtcttcctctctgcggcctccgcctccggcctcgttcctccctggcggcggctgggcctccgcctagtgggagctcctcctgctccgcaaccacggcgttgcgaagaagctcgccgtcgccgacctcgcacacctctcgccccccgcgccgtcgctatcctccatccccgcgtcgccgcccaccatgagctccggctgcctcctccacgggcggccaaagggaagaaaagggcggcgatagctggatttgggggaatcggctcgcctccgtccccagccgcgtgaaagagctccgccgctggccatccgagtacgcgcatgagagagagagagagcaagggggctgggagaagttgggttaaacaaagggatgacag

SEQ ID NO: 71009 - DNA, 462 bp, Oryza sativa
  Clone ID: PAT_MRT4530_71524C.1
ttagatggcacggaagttgacagccacgcagcgagctcgagcgatgactcgatgacgtcgtcgttgcaatgctgaatggcgtagcttgatggcggccctcgcccctaaccatcttgacaggctcgacatcagccatgtcatgagcctgccgcatatgtcgaatcttgttgttgcgatcggcgaaaaggccagagtgccggatcttattgtcgcggacagcgggaggcagcggagggagcagggagctcgttcccccggtgaggacgttgtgtcggtggaggtgaggactaggggtggaggaggtcgccggcgtggatccataaaggagatcggctccggtctccccccagcacccttaggccacgccggctcccagatcttggcccgctgaagccgtctaccgccgtccccccgctcgatctcgtcggcgctgtcgtcctctcccgcctccttgccggccat

SEQ ID NO: 71010 - DNA, 1860 bp, Oryza sativa
  Clone ID: PAT_MRT4530_71525C.1
atgctgccacctgcatcgccgcctgctgtccgtcagtgcctctccttcacctcccaccgcatcgctgcctgccgccgagaggcgcccctcatgaagggagagagcgaggaggaagaaacgcaggcactcacagcacaaagcagccacatccaccaagaagcacacaccgcagcggcaccaccgcacccagggctcctcactcctccagggggcggcgcaacagcacgcacgccagccgcggccgcgtccgcggccgcggcgtacaaggccgctgccgccgcggccgccgtgggggcgaactccgccggcggcgtcgacctcaccccggccgccgcgcggcgcaacaagaagcggaagctccccgagaagcagctccccgaccgcgtcgccgcgctgctcccggagtcggcactgtacactcagctgctcgagttcgagtcccgcgtcgacgccgcgctgcaccgcaagaaggtggacatccaggaggcgctcaagtcaccccccgcgctgcagcgcacgctccgcatctacgtgttcaacaccttcgccaaccaggcgccgcgcaccatcccgccgcccaagaacgccgagccgcccacctggtcgctcaagatcatcggccgcgtgctcgaggacggcgccgagctggaccccgccagcgtcgtgcccaagcacaaccctgtgtaccccaagttctcgtccttcttcaagagggtgacgattgcgctcgacccgtcgctgtacccggagaacccgctgatcatttgggagaatgcgcggtcggccgccccacaggaagggttcgaggtgaagaggaaaggggataaggagttctccgcgaatatccggctggagatgaactataaccctgagaagttcaagctctcgcagcctctgatggaggtgctcggggttgaggtggacactcgttcgagggtgattgctgccctctggcagtacatcaaagcgaagaagctgcagaatccaaccgatccttcgttctttatgtgtgatccacagttgaagaaggtctttggggaggataagctgaggtttgcgatgctatcgcagaagatatcacagcatctctctcctccgccgcccatcaacttggagcataagattaagctctctgggaatggcgcgcatgcgagtgcttgctatgatgtgattgtggatgttcctttccctctgcagaaggagatgtctgcatttcttgccaacactgagaagcacaaggacattgaggcatgtgatgaggtgatatctgcttcgatcaagaagatccatgagcaccgcaggaggagggcattcttccttggtttcagccagtccccagtggagttcatcaatgcactgatagcgtctcagagtaaagatttgaagctgatcgcaggagaagcaaataggaatattgaaagagaaagacgtgcagacttctataatcaaccatgggttgaggatgctgtcataagatacctgaaccgcaaaccggctagcggtaatgagggcccaggcggtggtgctggtggttcatgaggaaaggggttggtattactgtagtgccattttggtgtagaaacaagctatctgttatgtactagtaaaaattcagatatgttagcgacaaccgatttgtttgctgctgtgaatgatcttggcaggtgtacctccattgtctgtccaaacgagttatctacttgtatgattatgtgataagtgatccctaactacggtggcagtatgaattgtcatgctaattgctaaatgctgaagggaaaaagctctgttctagttaaaaaaaaaaaaaaaaaaactcgagactagttctctctctctctccctcgtgccgaattcctg

SEQ ID NO: 71011 - DNA, 268 bp, Oryza sativa
  unsure (1)..(268): unsure at all n locations
  Clone ID: PAT_MRT4530_71526C.1
aattccnatggggctggtgaatttggggtcactggctnccttctttccttaattttaataaggtatccacccacattagatagttaacactttggtgcacaacaacacaagagattaccattacatgcatggattcaactattcataatttctagtgttcttatattacaaagcaccaacatccaatttttacttaacctccccttcttcctaacttatttttaatctttcttaatcttaaagagaagttgttttttccataccctac

SEQ ID NO: 71012 - DNA, 333 bp, Oryza sativa
  Clone ID: PAT_MRT4530_71527C.1
ggcccttatcaaaagattttatgatttgttgtttgataattgtgtatgagagtactgattttattttgatagtaaggagaaaatagtcccggggggataaaatttttttaatggggggttttttaaagtgataaaagaaggtggacgcacggggggatctgtattattagaaaagagggttttaacttcacaaaaaaaaggggggggaaaagagggcaaatggtaagattggtaaactggaagaaggagcagagtggggggccaaggaagctcgggtgcatactgggggaaaaaaagtttggggttgttattaaaaaaagaaaaatgagtgtt

SEQ ID NO: 71013 - DNA, 167 bp, Oryza sativa
  Clone ID: PAT_MRT4530_71528C.1
tttgttgttttgttagaaaatggtgcatccactatttctccagccaggattacgcaagaagaccgctggccagggggaaaagtagaaaagcatgagcaagatacgaccacacacatgatgttggcacttacaacaccatacgtacgattcctccatctaaaaacgaa

SEQ ID NO: 71014 - DNA, 316 bp, Oryza sativa
  Clone ID: PAT_MRT4530_71529C.1
atcagatgatggtatggaaccaaattgattacagaagagttcatggggttagtatgactgcatacatcatttcaaccgggcaaacttgagttctttgcattctgcagactgcccaagacactgttgaataacttctcttcatctgaatctgaatctgaatctgaggtcatataagaatgttttgataagcttgtagccttttctgcattttctgtgatcgaattgtcaccaccattacctctgttgattctagagcagtccactataccaccaatgccgtgctgtttcttgctagaacaaatagtcttactagtgt

SEQ ID NO: 71015 - DNA, 177 bp, Oryza sativa
  Clone ID: PAT_MRT4530_7152C.1
atggtgagctgcttgacggtgtcatgtggtggaggtgcaatacgaggcatcggcggacgagctatcgagtcgccgtcggccgctctgagccttcgcgcctccgcgctgctactccctgcgtccatccctcgccacgccctgccgcaccggcgccgcttcctgcaccagatcgagtag

SEQ ID NO: 71016 - DNA, 300 bp, Oryza sativa
  Clone ID: PAT_MRT4530_71530C.1
atgacggttgggacgattggaatggtcggtaataccctccaaccgccattggggatcaatcccagctgtccgtccaaaccctgcatccatcggcgccacgggtggttcggctgaaccctatggttcggccgaaccatgggctggcccaacccagcccatcttcggctggcggcctcctttgttgtccttcttcgtagacttgtgaattttggcccaatgtgtcgtgttatttctgagttcttggcccattcatacataagtctagttctcgacaccatccgattgatttatcgtcggagt

SEQ ID NO: 71017 - DNA, 300 bp, Oryza sativa
  Clone ID: PAT_MRT4530_71531C.1
atgacggttgtgacggttggaatggtcggtaatatcctccaactgccattggggatcaatcccagccatccatccaaaccctgcatccatcggcgccacgggaggttcggccgagccctatggttcggccgaaccatgggctggcccaacccatcccatcttcagctggcggcctcctttgttgtcctccattgtagacttgtgaattttggcctaatgtgtcatgttatttctgagttcttggcccattcatacataagtctggttctcaacaccgtccgattgatttatcgtctgagt

SEQ ID NO: 71018 - DNA, 593 bp, Oryza sativa
  Clone ID: PAT_MRT4530_71532C.1
aaaaaaacatttctacggcaaaaaaaaaaataaacctacaaaaatggaaggaggcccgggtcattcacccaagcattattcatggaagggccatttatacaaatatccaaaacttgggcccgaaaaacccttaaaatttgaaacccctgagcatgcttatctaagttttttttaccagggatggaattaaggaactataagctttcgcaaacaaaatcctttttgttttaaaacaaaaaacctatttccccatcatccaagtgggcccggaattgttaaaagttcggaagtataaaaaaaagcatcaggcctttaggtgtttttaaccaagggggggggggggagcaaccccaccaggagggggcagcccaaccatcacttggggggggggggagcaaccccaccagtagggggcagcccaaccatcactttgaaagcgtaaaaaagcccccactggcctccagggaaagtcccgatcatcacgaaacccaaggggggcccacgcgtaaataaaccccacataccaagtttattcacagaatcgccaactggtgcgccctcggacccgtgggtcaacccggaaattccggacc

SEQ ID NO: 71019 - DNA, 435 bp, Oryza sativa
  Clone ID: PAT_MRT4530_71533C.1
aagaatggggggctaatcaggcatttgattcagggtgaatacaccaaacatatgggtccaaagacacaagtgacaaccacaggtagcccttggtttcaccgtctttgaatagaagaaaatgctaacatataggcccgatgtaaactttgtccacgctaatgaataaacagcatcgcaaagagagaaacaagcaggatgactggccataacacctcctcttggcttatcattcttgggttcgaaaaattagaagcattacctgtgcacattggatgggccagactcatcgtactcaggctggacaacccacatctggtggcatgtgctgagagatgccaagatggatcctccaatccagacactggacttcctttcaggaggagcgaccaccttgaacttaatgcctctaggaaccaaggcagagatctccttgct

SEQ ID NO: 71020 - DNA, 1483 bp, Oryza sativa
  Clone ID: PAT_MRT4530_71534C.1
cccacgcgtccgcccacgcgtccggctagcttggatatatagaatgatgaagaacatgatgagcagcgctactgttcgtccgtggctgatgatgatgatgatatccatagtaacattattattccaagtgcagcagctggccggcgctcagctgcagcggcaggtggcggcggtgttcgtgctgggtgactcgacgctggacgtcggcaacaacaactacctccccggcaaggatgtgttcagggccaacaagccgtacaacggcatcgactaccctgcctccaagcctaccggtcgcttcagcaatggctacaacgtcgccgacttcatagcaatgaagctggggttcaagaagagccctccggcttacctgtcgctgctgcaggggcctgcagctgcagccaatctcactctcgccatcaaagctctcaccggaggcgtcagctttgcttccggaggagccggcgttctcgactccacttacgcagggaaatgcatcccgctgtcgacgcagctgcggagcatggaggcgacgagggcggccatggtgtccaaggtcggcacccgcgccgtcgccgcccacctcgcccgctccttcttcctcctcggcgtcgtcaacaacgacatgttcgtcttcgccaccgcccagcagcagcagaaccgctccgccacgccggccgaagtcgccgccttctacaccaccctcatcaccaaattctccgccgccctcacggagctgtacgagatgggggcgaggaagtttggcatcatcaacgtggggctggtcggttgcgtgccgctggtgcgagcgcagagccccaccggcgcctgcagcgacgacctcaacggcctcgccgccggcttcaacgacgccctcgcctccctcctctccgacctcgccgcgcgccttcccggcttcgcctactccatcgccgacgcccacgccgccggccagctcgcgttcgccgaccccgcggcgtccgggtacaccagcgttgacgccgcgtgctgcgggagcgggaggctgggcgcggaggaggactgccaggtgggctccacgctctgcgccgaccgcgacaagtgggccttctgggaccgcgtccacccctcgcagagggccaccatgctcagcgccgcggcctaccacgacggcccggcccaattaaccaagcccatcaacttcaaacagctcgcccgcaccactgcttaattacggactactacgtactcttattttatttgttagtgtatattcagctagcaaattcaattcactcaatatgagagcatcgtaatgtaatatatatttgttcatgtatgcatatgcgttgatttttcttttggggcgaagcagtgtgtacccggaatgaacgtacacaccaattttgattttttttttctaaagaaattgtgatgtaattttttttagaatttgtgatgtatttggagatgatcgatttgaccatcttggagatatcctatt

SEQ ID NO: 71021 - DNA, 513 bp, Oryza sativa
  Clone ID: PAT_MRT4530_71535C.1
atgagtggcatctacatgaattaccccaagaagtgcctcaaggcctaccaccgtaggtccaggggtgcctgccttcccacaccacccccacacccgaccgtcatcgctgcccttggtcgaccgcctccgcacgctcctttgttcccccagattcactcaccacgctgtcgccataccaaaggtggaagaggaggtgacatggctagaggaacggcgcctagaggccatgcatcgccgcctggctctctccctgctgcccaccaccgaccaccttggagaaaaagagaagaaaagagaagtggaaggaagaaaaggttttacgtggatgtggagcgccaacgccgccgctctagctcccgccctgcagctagccactgccacttcggcctcacccaccgccaccgctctagtccctgctccccacggacggccaaagggaaagataaaggaagagaaagagagggagataagggagagggagggagggaggagggaaggagagaggacatgtga

SEQ ID NO: 71022 - DNA, 1101 bp, Oryza sativa
  Clone ID: PAT_MRT4530_71536C.1
ggcgatcgtagaggaagcgaccgatcagcgcgcggggaccgcgccgggagacatggtggaagccaccacgcttcacccaaccccaccctcctcctccaccaccgtttaaccgcttcgtaggctacgacccaacccaaacccaagcgagctcgcgatcgcgtcgcgcgcgccatggggacggaggtgctccgcctgcacgactgcctcgaccgcgtccgcgcccgtccccacgccaccaggcggtctccgcgccagcaggcggcccggcggcgcgacgcgcggccgcggggcgggcaggcggcgccagccgtgacgcgggtggtccgggtcaaggtggcggcggcgggcgcgggcgcggacgcgtacgcggggccggcgttcgggtccatgtcgccgtcgccgcgggcgcttccgttgccgcggttctcctcctcctcgtcgtcctctagggctgccgctgcggcggcggcaggggtggacgactcggcgacgcgggagctccggcgcctgctgggcctccactgatcgacgacgaggagccaaaagaacaccattcgagcaagaagcgatcgcgcgacgcattcagcaagaaggggattagcatgtgcggctgtctctctacgactcttccatcgattcatctcgtcctctagctctccctccctctccaatggcgccgtcaaggccatggcccgcgcacgtacatacctctgcttcgatccgcctgccttccctgccgtttttgtaagggcaaagcttggcgcgaagcgagggcgcgtgcccgtgatctggagccggtcgtcggagagggagagaatggcattgtctggaagatttgatgtgatctagatgttgttaatcgaatcttgacttcaaaggaaaattctttagatgtgctcgtgtgctgctggttcgtgctaattaattagatgcttgaatgaatgtaatatcctcccttcccttttaaaagctcggttaagtcttaagatcctttggtttgatttgtgttggaagctaggatgagaattttttttttaacgaaccggcgagcccccaatttcattaaataccgcccaagtaaaactgtacatgcgcaagcgc

SEQ ID NO: 71023 - DNA, 453 bp, Oryza sativa
  Clone ID: PAT_MRT4530_71537C.1
agaaaaaaaaagtctcaaagcgacttttaatataaaatggagcaagtataacatacatagaagtagccatatttgggttaattaaaacagaggtaatagaaaatgggacttccctctttctgcgttccctctatcaagtaacgctataacatctaaaatgaaaatattataattccaaacccagaactactgcaaactgacaacctaatttgcttacgcagatagtaccgtgcaagtaccgaacctgtctgaattggaatcggcagttgtagtaagcaaactttcccacctggcaccgatgaccgatccatcgcaacgctttcaacctctcaaaccaacacgatgatgagcccaacgatacattaaactaagacgactccagctgatttgagagagttaggtccagcagctgacacagcagagcatgaggccatttgcacacgagcaaacgat

SEQ ID NO: 71024 - DNA, 348 bp, Oryza sativa
  unsure (1)..(348): unsure at all n locations
  Clone ID: PAT_MRT4530_71538C.1
atgctcctgtgcgaccgcccgctatgcgggctccgaccgcaggatcgccgtaccctcgaggacgtgctacctcgcagtagcgcgcccagagcgatgcagacgttcatcgacgcggcagcccattattcccgcgagtggacctccctcacggctctgcccgccgtcagccaccgcgtgttccgcgctggtgatctatcggtgtaccacaccgcccatgtcccccccgggttcgtcccccggatccggctcgccggcggcggtagctgcgagccgcaccgggccntgccaggacgtcttcgccgccttcacgggcgcaaggcggtctcctcagattcccctttaggctag

SEQ ID NO: 71025 - DNA, 481 bp, Oryza sativa
  unsure (1)..(481): unsure at all n locations
  Clone ID: PAT_MRT4530_71539C.1
atgggcgacggtcaacgagggacggaaggcggtggatccctcgctctcccccgcacagctccggtggcaggctcgagcgggaggccggcggggctctcccctgccctctcccgcgtggatctagcggcgggcggcgcggtggccactgccgacgaggaggaagaagaggtggccgggaatggcgtccttggccccaccacggccggacccgtgccccccgacgatgacgaggaggaggaggcggcaggcgggcagtggcgccgccagccccacgcgcacgcgcgctgggcggatctgcgccgccctcgccgccggcaagggaggaggaggcggcggccgggagaagatccgctggattctaggttcttgttttttcgacttggtgaccggctcgatcacgctcaagtgcgccgcaccancanccttcaaaggtattacagtaatatattgttacatctccttcaccgggcttctatactag

SEQ ID NO: 71026 - DNA, 641 bp, Oryza sativa
  Clone ID: PAT_MRT4530_7153C.1
tcagcgcgttgttggatgcatcctgtttatagtttactagtttatgcttcgtaggtgatatcgatgctttgcttcaattagatgcttcttgacttcttgtggtggagaaaagtggctagcaactcactatgttttagtatcggttttggttagtgctgcatccaggcaaatatatgtgggcaacacaatgcaccaccacattgggttgtggaatcacgggtgtctgcccctagggggatcaaaattgatggagattgcgcggattctataattagttggtgtccactttacgatttcttcgtttgtgatgcatccatgcaagtatatggtggcttgtggaaattttatcatagatcatacaggtcgcattaatgtgtttagttggatcatgcagcgaatttggagacttagggtctgacagtagcctgtacccgtagaagaggctggacaccaggatctagggaggttttggttccattttgatgatttttctgtaattaatatgaggtgaatagtttccatcttaattactggataaattgtaacacatcgttcttcatttttgtatttttccttttcagtttgtatgcctgctttcagctttcttgcaacatctaattttggagactgagaagcactag

SEQ ID NO: 71027 - DNA, 249 bp, Oryza sativa
  Clone ID: PAT_MRT4530_71540C.1
ggtccgcccacgcgtccggggaggatggaggagatccacaagcaccttctggacgcctactcccaaggcaccaccaacatggacaactccagttcttccaggaatggaggggctccaatcgaaatgatcatggaagaccctgcgcaggatgcacaggattctaaccaagaactctgtgacgccgtgaaggaagtgactgggtcgattcaggaacatgccgacgagatgtgacaactctgctagtatata

SEQ ID NO: 71028 - DNA, 342 bp, Oryza sativa
  Clone ID: PAT_MRT4530_71541C.1
atggcttccaagatcgccatctccctcctgctcgcggcgctgctggcgtgcgccgccgcgagcggcgcggcggcgaggaggctggaggaggaggagccgtcgtcgacgacggctccggccgaggaggaagatcaggaggagccgaaccacccggccgccgtcttcccggagctgccggtgccggagcacgagctgccgccgctgcccaaggtggtggagctgcctccgttcttcccggaggctcaccttccgccgttcccggaggtcgacctgccgcccaagccggagttccccggcgtccccgagttccacttcccggccgagccagaggccaagccatga

SEQ ID NO: 71029 - DNA, 694 bp, Oryza sativa
  Clone ID: PAT_MRT4530_71542C.1
gcacataaacgtctattatattatctgtgcagatttgttctttcaattcagaaggacaaatgctataaagcattacaggtaatatcataaataccatccatgatctatatttgttcattcgttttggtagttgtcttctcccttttgtttcttcacccgctgctgcaggccgcacgcggctgatcatcttgtctagcgagtagacagcggtaagtttgcaattttatctccttgcatgtgctattccaatcaagttctgaaacattctatgaatgtataccacggtgattggagacaaaaaaaagctcgggaccaaatgttaatgctgctttctgaatagctagcagtgtaacacaagctgaatcctcaatatacaagtaatttatattctttagctatctaggaggtagcctaggattctgcatatatagaagatagtgtgcattatgatggaaccttcatgcgtatatacatataatcatttactgacgatatatatgttctgtatgagcattgagctaagtatactcaacatgaatataacctggcaggctaattaatataaattcggtgttctcacaatgttgcattggagctatatgtatagttgctaataattaatccaccaatgtggaaatgaggatcctgagctggcatacaattagtctatctttttttttctacttcgtgtagt

SEQ ID NO: 71030 - DNA, 268 bp, Oryza sativa
  Clone ID: PAT_MRT4530_71543C.1
accacgcataacgaaacacacaaacgaacacaaaaacaaataaataaaaaaaacaaaaacatctacaaacttcgggcgggacaacttaaccaccgcggggttggcggtctactgcttatggtacttggttcccctgattgtactgacgagacttttttggcgattaacgtaactcaaaacatctgtgcgcctcctacgtctcccgcgtttgagccaactcctgggtggcccacttatctcacctgccagcatctccccatttttcctc

SEQ ID NO: 71031 - DNA, 1150 bp, Oryza sativa
  Clone ID: PAT_MRT4530_71544C.1
cgggccgcgggcagcaatattaaccattctctcgatcgagtcagaagctagctagctaaaactcgtctcgtcgatcatcttgtgttcgatacgatctccagttcgttcggtttctttcttgaccatgaccaagcatccgagggacggcgaggtgatcagcctctcgctgtcgctcacgctcggcgctgccgcggatagcggcgagcggaagaagccgcggcgcgggtcgtcgccggcggcgtccgggagtggggacttcgtctgcaagacgtgcagccgcgcgttcccgtcgttccaggcgctgggcggccaccggaccagccacctgcgcggcggccacgggcgctcggtcgggctcgcccccgccacggccaaggggaccaccaagaaggtgcaggagaagccggcggcggcggcgacccacgagtgccacatctgcggccaaggcttcgagatgggccaggcgctcggcggccacatgcgccgccaccgcgaggaggccgccgccgccgccgcggcggtacagatgctaccattatctggtggagggcaccgcgcggggccaaatctggaggtcttcgagctcggacatgttagatctggcattggagccaccacccttgccgtcactaaagaatccgacacaagagggctggggataaacggggcctctagctgccaagcactagagggggggagggcgaacgcgacgtcgggtgtggcggtgagcgaggagtgcaaggcgaggttccaggagctgagggcggggcgggcccacaggttcgtggtgttcaagatcgacgacgcgatgcggcaggtggtggtcgacagggtgggcccacgcgacgccggcttcgacgagctcaccgccagcctccccgccgacggctgccgctacgccgtgtacgaccacgacttcaccgtcagcgacgccacggccacggcggccgccggcgagggcggcgaggcgccgcgcagcaagatcttcttcgtgtcgtggtcgccggcggcggcggacgtgaggagcaagatggtgtacgcgagctccaacgaagggttcaagaaggagctcgacggcgtccagatcgacctgcaggccaccgaccccagcgagctcaccctcgacgtgctcaaggaccacacctcctaa

SEQ ID NO: 71032 - DNA, 300 bp, Oryza sativa
  Clone ID: PAT_MRT4530_71545C.1
atggctggagttcggactttgctcagcagtgtcaagaagagggctggtccaaggaaaccaatcgattgcatgatctacaaaatacatttcaaaaccattgtcagccacggcaagacacacaaaagcccagattcagtaagattgaacttaagaacctggataagagcacctggcatccatgttagaagaatgaaggttccccaattatggcaaaaatgtgatactattagagcccatactggaggctttgatagaattagcttccaaggtatggaggtgacgggctccttcaaggggtaa

SEQ ID NO: 71033 - DNA, 707 bp, Oryza sativa
  Clone ID: PAT_MRT4530_71546C.1
gcacgatttcaattggtgcgccgtttttttgatcagatgtttttgattttaatggtgccatttgcattttttttaggtattgggcctttagtcaaatggcgtagagatcaggtttcagctattaggctaccggtgattatttcatttgtactgatgttgattcttggtgtttgactgccttattggtttatagatcgaataacgataccttgatccttggtgtcatgatggcggttattatcgtgttgttgagcctgtatgagttgtatcaacgtgctacacatcgacacagctttcttgttggtatatttaagctttctcgttcgcattggggaatggttttggcgcatttaggtgtggcaatgttagtctttggcattacgtttagtcaaaatttcagtattgaaaaaaatgtacggatgaaggttggcgatactgttcaaattaaagattatgattttacctttaaagggataaaaattactgacggtgctaactatcaaggcggtactgctgaaattgaagtccatcataatggtaaatttgaagcaactttgaatgcggaaaaacgtttctataatgtcagtaaaatgggaatgactgaagctgcgattgattggggctttagtcgagatttatatgcggcgttaggtgaaaaattggaagataactcttggggcgtgcgtttatattataaaccatttatt

SEQ ID NO: 71034 - DNA, 513 bp, Oryza sativa
  unsure (1)..(513): unsure at all n locations
  Clone ID: PAT_MRT4530_71547C.1
ccagattatggaatagagattgatcatggtaaccaaggggaaatgaaagtaatggataggaaatattctactccctccggcctgctttgctgcttgttcgcataacctttggaaggcccgcaaccncagtaccttcaattcttctcagcaaagcacctccgcaacgttgaatctgatcaaggaaaatctgcaattatgggagcaccgcctcaagccttgccttcgagcacacattactgcttgggtggtcaaatttgattaaccaccctcttttctccacttttgtatttttgtattatttttgtattttttgtattttctcttcctgctttacatcttgtattttctcctgttttccttttttcttctttctcctttttatccttcttctccccctgtaatgctcctgttgttctcttatttggctttaccagatctcatctggtttgaccaccattaatacaatggttacaaggtagagtctctctaccttttgtgtaaaaaaaaaaaaaa

SEQ ID NO: 71035 - DNA, 220 bp, Oryza sativa
  Clone ID: PAT_MRT4530_71548C.1
atgaagaacccgagtgtaagaaagttattgtttgttacaactgcagtgaagaagggcattacttccaaaactgtccccaaccaaagcaaatcgacctcacattaccgccatctaccacgaagcagacatttccatcgtattgtggtcactggagcaaacgcccgaccccgccgagccaagggaaataaaccttcggagggcgattccaagcataagaacc

SEQ ID NO: 71036 - DNA, 252 bp, Oryza sativa
  Clone ID: PAT_MRT4530_71549C.1
atgggggaggaggctgccagtttggggaaagagaagaggaagggagaggagcccgtttggagggcctcaacggcaccgttgagcccttccggccagccagcgagtccggactgcgatggtggaggcggtgcagattgggtgctagtgagcgtagggagcgcgagggggcatcaggagattgagaagaaggacaagggttttattgtttggttgttcattataaaatttaagcaatctgaagttatagggtga

SEQ ID NO: 71037 - DNA, 858 bp, Oryza sativa
  Clone ID: PAT_MRT4530_7154C.1
acgcttagattgtttatcattgatatgaccagatagtatggcacaagcgacacgacggcgagggccatcgccaaggcctaccctcatgtcaagttcactgttctggacctttccaaggtgatcgacaaggcgcccaatgatggtgtcgttaactattgtgcaggggacttgttccacaccgtgccaccggctcaagcccggattctcaagcttgtatttcaccactggagcgattatgattgcgtgaagatctttactcagtgcagaaaggccattccatcacgagaggagggagggaaggtcatcatcatagagatactggttggaccttcactaggaccagtaatgtttgaagcccagctgatgatggatatgctgatgttggtcaatacaagaggccggcagcgagatgaaagggattggcgagatctgttcttgaaagcaggattcaatgactataagattgtgaagatgcttggagctcgaggagttttcgaggtctatccctaagattgagctacctagctcctaaatgatcttatgtgtaatgtgtgcttcgtgttgggatgtgtgccgtaagaaggtaaataaagagagtgccctactatctgtaaggaagttccatgcccgacataaaattacctaaagtttttgactttgggtactatacaatgtttggtcaacatctattgcagaaaatactgaattgcgctccagatatcgatcgatcggtgtttttctgtgtaccatgactgtacatagatgcttcaacaaggccatgtttggtgcttgttttgttgtacctggatgtattatgatatgaataacacattgttcttgcaaaaaaaaaaaaaaaaa

SEQ ID NO: 71038 - DNA, 565 bp, Oryza sativa
  Clone ID: PAT_MRT4530_71550C.1
aattcctgcagcccataaaatgtaattacaatatatgttttgaaatttacaatctaattacagtatttctattttgactactatatgtaagctatatatatatacatacatatgtatatataacactatatgtaaatatatatatatatatatatatatatatgtatatatatgtgtatgtatatgtatatatatgtgtatgtatatgtatgtatatatgtgtgtatatatatgtatacatatatatatatatacatatacatatatatatatatatacatatacatatacatatatatacacatataaacacacacacatatatatatatacacacacacacacacacacacacacacatatatatatatatatatatatatatatatatatatatatatatatatgcaaccttctgctctgttttaatctaggtttttttttctttcgcatgcatgtgcattcaaaaaccgagcagaaggtcttgacgagtttctgtcaagattcgtttctgctttttgttatattctgcctatttttgttaacgtttcagattgtgttctgc

SEQ ID NO: 71039 - DNA, 1515 bp, Oryza sativa
  Clone ID: PAT_MRT4530_71551C.1
atggcgaaaaagaaaaaacaagccaaaaacaaaagtaatgagaaagggagcaatcgggaactcaagcgtaagagaaagacatgcaaagagaaatcaagtgataacgcaagtaagtctggaaagaaacctgaagattggttgaaaaagaggtcaatattctttaagctagagtattgggagttgaacaaattaaggcacaatctagatgtgatgcatatagagaaaaatgtgtgtgataatttaattggaaccctgttggatattagttcgaaaactaaggatgatctcaatgcacgacttgacttggtagatattggcattcgaccagaacttcaccctacagtagatgataaaggaaagcaaatattgccacctgcaccctttactatgtcaagagaaaataaggagattctatgttcagtaattcagaacattaagaccccagatggttatgcatcaaatatttctaggtgtgtcaacatgaaagattgcacactcaatggtctaaaaagtcatgactgtcatgttttactagaagacattcttcccatagcacttcgatcatgttatcctagtaaagctgtcatgcatatagttaacggattggctcggttcttcaagaagttgtgttctaaagttatagatgtatccgagcttgctgaacttcaacagagtattgtgatgacattgtgtgatatggagagagtttttcttccatcattttttactgtcatggtgcatttgttggtacacttggtcgaagaggttaagttcggtggtccagtgcactaccgctggatgtatcctctagagagatcatttgttcggataaaggcacttgtgcgaaacagagcttacccagaaggttcaattgctgaaggttatattgcagaagagtgcctgacatactgttcaagatttttagaaggaagtacacgctttacaagagcacctagaaaccctgaaccttcagataatataaaagacatttatatgtttgagagtgctggtgaaccaattggcaaggccatcaccataggacggtttgacaaccagcttctagtgcaagcacatcgatatgtcttgcgacattgtgatgaacttgaagactttcgcaagttccacactatgatgcgtgaggctggccgctccactcaaaacagcggcgtagttaacattgctgatgatggtgttaattactatggcagattatcggacatcgtagaattgtcatatagaaaatacaaggtagtgctcttcagatgtgattggtatgacgtccatcataaagccggcatcaaaaaggatgaatttgatttcacccttgtgaacttctcccgaaagatacatagtggagataaattagatcatgatccatttgtcttttcatcacaagtggaacaggttttttatgctgaagatgcaaaagctaaaggatggcacgtcgtaacgagatttaagcccagagatatttttgatatgggtgtggaacaacaatctaatgaaacagagtag

SEQ ID NO: 71040 - DNA, 1068 bp, Oryza sativa
  Clone ID: PAT_MRT4530_71552C.1
gaatcttgaagctgacagaaccgtcaagtttttatttattgaatcagttgttcaaaagtataaaaaaaaaagattgagagcatcaaaacttacaaatccaatgcaaaggagacggctgacagcccttgtaataagtttggcaaatcaatgaatcaagcagtttagatgttaccaggttctcccatcaggcattcaacaggtaatagtggatcgctctcggacaagcagcgtctgtcatcatctttacagttgcatgtcgtgtgttgtcagatgcttatacttctgatccacatttgatgatcttgcagcctctgtcaaacccttggtaacaaccaacttaagaatctcaacaccctcttctatggctgaatcaatccgttctcgaccggtcttattaaacttctggagcacaaaagctttggggtccatttggccaggtggccgtccaattccaatccttaatcgaccaaattctcggttcttacgaaaatggtatatcaagctcttcaccctgataagttcattaaaacacatgattataaaatcaacagacccattatggcgcccatatcctcctttaggttgtaaacgaagaactccacagggcaggtccatgtcatcaaatgccacaaggacgcgattaagtggtaatttataataggcagcaagtggcccaacagattcaccactgagattcatatatgtttgaggcttagcaagcaaaacaggtacaccttcgaccattccttccccaaatagtgccttgaagggatgcctggttagagatataccctgagactgtgcaaacatgtctatcatatcaaacccaacattgtgtctggtgcattgatacttctcaccagggttgccgagaccaacaaagagccatggatttatcacggagcatgacgaagaagatgaagataatgaggtctgagaggttgaagcatgacgcttggatatgaaaggggcaagtcttgtccaaagctttcctcgcatggctttactcgacgttagtaattccaaacatccaccagatccaaaaacagatgcggcagtcatcgccat

SEQ ID NO: 71041 - DNA, 1212 bp, Oryza sativa
  Clone ID: PAT_MRT4530_71553C.1
atggccaccgccgtgcacgccaacctccccttccatctccatttcctccccatcccctccacctccccgtgcaccgaccgctggcccgcccccacgtgccaccgtcaccttcgcctccgctgcctccacctccactgccggtcgcacaaattcatcagggtcactagtgaccaggcattggagtacattatccctgagaggcttacgtatccccgtatcggtgtttttaagaaaatgacgtatcctcgtatccccgtaccgcgtatccgtatccgtattcgtatccccgtatcaagatcatttgttcggataaaggcacttgtgcgaaacagagcttacccagaaggttcaattgctgaaggttatattgcagaagagtgcctgacatactgttcaagatttttagaaggaagtacacgctttacaagagcacctagaaaccctgaaccttcagataatataaaagacatttatatgtttgagagtgctggtgaaccaattggcaaggccatcaccataggacggtttgacaaccagcttctagtgcaagcacatcgatatgtcttgcgacattgtgatgaacttgaagactttcgcaaagaatttcttgatgaagagaaaagaaaactgcctcatacaactaacttgacacagtccgacgtcgacaggttgatcaatagaagctttgctgattggttggaacaaaaggttttacaaaatggtggagtagatatcgatgaaaagacgagagcgttggctgcaaaaccgaacaaaactgttgtgtgctacagtggctatattattaatggtttcaggttccacactatgatgcgtgaggctggccgctccactcaaaacagcggcgtagttaacattgctgatgatggtgttaattactatggcagattatcggacatcgtagaattgtcatatagaaaatacaaggtagtgctcttcagatgtgattggtatgacgtccatcataaagccggcatcaaaaaggatgaatttgatttcacccttgtgaacttctcccgaaagatacatagtggagataaattagatcatgatccatttgtcttttcatcacaagtggaacaggttttttatgctgaagatgcaaaagctaaaggatggcacgtcgtaacgagatttaagcccagagatatttttgatatgggtgtggaacaacaatctaatgaaacagagtag

SEQ ID NO: 71042 - DNA, 901 bp, Oryza sativa
  Clone ID: PAT_MRT4530_71554C.1
gagggactgttcatacttccggaagtcttcagtaagggaaacaccacctggtatgtagagatcttataacttgaacttgttattacaccactgctgagcgctgttctaactcccgcccccatgccaaaaataaagagcctgtctaatgcttgtaaagtatcattttctccggatgggcccatatccgatgaagcacttgagagagttcgtgcattgttagatgagataagacctatagatgttggcctagacaatgaagcacagattgctcgtaattggaataattcaacgcgtcaaccaaatggaagaagaggacgtaatggggctaaccagttcacatctccaatcaaatatttacacattcatgaaagtgaaagtttctctatgggtatattttgtatgccgccgtcatcagttattccacttcacaatcacccaggaatgacagttctgagcaagcttctctatggcacactgcatgctgaatcttatgattggattgatgtaactgatccaaccgatcaattacaggaactttcagtgagaccagcaaggcttgtcagagaccgtgaaatgtctgctccagagaccaccattctttatcccaatagaggtggtaacatccacactttcagagcgatcacaccttgtgctctctttgatgtcctttctcctccttattctgctgagaaggggagggactgttcatacttccggaagtcttcagtaagggaaacaccacctggtattgaaataaatagcgcagaagtaatttggttggaggaattggaggaccatcaacctccagagggctttgttgtcgcgagaggtttgtataaaggccctgtaataaggagatagttaggttcgaagcacgtctgtccacgaatcacgaaccagt

SEQ ID NO: 71043 - DNA, 354 bp, Oryza sativa
  Clone ID: PAT_MRT4530_71555C.1
atgacggcgggggcggtttggaaaggagcggcgacacgggcggcaggcacgggctcaggcgcggcaggcactgacggcggcggcgaccaggcggtcggccaccacggcacctaccgagaccaagtaaccagcaaggcttcaagcccaagacggcaagttcatcggggcgaagcccgcatggcgaagactatggagcaaagacggcgaagggcgaagaatcgcgctggtatcccgcaggtccgaaggcgtctcgggcgaagaccatgtgccgaagggtgcatgccgaaggaaggtgatttcgccatgacaagtcatgctttggggaggcccaaggggccatcccagctgctctag

SEQ ID NO: 71044 - DNA, 2421 bp, Oryza sativa
  Clone ID: PAT_MRT4530_71556C.1
ttacttagattctctattgcgtgaccaaatcttgtggattgcagcaatgcctagtgcagctataactaatgcgatgaaatatccagaagactccaacctcattctggaacccgccatgtaggcaagtaggaggccgagcaagttcaacacaatcgttatgttcatcaccttaaacaaccagtcctcccttagcagtttctcctttagcaacaggatgataacaacaacggatgccacaaaggaagcagagttgctgtagaagaagatgaggtaacggtaccttttgttgtcatgcataaccgggttacctgctgcacgcccattgctgttaccttgccacacacccccaggtgggttgaggccagcctggtaagtcacacttgcagccaagactcctagcagcataaagtatttacgtttggcatgtttttttgattcatcctctttctcgttagactctgtggctgctctttcctgtttttctttctcattagtctcgttggatgtattatttttggcttcacccgcattttctatgtccgcggacttcgttgttctgtcgtcttcttttatttcatcggcagacattgtctcgctcggcttcaatgtttgagtttcttgttctatgacatcctcatcttgtgctggaggggacttctgtacgactctttcttcctcatcttgtgagttagctggctcatttcctgcatggtgcccaaactcatcgtccttcagccaaaacccgcctggcggggtcaacccagcttgataagtaagggtcgtacacaaaacagcaaaaaggagcaacctcttgcgcctctttccctcatccttcttgtccttgtccccatctttctttcccatgtcctcatcaagtgtgatgaatataacatgaataaccacatagactagaacaactccagctaaggcaatgacataaatggatgtggttacatctcggcagctcccagcagagtatgcaccaatgaggccaaacagatccattatcatggcaagctctagtatgtggtgcttgaggataggcttgtactggaccaagatgatgatgaccaaggatactgcaaaggctattgagttgcagtaaaagaataccttgtaacgttctggttgaatagataagagtattggattgccagcctcatgctccttccaattctcctgccaaacaccacctggtgggatcagtcctgcttggtatgtgacggttgttacaagagtggaaagcaggacaacaagagattgagccttctccagaatatctgcattgcttgtattggtctgtactccaccattgcttgcgttcttctttactccattgcttggccttccatttgaatctgatgctgacccttgtgggtgaggggatataatcaccttgagaaaaagaatgcatgcaagaacagcgaaaaccagacagccaacatagatggtagtgtcactattcctgctgctgccggtggcgtaggcccccacaagaccgacaagagcaataatgatgtacgctttgagaaagcgggtccttactcgggaggtcatgctttgatcctggtcctggagtagtgggatgactagttgcttgtctaggagcagcataatgatgagcagggacatgacaaatgcagcagcattaaagacaaagaatgccttcaggcggatagcatggtgctctcgcatgaccaggtcgcctgcattgtgtccctccttgctgctgtcccagtagccaccaggtgcactcaacccagccaggtaagtgacgctcatcacaaatgtagcgagaagtagtaggagcttgcggcgccgctctttttcctcctctttcttatgacctgattgggagagcttattgattttctcctctttgccatcagctgtttgcagttgctccttggcttcctcctttttgccatcacctgtgcagctgctcaatgaagtcagcacaagttgtatcaccatatagacaaaaatgacggccaacacccaagcattcctgggttttagcacggcccggctggtcccagctgcataggcccccacaaggccaagcagatccagcaccatggccacccgcagtggaagcatggggatccaaaagtttttcttctcttgtgcgattgcaaggctcaagatgaggatgatgactataatggacaaaacgaacgcagccgcattgcagtagaagaaaacaaggtaccgggggtagtaggtatcccggataatggagtcaccggcgaggtgcccggcctcggtatcctgccagacacccccgggtggattgaaacctgtggcatatgtcactgtggctgccataatagccagcagtaagaggtacttccgcaagagtaactccagtggtttttcttccactttctcttgatcctctgtagagtgtccattcgccat

SEQ ID NO: 71045 - DNA, 1377 bp, Oryza sativa
  Clone ID: PAT_MRT4530_71557C.1
atggcggaagccaagatgtcacgcataaccatacacgacgtcgagccggtgacgttcagagccatgcttcggttcatctacaccgacgaactcgaggagaaggactccatggcaaccgatttgctccagaatttggtcgcggtcgcggataggtatgatctaagcaggttgaagctgatgtgtgcgcagaagctgtgggagaaagtatcggtggaaaatgtcgcgacaatgctgatctacgccgagatgcacggctgcccggagctgaagacgagttgcctcgacttctttgtgcaggaggagaacttcaaggtggccgtgctgaatgagggttatgctcagttggttcagcattttccatccgttattgatgaaattaaaggcaggcctgtaggtggaccaggcggcctcgtagatgagagcaaggctaataatatagtcgacgtgttggctataagcgccagatttaatgcagcggctgaaccgaagagacgaggctcaggtgatcgaagagctcagcgcaaacccagagagatcacagctgcagtaacaataacgcgggaaatcaaactgctactcattttgatgacaaacaaggagaattactgctactcgaaactcgaggagttcgatcacactgtactgatcactttgatcagtgtatataatcaggattatgggagttggatactgttcgaatcgatagatagatacatctccgactcaatccctctcgcgattgcgttctggtttgcagctccatatgctggcatgccggactctggttctctcgagctcatactagattacgaggcgaccaaccactgtgccatcctcgtcgacggcgagacgttccccgctcaccgtgccgtgctcgctgcccgctcgccggtgttccgggcggagctccttggctccatggcggaggcgaagatgtcgtgtatcactctgcacgacatcgagcctgtgacgttcagagctctacttcggttcgtctacaccgacgagttgcctgcagacgacggcggcgagctcaatacgacagcaatggcgaccgagaggaagaagggaggaggctgcctactgatggggagaagggcggggagcggcaaccatcaggctgggaagctagcgagcgtgcgcggagagggaggaggcggggaggccgatgagcaggacggagagccgacgagcgggacggggcgaggaggccgacgagcgggatggggaggccggcgagcacgcgaggagagggagaaggtggggaaaggggcggagggcgatagccatcgggcggggaggccaatgagcttgcgtggagagggaggaggcggggaggccctcagcccgtcgatctccctatcctggtggccttga

SEQ ID NO: 71046 - DNA, 969 bp, Oryza sativa
  Clone ID: PAT_MRT4530_71558C.1
atgtcaaaaaatgaacagcaataccttgatttagcacaaaaaatattagctgaaggtaacctcaaaggcgaccgtaccggaacggggacgcactccctctttggtacgcaaatgcgctttgacttacaagaaggctttccccttctcacaaccaagaaagttttctttgggttaatcaaatccgaactactctggtttttgcgcggcgataacaacattcgtttcctactacaacataacaaccatatttgggacgaatgggcctttaaaaactgggtagaatcaaacgattacaccggccctgatatgaccaactttggtcatcgcgcagaaactgaccctgaatttgcagccgtctatcaaacgcaaaaagcgatttttgtcgacaagattttaaacgacgatgcgttcatggaaaaatttggttacgtaggtgacgtctatggcaagctctggcgtggttgggaaacgagcagtgtgacagctggtgccgagaccgttgagtcaagttgcggcttagttgaagagattaaaacaacgcctgactctcgtcgccttattttgacagcctggaatgctgatacaacgccgcaagcccccttgccttcatgccacgtcttaagtcaattctatgtcgctgatggcaaattaagccttcagttgtatcaacgttcgggtgatttcttcttgggtgtgccgttcaacattgcgtcatattcacttttgctgcatatgatggccgcacaaaccggttatgaagtgggcgactttgtgcatacaatcggtgacacgcacatttataacaaccacgtggctcaaatcacagaacaactctcacgcccgatgcatcccctaccaaaattatggttaaatccggacgttaaatcaatttttgattacacgatggctgacattaaggtgcttgattatgaaagtgaagctccaattaaggcaccggtcgctgtttaa

SEQ ID NO: 71047 - DNA, 336 bp, Oryza sativa
  Clone ID: PAT_MRT4530_71559C.1
cccacgcgtacgacctctcgtacgttccattggactagctcctctctcccaattacactggtggcttatcgcgcaattcttgcggggttgagtactctttttctcattattattttggttcacttgatcgacggacagcgactacgtcgccggccttctaatgagcgccgacgccgcggagctcgacctaggtgtgctcgacggcggcggacacactctatcggagacactgtgcgacgggcccggcttcacggagcgtgcgacgaggatgcccggcgccagagctgtgctctattgactgcctgcggagaggaacgcccagcgcagaagctgctc

SEQ ID NO: 71048 - DNA, 273 bp, Oryza sativa
  Clone ID: PAT_MRT4530_7155C.1
atggatgaagtcgggggtcgatggacattctccagggcaaatgaaggctacacgagctgcggcccggtagtcgagatgtcatggcagagggttggtgcgctgctgctaggggctcagtcctgcctgcctgtcccgggggttccggctgtaggcaggattgggtcggtcagtgaagaagaagacatcgtcagttgtttgccgaagctccggaagactgcaggatccgctagcgaagtggaggaagcactgaagccagctgtgaagcaggagtga

SEQ ID NO: 71049 - DNA, 954 bp, Oryza sativa
  Clone ID: PAT_MRT4530_71560C.1
atggcgtacgacgctggctacgagtgcgtgcggtcgcatgatcaaatagtatctggaatagattggagtagatcttccaacaagatcgtaacggtctcacatgatagaaattcatatgtttggacacaagagggccatgattgggttcctacccttgttattctcaagctaaatcgtgcagctttatgtgtccagtggagcccaaaagaaaacaagtttgccgtaggaagtggtgctaagtctgtgtgcatttgctactatgaacaagacaacaactggtggattagcaaggttgttaggaagaagcatgaatcttctgtcactagtgttgcatggcatccaaacaatatacttcttgcaacaacatcaactgatggtaaatgcagagtgttatccactttcatcaagggtgtcgatacaaggggatcacatgcgagcacttctactgattggaaatttggagagcaaattgctcagcttgacctatcatctatgtgggcatttggtgtaaggtggtcgccaagtggaaagacactagcctatgcagggcacaattccatgatttatttcattgatgatgttgaaacgtctcctgctgcacagaatttagcactgcgtgatctgcctctccgtgatattctttttctttctgaaaggacggtgattggtgttggatttgattgcaatcctatgatcttttctgcagatgagactggactttggagctttgtcagatacttggatgaaagaaaagtaactacatcaacttcaagagcttcacagctatctgaagccttcggaaagctatatggccaatcaaagcaagtggcaagcagtgatactgttgaaccatcaaagcctcgtggtggtgttcatgagaattgcataacgtactaccctctacttccattttgcagttcaaaagcggactcttatcagttgcatatagactaa

SEQ ID NO: 71050 - DNA, 129 bp, Oryza sativa
  Clone ID: PAT_MRT4530_71561C.1
atggcggcggcacgtcctcccgtggctttcatgggtggatcaggcggcgtcggcggcttccacggccacatgatctttgcgccaagatttgtgcagcaattgccgtggatgaggtcgacagggagttaa

SEQ ID NO: 71051 - DNA, 288 bp, Oryza sativa
  Clone ID: PAT_MRT4530_71562C.1
atgcggggagacgatgtcgttgagagaggcgaggcgcgcggcaagctcggcggcctgggtacggaggacggcattctcggcgtcgacagcgaggaggccctgggtgtgggtggtgaggccgagcgcggtggcaacgtgcgcgttgtcgcggcggaggtgcgccacctacgcggtgaggtcaacgaggtggcgctgcttccgcatccgcaaccgccgccccgaccaccgctgacgacgcccctcctcccccgctgccgccaacaccgtgctccccccactcccgcttga

SEQ ID NO: 71052 - DNA, 248 bp, Oryza sativa
  Clone ID: PAT_MRT4530_71563C.1
gttggggcgaccgaggcattctcttatagctaaagccttctcctctccttgcccttgactttccctgctgcgccgcgccgcacagcgagcgggcatgaccaaggtgcacccaaacgcctcggtggtggcgccggcggtggaggaggaggagaagggggttttttatgttcgtgactgtgcggcacgcggtcgctgctcgccaactaaaaggggctaacagcgtcctacagcaaagagaacctcatgtt

SEQ ID NO: 71053 - DNA, 1936 bp, Oryza sativa
  Clone ID: PAT_MRT4530_71564C.1
tagaatagtggatccccgcgcggccgcctcctgccattaagcaccagatcctaatccgccattaatgcccttaactccaagctcgatatcagaggaggaagaagaggcgtaggagtagtacggctccgccgcctccctcccctgccattataagctcacgcgcggcgctcgcccgggcggctctgccacctgtgaccttgctgttgctgtcaccggagaggcggaggggatgctcacgtgcatcgcgtgctcgaagcagcccggcggcggcggcggggagccgctgcacgagccgccggaggacgaggacgccgtcgatggcggcggcggcggcggcggggcgacgcccagcacgcggctggccatcaaggcgctcactgcgcaggtggggttctcgatcaaggacattgcgttgaaggcgtcgggcgcgtaccggcactgcaagccctgcgccggctcgtcgtcggcggcgggggcctcgcgccggcaccacccgtaccaccaccgcggcggcggcggcggcttcggcgaccccgacgcggcctcgggctccgaccggttccactacgcgtaccgccgcgccacgagctcggcggcctcgacgccgcgcttccgcggcggcggcggcggcggcgcgctgtcgagcggggacgctacgccgtccatgagcgcccgctccgacttccccatcggcgacgaggaggatgaggaggaagacgacgacgacgagatggtgtcaaccggcggcggcggcggcggcaaggaggaggacgcgaaggagtgggtggcgcaggtggagcccggcgtgctgataaccttcgtctcgctgccacagggcggcaacgacctcaaacgcatccggttcagccgtgagatgttcaacaagtggcaagcacaaagatggtgggctgaaaattatgacaaagttatggagctttacaatgtacagagatttaaccatcaagctgttcctcttcctgctactccaaaatctgaagacgagagctcaaaggaggacagcccggtgacaccaccactggggaaggaacggttacctcgttcgttccatagaccattgtcaggtggtggtgcagtgggttcatcttcatcagattctcttgagcatcattcaaaccactactgtaatggtggccaccaccaccatggacaccagtgctatgattcagtggggctggtctcaacaccgaagctgtcaagtataagtggagccaagacagaaacctcgtcaatggacgcatcaatgaggacgagctcatctcctgaagaggtcgacagatctggtgagctctcggtgtccatcagcaatgcaagtgaccaagagcgggagtgggtcgaggaagacgagcctggtgtatatattaccatccgggctttgcctggtggtatcagagaactccggcgtgttcgattcagccgagagaggttcagcgagatgcatgccaggctatggtgggaagaaaaccgagcgaggatacatgaacagtatctctgagatgaaaaaaagaacttgtcctcgcgacacacacaagtggttcttcaacgaacaatgaatccagagttgtacatttggcactaacagtacgccctttgcgggcagcagcagccgtctcagttgatactgattgtgcatgcatgtgagcttaattttaaagctttgttactactaaccttaggctcttgttgtggcaaattcacatgttctttttcatggttttggcttttgctttggacaggaagcttttgttgaggaactcaagactatcgtagagtgattagcctagaaaaataataattagaaattccatattccctgaacctgtagtttgcaaaaccaaaagtgtttcttccaagttccatacaccagtacttggtatttttttctcttcatcagtaaattgaaattggtttttgtccc

SEQ ID NO: 71054 - DNA, 1311 bp, Oryza sativa
  Clone ID: PAT_MRT4530_71565C.1
gctagctctagttactagactatggcaatggagatgatgaccaacaccaccatcgtgcggctgcccgcgtacatgcgggaggcgaacaaaggcctctttgagcctagggtgatctccattggcccctatcaccgcagcaacgagagcacccacgacatggaagcttacaaggagcgcttcctccggcagtgttttgccccgcctctaggtcatatgaatcttgaacaatgcattcaagacattgctcgtaattctcttgcagaagctctcgagaattatagtggcaatgttggcgactacaccgcggagatgctcaccctggacgggtgcttcatcattgagctcctcatccggtggaacatgggaagactcaaccatgacagttacgtgcggtcgatgcggaacagcatatactacgacctcctcctggtcgataaccagatacctttcttcattctctctaggctttttcacaagttgaagggggatgaagagctcgacaacgccgatcccgcgaggaggggaaaacctgggttggttgacctagtaaccgaattcttcaacaacaggcagggtcagctgccagatgcgacgaatcagcagattcgtcatttgcttgatcttcagtacaagcttgtcatcaacaacaacatggggattgaaccaaataatcgtaattgtccatttagcctgtgcatcaacatctgtcccaatacgattgtgccacgaggaatcccagcggcaagcgagctacaagacaacggtgtgagattccgagtgaggggattgagtgagcaggtcaaaatgtttgacgcgacatttcagggtaagatcattaggatccctcgttttcagataaatttcggctccaagatcctactggcaaacctcttcgcttacgatcaaatcaagggagaaccagctgacaacggtgctgctgtcggacctgtgacaagctacgtggtgctcatgaacgcgctcatcaacaccagagaagacgtcgcggttctccagaggaagggcatcctggacaacctgctgtcgaacgaggacgaggtggcctccttcttcaacgagctcggcaggtgtgcgttggtggatgtgagcaatcaccggtacactagcatgttcgaagatgtcaacaggtactggaggaatgggttttgctgcaagtacttcgcgatctgctgcatgaggcattgcaaaaacccgttgacttgcctctcgttactggctgcattcctactcttgagcttttcttgtacctccatggtcttcgccattctcaagtactatacacgtggctagcat

SEQ ID NO: 71055 - DNA, 1221 bp, Oryza sativa
  Clone ID: PAT_MRT4530_71566C.1
ggtgtgtctcgttcgctgcaaaccccccaaaaaaacgcaacgcaccgagtaatccggcgcagcagctcgcacaaccacaaccccccctcctctcctctccccgcgcgaccagctcgaacggatgcgaggccacgccacgggtcccgagtagggaacccccccttccacgccccccccggcaatgtcggcgcaccacccgccgcacggcatcgccgccggggacgccaggaaggcccaccacctcggcggcgaccccaagaacctgtcgtggtgcggcgtcggcgtcggcgaccaccatttcctccccaggaagctcgtcgggggcggcggcccctccgcggcgaagctcgcgctcgtgtccttcctcgctgtcatcctcgtcctcgccgtcgacctgtccctcaccggcgccggggcgaaccggcggctgcggctccaatacctgcattacatcggcgacggcggcgggggtggcggtggtggcggggttggtggcggtggcgaagaggccaagaacaacgagcttccttggctctcagtgccggacccgtccaacttcacggaggagctcatcgaccggtggctgacgcccggggggactccgtgccgcgactcccgtacggcgaacatctccatccctgttcttgacgacgccgcggcggcgggcgaggtgaccacgctgggctccgccgagatccacgagttcacgttctgggcgctcgacgacgccggccagcggcgctgccttggcggggacttcttcgagatcgatctcgccggggacgagtggaagtcgcggccccccgtcgtggaccacggcgatggctcctactccttgcgcctccaggtcgcgccgcgcttcgccgagggggatttccgcctcaccatcatcctcctgttccgcagcttcgagggcctcaagttctcctccctgaggttcaagtaccacgccgagatgcgccggattcccctcctgttcgggccgagcaactccacgcgcttcctcccggcattggagacctgccgcgccgcggacttcgcgcgcgacgtgtggtccggccgctggacgcgcctcgccaagaacgacagctgcgaggaggtggacgacgccggcaggtaccggtgcctggagccgcagcacccatgcgaggcgccatggtgcgcggggccactgggcgcgctggagagcaacgggtgggtctactcggcgcactgctcgtt

SEQ ID NO: 71056 - DNA, 173 bp, Oryza sativa
  Clone ID: PAT_MRT4530_71567C.1
ttcttttccctgcggatactatcactctcttctacaattcgcgcgggctcgggcgccggatcggcgcgaactacggatagtgagggggactgatgcccaaatgacgggggaattgcgggtgctggatgcgccgatcatcaacgtggagcaggaggggttccaggatcggtgcg

SEQ ID NO: 71057 - DNA, 260 bp, Oryza sativa
  unsure (1)..(260): unsure at all n locations
  Clone ID: PAT_MRT4530_71568C.1
ccgtccgaatcccgtcaccacgcgtcactcaggcgtccgagcccagcaacctgccggggagcccggcacggaggttcggttcgcacccgaccacagcaggcgcggcgcatgccactgctactggcaggctgagcggtgatcgtccgggaggccagtcgccaggganatgcacctgcgggcgtncacgaggtggcgaccggtgcgcgcggtgctcaagaggcctcgagctccgtcgccgcgatgacgacgccgtcccgggg

SEQ ID NO: 71058 - DNA, 4025 bp, Oryza sativa
  Clone ID: PAT_MRT4530_71569C.1
atggcggagtcggcggcggcggcggcgggggacgggaaggtggagaaggcggcgaacggcggcgtgaacgggtgcgatgcggcgggggaggggaagaagagggcggaccaggcggtggcgttccacgagctgttcacgttcgccgacaagtgggacctggtgctcatggcggcggggagccttggcgcgctcgcccacggcgccgccatgccgctcttcttcctcctgttcggtgacctcatcaacggcttcggcaagaaccagaccgacctccgcaccatgaccgacgaggtctccaagtatgccctctacttcgtctacctcggactggtggtgtgcgcctcctcatacgcagagatcgcgtgctggatgtacaccggggagcggcaggtgatcgcgctgaggaaggcgtacctggacgccgtgctgcgccaggacgtggggttcttcgacacggacgcgcgcacgggggacatcgtgttcggggtctccaccgacacgctgctcgtgcaggacgccatcggcgagaaggtcggcaacttcatccactacatcgccaccttcctcgccgggctggtggtcgggttcgtcgcggcgtggcggctcgcgctgctcagcgtggccgtcatcccggccatcgccttcgccggcggcctgtacgcctacacgctcaccgggctcacctccaagagccgggagtcctatgccaatgccggcgtcgtggcagagcaggcaattgctcaagttagaacagtttactcatttgctggagagagcaaagcactcaattcctactctgaagcaattcagaataccctgaagcttgggtacaaagctgggatggcaaaaggtttgggtattgggtgtacatatggtatagcatgcatgtcatgggcattggtattctggtacgctggtgtcttcatcaggaatgggcagactgacggtggcaaagcctttacagctatcttctctgctattgttggtggcatgagtcttggccaggcattctcaaatcttggagccttcagcaaagggaagattgctggttacaaactgttggaggtcattcgccagaaaccctctatagttcatgatcataaggatgggaagttgctggcagaggtccatggaaacatagaattcaaagatgttacttttagttatccgtcaaggcctgatgtcatgatctttcgggatttctcccttttcttccctgctgcgaaaactgttgcggttgttggaggaagtgggtcgggcaagagtactgttgtggctttgatagaaaggttttatgatcctaatgaaggccaggttttgcttgacaatgttgatattaagacacttcagttgaggtggctgagagatcagattggtcttgtaaaccaagaacctgctctttttgcaacaactatacatgagaacatattgtatggaaagcctgatgctacaatggctgaagtcgaggctgcagcaactgcatccaatgctcatagttttatatctactcttccgaatggctacaacacgatggtaggggaacgaggaatacagctgtctggtggtcagaaacagcgtattgcaatagctcgtgctatgctgaagaaccctaagatactgctccttgatgaagctacaagtgctctagatgcaggctcagaaaacattgtccaagaagctctagaccggctgatgactggaagaacaacggtagttgttgcccaccgtctctccactataagaaatgttaacatgatcgcagtcatccagcagggccaagttgttgagactggcacacatgatgaacttctagcaaaagggagctctggagcgtatgcctccctgattcgttttcaagaaatggcacaaaacagagaccttggtggtgcatctacccgcaggtcacgctcgatgcacctgaccagttcactttccacaaaatctctcagcctcaggtctggaagtttaaggaacctgagctatcagtacagtactggggcaaatggtcgcattgagatgatttcaaatgcagataatgaccgtaaatacccagcaccacgaggttacttcttcaagctcctgaaattgaatgctcctgaatggccttatgcagtgttgggcgctgttggttctgtcctctctggattcattggtccaacattcgccattgttatgggagaaatgcttgatgtgttctactacagggaccccaatgaaatggaaaagaaaacaaaattgtatgtgttcatctatattggcactggcctatatgctgttgtagcttatctcgtgcagcattacttcttcagcatcatgggagaaaatcttacaaccagggttaggaggatgatgctttccgcaatacttacgaatgaagttggttggttcgatgaagaagagaacaactcaagtcttgtggctgctcgtctagcagttgatgcagctgatgtgaagtctgcaatagctgagaggatatcagtgattctgcagaacatgacctcccttatgacatcgttcatcgttggttttattattgagtggagagtagcactgcttatcctggccaccttccctcttcttgtgcttgctaactttgcccagcaactttcgatgaagggcttcgctggtgacacagcaaaggcgcatgccaagagcagcatggttgccggtgaaggagtgagcaacatccgcacagtggcagcattcaatgctcagaacaagatcctttctctgttcagttatgaattgcgcatacctgaacagcagatcctccgccgcagccagacatcaggccttctgtttggcctctcacagctctgcctgtactcatcagaagcactcattctgtggtatggttctcatctggtccggtctcatggatccaccttctccaaggtcatcaaggtctttgttgtccttgttgtgactgccaactccgttgccgagacagtcagccttgccccagagatcgtccgtggaggtgaatccatccgctccatctttggcatcctcaacagggcgacaagaatcgagcctgatgatccagagtcagagcgtgtcaccaatgtccgtggggacattgagcttcggcatgtcgacttcgcctacccggctcgccctgacatccaaatcttcaaggacttcaacctaaaaatccaagctgggcgcagtcaagctctggtgggagccagtgggtctggtaagagcactgtgattgctctcattgagcggttctatgatccgaccgggggcaaggtcaccattgacggcaaggacattaggaggctgaacttgaaggccttgcggctgaagataggcctagtgcagcaggagcctgttcttttcgcagccagcattcttgagaacattgcctatggcaaggacggtgcaacggaggaggaggtgatccaggcggcaaaaacagcaaatgtgcacggcttcgtcagtcagctacccaacggctacaagacggcggtcggcgagcgaggcgtgcagttgtccggtggccagaagcagcggatcgccattgccagggcggtgctcaaggacccggccatcctgctgctggacgaggcgacgagcgcgctggacgccgagtcggagtgcgtgctgcaggaggcgctggagcggctgatgaaggggcggaccaccgtgctggtggcgcaccgcctgtcgacgatccgaggcgtggaccgcatcgccgtcgtgcaggatggccggatcgtcgagcacggcagccactctgatctcgtgtccaggccggagggggcgtactcgcggttgctgcagctgcaacaccacgcctgacgatgattagtatgacataagtcttttgctcttgtgattggaatggttacttgtttcacttcttcttcttcttcttcttcttcttgtggcttggtggttaagttgatgtagataactagggcaaacttctatggtcgttgtgctatctacctaagtttaaactggaacggtgtaagatgtgtcttcctcctgaaacgtatgatgcaaaattgagatgc

SEQ ID NO: 71059 - DNA, 746 bp, Oryza sativa
  unsure (1)..(746): unsure at all n locations
  Clone ID: PAT_MRT4530_7156C.1
tcgtacatcccccaaaggctcttcttctgctccgacctcacctcgcctccttcctccgccgactccctcccctccgccattgcagcctcgcctacggccttgagctcgtcgccgatccccgccaccgccgcgacctctgcctgccccccatgcctcggccggcgaaaatcaggaaaaaacatgagaatgtgtttgatcaattgatcaaggcgataaaagctcctgtggactttgatctgccgcctgtattgaaagaatggaagtcaaattactatgtgccaattaagcggaatgcttatattactcggaaacgcgttgaggatgatggcattttttgttcctgtaccccttctggatcatccgcaacttgtgacaaagattgccaatgcgggatgttgttctcttgttgttcgtcgacctgtaaatgtgagaataaatgtgctaacaaaccgttccagcataggactttgaggaaaaccaaattaattaagacagagaaatgtggcaatggggtggtagctgaggaagatattaaaaaaggagaatttgtaatcgaaatngnntggagaagttattgatgacagaacatgtgagcagagactatggaaaatgaagaggcagggtgacactaatttctatctttgtgaggtcagtaataaatatggtgatcgacgcgaccaacaaaggaacatgtcgcgcttcataaatcatagctgtgagccaaacacagagatgcagaaatggac

SEQ ID NO: 71060 - DNA, 1605 bp, Oryza sativa
  Clone ID: PAT_MRT4530_71570C.1
atgtccgccgccgcggtcaccgccacgccgcgccacgcccggccgtctcctctcaacccgaacgccagggccgcggcggcggcggccgccgcggcgccgccgaacgccgtgtccaccaccaggacgcacctcgccaacctcgaccgcctcctcgtccggccgccgccgctccccctgccgctccagaacaagggggcgccgccggccgatgacctcggcgacggcggcggcgccgccaccaccgacgaccggagcggccgctgcgggctgctcaacgcgctcaacctgtccacgttcctgcccttcgtccgcaagccggccgtcgacgagatgtcgccgcgcagcctcgcgcacctgcagcgcctcctcacgctgtcgccgcggccctcgccgaaaggctccatcgccggcgagtggcggaggtatcacagcgagggcggctgggacgggctgctcgacccgctcgaccagaacctccgccgcgaggtcctccgctacggcgacttcgtgcaggccgcgtacacggcgttccactccatgccgtcgtcgtcgtcggcggcggcgtcgcagcacagccagcaccggacgctcgtgctccccgaccggtcgtaccggccgacgcgcagcctgttcgccacgtcgtcgctgtccatcccggcgtgggcgcggcggcggtcggcgcccgggtggctcacgcagcgctccagcttcgtcggctacgtcgccgtctgcgacaacgagggcgaggtccagcgcatgggccgccgggacatcgccatcgtcctgcgcggcacggcgacgtgccccgagtgggcggagaacctccgcgccggcctcgtgccggtcgacgacgacgacgacgacgacgtcggctcgccgcagaacgcgccgaaggtggcgaaggggttcttgagcctgtacaagacggccggcgaccacgtccccagcctctccgacgccatagtcgacgaggtgaggcgcctcgtcgaggtcttcgagggggaggagctgagcatcacggtggtgggacacagcctcggcgcgtcgctcgccgtcctcgccgccgacgagctcagcgcttgcctgtccgcggacgtggctgaacatcgccggcggccaccgccgatcgccgtggtgtccttcggcggcccgaagaccgggaaccgcgcgttcgccgaccgcctccagaacggccgcggcgtgaacgtgctccgcgtggtgaacgccggcgacgtggtgacgcgggtgccggcgccggcgatggcgcgggagggggaggggcacgtgcacgccggcgcggagctgaggctggacagccgcgactcgccgtgcctccgcccggacgccgggccggcgtgctgccacgacctggaggcgtacctccacctgctcgacggcttcgccggctccggccggccgttccgcgccgacgcgagccgcagcgtggcgcggctgctgacctaccagcgtcccaacgtgaggggcgcctacgtcgagcgcgccagggtgctcggcttcgagccggcgacgccgcggaccgccaccgccaacggcgccggcggcggagccgaggggcattacggctacttggctagcccaacatga

SEQ ID NO: 71061 - DNA, 176 bp, Oryza sativa
  Clone ID: PAT_MRT4530_71571C.1
tggttgcgacccatgtgaacctcccttcggggggcgtttaaaaaaacaaaggggtctcccaacacgtccaacccatgagcagccaagacgcgccttggcttagcaggggagggccggcgctctccatctgccgagcaaagcgggccagaggattacaagatcatccctactaccct

SEQ ID NO: 71062 - DNA, 3195 bp, Oryza sativa
  Clone ID: PAT_MRT4530_71572C.1
atggcggcgagcactcgagccctcttcctctcctgcttccacggaagcggcggcggcggcggcacttccgaggtgagccgccgcctcgtgctgcggccgcggtacccgtccatgccgcggcgaccgaggtcggccgcggtcgccggagagggaggggaaggaggaggaggaggaggcgacggcgatctggaggcggcggccgtgggggcggaggaggaggagaaggtggcggtgttcgaggtgtccgggatgacgtgcgccgcgtgcgcgggctcggtggagaaggccgtcaagcggctccagggcatccacgacgccgccgtcgacgtcctcgggggccgcgcgcaggtcgtcttctacccggcgttcgtctcggaggaaaaaattagggaaaccatccaggatgtgggctttgaagctaagctgattgatgaggaagtcaaggaaaaaaacattctagtatgcaggctgcacataaaaggaatgacctgcacatcttgtgcgagcacagtggaatccatcttgcaagttgttcctggtgttcagagagcttctgtcgcattggctactgaagaggcagaaatccgttatgaccgtagaatcgttactgccagtcaactaacccatgcagttgaagagacgggttttgaagcaatactgatcaccactggagatgatcagagcaggatagacctcaaagtggatggcacactcaacgagagatcaatcatgatagtgaaaagctctgtccaagctcttcctggtgtggaagacataaaagttgatcctgagctccacaagatcaccatctcatacaaacctgaccagacaggtcctcgagacctcattgaagtcattgagtcagctgcctctggtgatcttactgtatcgatatacccagaagcagatggaaggcagcagcatagacatggggagatcaagcgatacaggcagtctttcttgtggagtttagtattcaccatcccggtattcctcacctccatggtgttcatgtacatcccagggctgaaggatgggctcgaaaagaaggttattaacatgatgagcattggtgagctcttgcggtggattttgtcaacgccagttcaatttgtaattggccgcagattttatactggtgcttataaagcgttatcccacggctcatcaaacatggatgtactcattgctcttgggaccaacacagcttacttctactcagtttactccatcctccgagctgcctcctcacataattacatggcaactgatttttttgaaactagttcaatgctcatatcgtttatccttcttggaaagtaccttgagatcttggcaaaagggaagacctctgaggctattgccaagcttatggatcttgcaccagaaactgcaactatgttgatatatgatcatgaagggaatgttgtgggcgagaaggaaattgacagtaggttgattcagaaaaatgatgtgatcaaagtagtcccaggtgggaaagttgcttctgatggctttgttatatggggacagagccatgtgaatgaaagcatgatcaccggagaatcacgacctgtggcaaagaggaagggtgacactgtcataggagggacggtgaatgagaatggtgtgcttcatgtccgtgcaacatttgttggatcagagagtgcccttgcacagattgtacggctagtagagtcagcgcaaatggcaaaagctcctgtacaaaagtttgctgatcagatatctagagtctttgttcccctggtcatcattctttctttgcttacttggcttgcttggttcttagctgggaggcttcatggttaccctaactcatggataccatcttccatggatagctttcaactagctctccaattcgggatatcagttatggttattgcatgcccttgcgccttagggcttgcaactccaacagctgtgatggttgctactggagttggtgcctcacaaggagttcttatcaagggtgggcaagctctggagagtgcacagaaggtcgactgcatcgttttcgacaagacagggacactaaccattgggaagcctgttgtggtcaacacaagactgttaaaaaacatggtcttgcgtgaattctatgcttacgttgcagcagcagaggtcaacagtgagcacccactgggtaaggcagtcgtggagcatgccaagaagttccattcggaagagagccatgtctggactgaagcaagggatttcatttcagtgacagggcacggtgtcaaggcaaaaataagtggcagggctgttatggtgggaaacaagagctttatgttgacttcaggcattgatatcccggtggaagctttggaaatcctaacggaagaagaggagaaggcccaaacagcgatcattgtggctatggatcaagaagtcgtgggcattatctctgtatctgatccaataaaaccaaatgcccgcgaagtgatttcgtatctcaaatctatgaaggtggagagtataatggtgactggggacaactgggggactgccaatgccattagcaaagaggttggcattgagaacacagttgcagaagcgaaaccagagcagaaagctgagaaggtgaaagaacttcagtcggccggaaggaccgtggcaatggttggtgatggaatcaacgattctccagcgcttgtatcagccgacgttggcctggcgattggcgcaggcactgacgtcgccattgaagcggccgacatcgtcctcatgaagagcaacctggaagacgtgatcaccgccatcgatctgtccagaaaaaccttcttccgcatacggatgaactacgtctgggcgctcggctacaacatcatcggcataccgatcgctgccggggtgctcttcccgtcgacccggttccgcttgccgccatgggtcgccggcgctgcgatggctgcttcctccgttagcgtcgtctgctggtccctgctgttgaggtactacaagagcccaaaactgggccgttgatcatgcagtacacacgcatagcatttgcttagaataagaggtgtagatatctgttgacaatgtgctaatgtggttctaaaagaaatgtgctagtgtgtgttgtgtggcacctgaaatgtgtacattacctacgtatatatgcaccgtgtgtttacaagtgtttaaaaaataaatatattatttata

SEQ ID NO: 71063 - DNA, 134 bp, Oryza sativa
  unsure (1)..(134): unsure at all n locations
  Clone ID: PAT_MRT4530_71573C.1
aacgaggagcggtagcagaggcactgatgctggctgctgnggtaccgcctggtggtgtttctggtccaccacatgtcggagccgtcgcaacagtcggtccttatccgatggctacatgactactgtctacgtcc

SEQ ID NO: 71064 - DNA, 1009 bp, Oryza sativa
  Clone ID: PAT_MRT4530_71574C.1
ggtctctggtttgagagagattcatctctttggatgctaccatccatgaatgataatcttctagatcatctgaagggcagaggagtttcaacaattccagccttactaggtctctctcgtgaagaattacataggttgcttcaaccattttctgcttctgagttgtaccaggatctgcagcatttcccttgtgtggatgtaaaacttaagcttcagaatgaagataaggaccagtccaggcctccaattttaagcattagattgcaaatgaaagatgcgcgccgttcaacatcaagagcgttttcccctagatttcccaaggcaaaacaagaagcttggtggctggtccttgggaacattagaagttcagagctctatggtctgaaaagaattaattttatggatcgggtggttaacactcggatggaattgccagcaatgtttgatatacaggagacgaagctaattttggtgtcggattcctaccttgggtttgatcaggagtactcacttgggcatcttgcaaagggtgtgtgatgctcttgttggcttaccaatgcaatgctcatctactgtagggcccaacactcagcagtgccgatcttgccgtggtttagttgttcagcatatcttatcttaagagcccttgggagcttacatacagtatgacgggccgcgaatattatgaaatgaacggtggcggtggctcattcatctcatttctccttcatctcattgtctattaccagccataacagtcaatgtttattagcctctggccttaaattttgttagtattaaccatgggtattaacctcagcctagaatttcacgaatgcttcatttgcttcaacaatgcatgaattttggctttggcctgggaatattcgtgtattagtaatttggtccaaagtttcatgagaattaaacattaggctcaacaaccgagtgtctattaaaaaaaaaaaaaaaaaaaaaaaaaaaaaaaggggggggggcctcgtgccga

SEQ ID NO: 71065 - DNA, 459 bp, Oryza sativa
  Clone ID: PAT_MRT4530_71575C.1
atggaggggctcgccaagatcggtccatggggcggcgacggcggcgacccgcaggacatcgccctcggcgccggcgcggcgccgcaccgcctggtgagcatcgaggtcaggagcggcggcgccatcgacgcgctgtccttcacctacgctgccatcgacggcgcgaagcacgccgccgggccgtggggcggctccggcggggagaagcacaaggtgaagctcggcgaggcggagcgcgtcacggaggtctccgggacgctcgggccgtggggcccccacgcgtgcgtcgtcaggtcgctggcgttcgtcaccagcgccgggaagacgcacgggccgttcggcgaggaggtcggcggcgcggcgttccgcgtgccggtgaagggcggcggccgcgtcgtcggcttcttcgcgcggtctgggtggctgctcgacgccgtcggcgtctacgtgcacccgtga

SEQ ID NO: 71066 - DNA, 3351 bp, Oryza sativa
  Clone ID: PAT_MRT4530_71576C.1
aaaataccaaggcccaaatcctacagagcccaaagtagagggccaaaaagcaatgtgcgaggtgtatggatcactctgctcttgtcctgttcttccccgcgagatcgccgatcctgctggtgcggcggaggagggggaggaggagggaggttccggcgtcgaatggtggttgtcggatgacaaggctccggagtttgtcgtcgagcgcgcggctggcggcggcggagtgggcggcgccgatgaagctgcaggtgagggtggtggaggcgcgggggctccccgcggtgcgcgtggacgggacgagcgacccgttcgtgaagctgcagctcgggaagcggcgggccaagacggcggtggcgaggaggaccctggcccccgcgtgggacgaggagttcagcttcctcgtcggcgacatcgccgaggagctcgtcgtgtccgtgctcaacgaggacaagtacttcagcaacgacctcctcgggaaggtcagggtgcccctcgccgacgtcatggagaccgacgacctctccctcggcaccgcctggtaccagctccagcccaagagcaagaagtccaagaagaatgcaggagaagtttgcctgtgcatatcattgtctacaagaactcatgtttcagaggaatcgcagagtgtgaatcctgcttcggatgatgcatccagctcggacaggtcaattgaacataaggatgcggttttatcaaccactagtagttacattgacctatcagcgtgtgccagcgccatggaccgggcatcgcagagcagcatggaacaattggcagatagcattgtggatcaaccaccgcgtagcagcatggagcaattggatgctgagtcggtcgatcagtttcaagagccaaaagtgtgttctgaagaccatgaaacccctgaaagtggcacatcatctgagtcaagccttgatgagctgctgaaaactatggagtccaaagatcagggctgtgaaatgccagcgaacttgcctgggggtgtactaattgacgaatcttatgttgctgcaccaactgaattgaattccctcttgttctctaaaaattcagatttctggccagcagtatctgagcttcaaggaacaagtgggtttcagattgaaccatggaagcttgataataacgaaacttgtttgcaaagaacattgacctacaccaaagctgcgagtaaattagttaaagctgtgaaagccacagaagagcagaaatacttgaaagcggctgggaattctttcgctgttcattctgttgttagtacccctgatgttccttgtggcggttgtttcaagatagagatattgtattgtataacaccaggtccctcgttatcatctgaagaacaaacatcacatctcactgtaagctggcgggtgaactttgttcagagcactatgatgaaaggaatgattgaaagtggtgcaaaacaaggaatggcggaaggctttgcgcatttttctgaaatactctcccagaagattaaagtagctgaggctgatgatgctaattccaacaaagaaaagattttatcttcactgcatgctcagaaagaatcaggctggagactgattgtccgctttcttttcaacttcacgttcattttttcagttatcatagcatcgtatgtcatagcacaccttcacttgtcaaagcccaatgcaatgcatgggctggaatattttggcattgaccttccagattcaattggagaggttgtggtttgtgctgttttgatccttcagggacagaatatcttcaatataataaagcgcttcttaaatgcatggaaacaaaaaggtagtgatcatggggtcaaagctcatggtgatggttggttgatgactgttgcacttattgagggcactggtatcactaattctaattcaaaagaattatttgatatgtatgccgtttttacctgcaacgcaaagaggaaaacaagctcagtaaaattccaaacatcagagccaaaatggaatgagatatatgaatttgatgcaatggatgatcctccatcaagaatggatgtggctattcatgacgctaatgggccatttgatcaatcccccattggtcacgctgaagtgaactttctgaaaagcaatttatcagatttaaccgacgtatggcttcctctcgagggaaagtgcgatcaaactagcaaccctaagatacacttgagaatatttttaaataactcgagaggaactgaagttgttatgaactacctggcaaagatgcggaaagaagttggcaagaagacttgttctatttctataatgacagaacaaatcatgcagataaatttgcggtctgcccaaacaaatgcagcatttcggaaactctttaacctcccaccggaagagtttctcatcgatgattttacctgccatctaaaacgaaagatgccacttcaggggcgcctcttcttttcaccaagaattattggattttattccaacatatttggtcacaagaccaagtttttctttttgtgggatgatgttgacgatatccaagttatccctcccaccctgtcaattggtagcccatccttgacgatcatcctccgaaagggtagaggtttagaagcaaaacatggtgccaagggaacagatcctaatggaagactcaaatactattttcagtcctttgtttcattcaatgatgcccatagaataatcatggcaatttggaaaatgcgatcactgagtccagaacagcagggggatatgatcgaaaaagagtccgataccaaagaactccagctcgaagaaaggtggaaccttatttacccatgaagatgtcaaaatgtctgaaatattctcatcggccctctctgttgatgtgagttccctgatggagatgttttcaggagggcctttggaacacagaatgatgcaaaaagctggttgtattgactactcgccaacagaatgggaacttgtaagccgaaatatataccagcggcaaatcagctacaagtttgacaaaaacttgtcaagatatggaggagaagcaaccaccactcagcagaggtatgccctagtgaaccaagaaggctgggccattgaagaggtgatgagcctacaaggtgttctactgggggactgcttcaatgttcagatgaagtacactgtggtgaatgtaccgtcaaaaccgaacacttgcagtgtgcaggttttgttggggatagcctggttaaagagcactaagcaacaaaagaagatcacgaagagtgtcatttccaattcatccattagattgaaggagctctttgctgaagtagagaaggatcttacatcgagaagcggtagtattttcaaccca

SEQ ID NO: 71067 - DNA, 853 bp, Oryza sativa
  Clone ID: PAT_MRT4530_71577C.1
cagctcgcgccgcggaacacgagacacagagagagtagagatcgagatcgagtgctaagctagctagagtcgacgatggcgaagtggtgcagcttcggcgtcgcgtcgtccctcctgctctgcctcgccatggcgcacgccgcggcggcggccagggccgtgcccggcggcgacggctcgacgacggcggcgtcgctcccggcggcggcggcggcgggcaccggcgcgggcgtggaggacaagaagaacctcttcgtgggcgtcggcggcatgggggacctcccgggcttcccggccgtcggcggcggctacggcgggggcttcggcaacaacggcggcgccgtcttcagcggcgtcaccggcccgctcggcggcgtcgggggcggcatgggcagcgtcggcccggtcggcgggttcggcggcgccggcggcggcaccccgttcggcgggttcggcggtggcggcgccggcggcgtcacgccatgaaccgtagtattactgagagctacgtacgatctcatgcatctacgtgcgccgcgtgcgtatatacgcacgcgtggtgcacgtgtagtagctagtgtcatcttttgcttttgagtgtcgatctcaggtgagttgcatgcatggttgggcagggaggttggagtttgtaaaagtttgggtttgtggcctgatggcaagagtcgagtttactagtagcttctagtagttgtgtgctaagttaattgtgtgttgttaagtgcacgtgatgcatgcgagatatgatgactatctttagttaatgaaaaaaaaaaattcaaaactcgagactagttctctctctctctccctcgtgccgaattcctgcagcccg

SEQ ID NO: 71068 - DNA, 912 bp, Oryza sativa
  Clone ID: PAT_MRT4530_71578C.1
atgaataatatgatctccgtgtcaacaagccgttgtgaactccacacagaattagcgagcggccatcgcgagatcgatttaggaatcacaagtcgatttgaagtactaaaattctcaatcgtgttaacaaaaaggagcactaatctcaacatcgaaatagtagagcagtattgcagtgtagcatttttcaccctgtttccagtactgccgaagcgtcaaattcttgatggtcatgtgtcagctgaatggtacagtgatgaacgcatcagtatcacgcgtttactagtgtccttttcagacgttagtatggaagataagatctgtactaaattctcttccagcaaaattagccaaacagaggccggtaagcccatgtactactacagtagtaggaaaagatctcactatcttcttcaagctgcaatgattcgacacgaaagtttctggttccgccgttgtgaatgtgacgaaggacgaacaggccgcttccagctcctgttctccgacgtggacttcgtctccggcggcgtccggcgccggccgaacctgtccctcctggccgaccgttgcacgaccccgcgtgagctcgccgtcgtccacgccgccatgctcgtctccggccgcctcgccgacgacgccttcgcggcgacccgccttctcgccgcctacgccgtgctctcccctcccgacgccgtgctccgcctcttcgccacgagccacgagcggcggccggaattccgtgcggagcgccgtcgcaacgagctctgccgcctcgtgctggctgctgcgtcggcgcagaggcagcgcagggggaggaggatggaggcggtggtccggcgagggaggagcctggtagctgaggcggcggcggcggaagaagatgaagaaaagggagagggaagaaagggggtg

SEQ ID NO: 71069 - DNA, 444 bp, Oryza sativa
  Clone ID: PAT_MRT4530_71579C.1
atgccgcgcaagccgccgccgccggggacacctcccgcagccgccacgccagccgcctccgtcggggacgcgtcccgccgccacggcggcagacccaccgccgccgcgcaagccgccgccgccgccggggacgactcccagcaccgcttcccatcggcgtcgcggagagggaggagaaggaggcgaggcagcgcgagtagtactcgaggaggcgcgcgagggctaactggccacgccttacgctgcacttgttacggccggcatggctgtgttagcaactgcctgctggttggtctttgtgaaacggaacaccagtcgcccatcgggaggaggctgccgccggggtcgaggggcttccctatcatcggcgagacgctcgaattcctcaccgagagccccgccaatcagctccccgccttcttcaagcgccgtcttgacaggtaa

SEQ ID NO: 71070 - DNA, 204 bp, Oryza sativa
  Clone ID: PAT_MRT4530_7157C.1
atgtccaccacgaaaacttttggctttataaacggttaaatatgttctgattccattttttttaaaaagcccctttacctggaacatacactcccattggtggccccaaaaaaactaaaaattccttgtggggaatcgccttaaccaccattttaagcttgtcctttttcccaccaaaaaaggcaggggggtgcttttttgttg

SEQ ID NO: 71071 - DNA, 1500 bp, Oryza sativa
  Clone ID: PAT_MRT4530_71580C.1
atgtctcagaagcacgcgaccaccctcatcagctccctgtgctcgcgcggcgcggtctgccacgcccgcgcactgttcgacgaaatgcccgaacgcgacgtcgtggcgtggacggccatgctctccgggtacgcctccaacgggctccgccgcgaggcgctggacgtgttccggcgcatggtcgccgcgggcgccgcccccaacgagtacacgctgtccagcgtcctgaccgcgtgccgcggcccctgcgcccccgcgatggcgatgcccctgcacgccgtcgcggtgcggcggggcgtggaccgcatgccgtacgtcgtgaacgcgctcatcgactcctacgcgtcgctcgcggagggcgtcgtggacgcgaggaggctgttcgatgcgttggggagcgggcgcacggccgcgtcgtggacgtcgatgatcgctgggtatgccaggtggggacaggagcgcacggggctgcggttgttcaagacgatgcttaagcaacttcatttgcagtgcataaagaaagctcttgatgtgaaccttgctgttgtaaattctctgatcgacatgtactgcacttgtgcaagaattttggatgcaagaagcctttttgatggaactcctgagaggaacttgatcacttggaataccatgattgctgggtatagccaatgtgatcctctaatggccttgcagctccttcttgagatgaatgatgagccaaattgcttcactctaactagcattacatcagcctgtgctgatcttgcggcgctgagatgcgggaagcaggttcatggggccgttcttcggagaagttacagtgatgacctacaaatgggcaatgccctcgtggacatgtactcaaagtgtgggagcataacaaatgcaaaaaatgtgttcgacaggatgggttgcaaggacaagttttcatggacatcgatgattgctgggtatggaatgaatggttatggaaatgaggctgtccaacttttcagttccatgatccatgctggggtgcatcctgaccatgttgtgttcctgagcctaataagttcttgcagccatgctggtttagtagatgaaggatggaatttcttcaggtcaatgataaatgagtataatttgcagcctaacaaggaggtttatggtagtgtcgtcaatctccttgctcgtgctggtaggctgagagaagccttggacctaattgatacgatgccatttgctcctgatgaatatgtttggggagcattgcttggtgcctccaagatgcataataatgtggagatgggcagactagctgcaagaaagatcactgagatcaatcctgatgatgtgaagaattatatcatgcttgcaagtatatatgctgcaggtagtaaatggggcgagtatgcttttacaaggaggtctttgagaggcatagggagcaggaaggaggctggaatcagttggatagagctttcacaagctaagaaggctgagtatggtgcattttattag

SEQ ID NO: 71072 - DNA, 1692 bp, Oryza sativa
  Clone ID: PAT_MRT4530_71581C.1
tcatgcatttgggtcagtttgctccttcttcctactaaattccttctcagcttcaagaaccaactttttttcgtctaagccgcagaagttggccaattctttgatcttcttcttcggggttggctggggcgttgccaggataggcatctccacaatttcttccagttttttcagcttcttctttggcctggacttactgccgttgttgctgcacgaacctgttttgttttgagctaccacccgatcgctggctcttgcaacaggatttatccacttaccattgtaggtgtcgcggatccttgcgttgcggcggacgtataccgtgatgttgaggtttggtaacgttcccaccagcggcagcagctggtcaatgcgtgggtcatttggcttgttcagggcatcatcgagctccttctgtacgtcatgcgcttctttggccttccgatcatacgatgccaccctctcagctagtggatgccgaatcagggagtaggcgccttcaacatgaggtgaagtagccatcgattgactcatgccaaagacatcaaagcggggatattctgtgattgggagagtaggcggcatggtgcagatagatgggggggaagggaggaaggacaggaggggttcgagcttgtacgcagcttgctcaaaaatgatagaggcatgtgcagttgcaacaggcggagcggggagagctaatttaggcaacaaggtgaaaaaggcaaggagatcacctagattaggatatgcatttcgagcaaccgcgtgctgggctcggagagccatgttgccgaagactccaatatagcatgatatggttttggacgaggaaccttgggagaagttgctttcaagagcaggaacttgccctgcagtccttgtctggtcaccgatgtcatccgcgggtgcccgtggagccctgttggacctgctgtgagcccgatgagagggtggtggaggtggcggcggcggggcatcactgttatcccagacctcattgatgaagatgtcggtgaagatgcctgtctcattcaccttgtggtaggccaaatgatgtgggatatgcttgagggcctccaccttgatcatggcgaagatggctgcgaactcgtgaccgtgtaagcactcgtggtctacattcacgaggtttgcaaaacccaaaatgcaggacgactggaaagcgttagggttggcaccaaactcgccggagaggaggaaggtgactctttcaagcgaaaggataacacccgatgtcctaacgatcgccagcaaccgaatcggcgaacgcagggaggggatgatggggtcacacgtgccagaaaagtatttggaaagcatggcagattcaaaggaggtgccgcgagacccgttcatttttgaaccaaggacggtgctgttcccgccacagcgtacgatgtcggggttcgcggcgcactgtcgccgggagatctcgtcgaatacatagactacgatcttgtcggtaacatcgaattcgtctacttccattttaatatgtggtttttccatatcaatcccaataccataatcatccagtccacgagtatctctcgtcgatagtggtgcgccaggtagggggacttggtgctcaaggttcgttacgccaatctcgactggcccaattactatcgggaatgagaacggcacggctacgactttgagaaacgacat

SEQ ID NO: 71073 - DNA, 521 bp, Oryza sativa
  unsure (1)..(521): unsure at all n locations
  Clone ID: PAT_MRT4530_71582C.1
cccggtcgacccacgctgtccggcgaaaagaaaaagaaagaaaaagaataaaaagataaaagaaaaaatagaataataaaaaaaaaaaaaaaaaaaaaaaaaaaaagagaaagagggaatataaagaatgcggcgtatctacggcaattaaaaaaaaaaaacaaaaaggggcgagcgttggggggcttttttggggttccctgtttcttttcccgggttctgccttttttatacttttttcatggggaaattcttggcctttccgggccggcgctttttgggggtagctcttgttgagtcccggggttacccctttgggtgtcctttcccttttccccttttaaagaatactggaaagtccctggaggggggcctttcccttctttttggctattggtgccgcccttggtgggggttttgttcgcccttttttttgctcttgatgggggggggttcccggtttttttcccatnattttttggtgttttttccaggccctcgggtgcccttttttccctttt

SEQ ID NO: 71074 - DNA, 497 bp, Oryza sativa
  Clone ID: PAT_MRT4530_71583C.1
tttccatcacctcaacctcatgaccatcgccgacactgatcacagggttcgacaagtgcgcaattacgccgacctgtcgaaattatgtgatgatacatttgccaaaatgattcaaagcgggggtagcccggaagaactctatgacactgtatgcaagcaggaggttgaaattgttctgacagcttatccaacttaaattaatcggtggactttgcagtacaaacaccttagaatagctcaccaattggaattcatctaacgtgctgttctttagctcgtggataatgcaattcttttctgttgatttgttatgagatattttttgttttccgtccaacttttgttgcttgtcatcctttattcttttaatgcttgctatctttataatttgccaccatcttctccagctacctcggtattaccgccaccatgatatacgcgcaacacctcgccgtcggccttccggacccgccggtcgaccttctttaccccggtgt

SEQ ID NO: 71075 - DNA, 471 bp, Oryza sativa
  Clone ID: PAT_MRT4530_71584C.1
atgtgcgccctgtgccagggccaccgcaacagcagccgcgcatcagccgcagccgccgccgccgccgccgcggctcaatcgcgaccgccaccgcagatgcgcagtggtggagatggtggcgacgacggcggcggcggcgagcggcagctcggcaggtcgagcgctagccccagcgcgccgccgtggcccaccgccctcgtcccggcgttcacgtacagccggtcggtgaggcgcaacgtgggcggcgacgacggcgaggaggaggagacggcggcggcggcggcggcgtgctcggtgtgcctgggcgcgttccagctcggggagacggtgcggctgctgccggcgtgcctccacctgtaccacgccgagtgcatcgacccgtggctggacgcgcacaccacgtgcccgctctgccgctccgacaccggcgacccatcgccggtggacgccggccggataccgccggtgtag

SEQ ID NO: 71076 - DNA, 195 bp, Oryza sativa
  Clone ID: PAT_MRT4530_71585C.1
ctcgtgcaacaacagcagcagtctctatcatgatagagtagagataatgtacagtcagaaggggcaagaaaacaaacttttgatacaatcgactattcagagtttctaggatatacagggaaaagaagtgtgattactgtaacagtgtacaatgagcaatatattattggaatagaaggcatatgttttttctat

SEQ ID NO: 71077 - DNA, 1281 bp, Oryza sativa
  Clone ID: PAT_MRT4530_71586C.1
atgggggacgtgtctgttcagtacagggtgaatttcaatggtgtattgacagaggttattaaaccttctcgaggcttaaggcagggggatcccttatccccatacctttttttgctggttgctgagggtctttcgagtatgctgcaaggagctgaaaatagaggagatttagtgggaatcagagtgtgtcgtgaagcaccaatgatatcacacttgttatttgcggatgattctctaatactgatgcaagcagacaggaataatgctgatcatctgaaagcaattttggatacttactgtcaaaattctggacagaaaatcagtgaagtgaagtcgagtattttcttcagtggaaatactgcagtcgaagataaagctgctgtctgtggatctctagatattatgactgaagctttaaacgacaaatatcttggactcccagcgatgataggtgttgataagagtgattgctttcgacacctgattgatagagtgaacaaccggataaatggatggaaggagaagatgttgagtacaggggctaggagagaggattttgttgcttggcatcacactcggtcaggaattttttcagtccggtcagcttaccattgtcagtggaatgcaaagtttggtagcaaggagagactgcctgatagtgcaagtagctcgagcaggccggtctgggacaatatgtggaaactggaaagtccacccaagataaaaatctttgcatggagaatgctgcatggtgtgattccctgtaaaggcatcttagctgacaaacacattgcagtccaaggtggttgtccggtttgtccttcaggagttgaagatatcaagcatatggtttttacttgtaaaagagcaaagttgatttggaagcagctaggcatatggagcagaatacaaccgattctgggtttcgactggtcaggatatgttcttgtggaggaggtgataaggaagggtggaaaggtttcgcatctgaatgctattggaatggcggaattgatcttaacgggagcttggtatatttggtgggagagaagacagttggtgcatggtgaacgaatacagaaccctgctcggtcggcaatgtctattgctaccttaaccacaaactatatgttgtcaaataagaaaggtaaaacaaaaattcagaacggttggaagaaacctcctgaaggaatgctaatgatcaatgttgatgctgccttcgatattgactcgggaagtggagatactggggtggtgctgagagatcacttgggagcttga

SEQ ID NO: 71078 - DNA, 3804 bp, Oryza sativa
  Clone ID: PAT_MRT4530_71587C.1
atgaagtgggtcccgcttgtcagtgacactaggtggaggaggacagggctgtggcgccccggcgagcttctcgccggcgccggcgacgaacggtggccgtcctcacgatgcagccaaaagagaaaatgtagagtggaagatggcgaaactaatggcggtggtatcgcgggctgtggtggctggagtcaacgacggcggcagcgcgagcggcgggacctaggcgacgtcggtggcgcaatggcttggtcagcggaggctcgagtcgaccggaacggcgaagtggccgacggcggcgctctggacactgagagcggcgtcgagcttggcacaaggtgttaagagacatgattgatcaggtaggggaattgaatcacatttccatggttggaatgcggcgaagctcaccagagaagatttgcgaccgatcaaacatctggccagttcatgagccacctgattggagtttctattacagtgctcaatagaaattgtaccaaacccatcccacatcagcttgcaatcatcaaacacagacatagccgctgtagcagaaaatcctccatccatcatcgttgaaaccacctgcatacaatcagtttgtactataacatttttagcaccaatgtgttgtgccagggacagcccatctctcagcgcaaaagcctctgccatcggtgcatcaaggacatgtggaagaaaagcttgcgaagccgcaacacaagctcccaagtgatctctcaacaccaccccaatacctccacttcctttcttatttgacaacatatagtttgtggttaaggtagcaatagacattgccgaccgagcagggttctgtattcgttccccctgcaccaactgtcttctctcccaccaaatataccaagctcccgttaagatcaattccgtcattccaatagcattcagatgcgaaaccttcccacccttccttatcatctcctccaccagaactgatcctgaccggtcgaaacccagaatcggttgtattctgctccatatgcctagctgcttccaaatcaactttgctcttctacaagtaaaaaccatatgcttgatatcttcaactcctgaagaacaaaccggacaaccaccttggactgcaatgtgtttgtcagctaagatgcctttacagggaatcacaccatgcaacattctccatgcaaagatttttatcttgggtggaatttccagtttccacaggttgtcccagaccggcctgctcgagctacttgcaccatcaggcagtctctccttgctcccaaactttgcattccactgacaatggtaagcagaccgaactgaaaaaattcctgaccgagtgtgatgccaagcaacaaaatcctctctcccggctgaaatagggatttgtagaattcggttagcatcaataggccagaacaaggtatctatcaggtcttcatcccatccaccacttactggattgatcagttcttcaacttttgtgataatgttccttcctcgaggtgttaaaaccttcccattactgcttgaaggtatcaaactatcttcccatatattaacttgggatccatctccaattctccatatgtagcctttaaagcattccgaaccagatagaatgctttgccaagcataagaactaccctttttcggtcttgccctcaaaatatttccatccggatagtatttgcatcgcattacccttgcacacagtgagtcaggatcacacaggaatctccatatctgtttagcaagcatcgctcgattaaaacaatataagtccctaaaacccagaccacctctttgttttggaatgcacatcctccaccaagccttccaatgtattcttctgtgattttcatcatcaccccaccagaatcgcgcgattgcttcagagatacagtcacatatttttttcggtatcctgaaaacagacatcgcaaaaactggtatagcctgagcgattgattttataagcacttccttcccccctgtactcaacatcttctccttccgtccatttatccggttgttgactctatcaatcaggtgtcgaaaacaatcactcttatcaacacctatcatcgctgggagtccaagatatttgtcgtttaaagcttcagtcataatatctagagatccacagacagcagctttatcttcgactgcagtatttctactgaagaaaatactcgacttcgcttcactgattttctgtccagaattttgacagtaaatatccaaaattgctttcagatgatcagcattattcttgtctgcttgcatcaatattagagaatcatccgcaaataacaagtgtgatatcatcggtgcttcacgacacactctgattcccactaagtctcctctattttcagctccttgcagcatactcgatagaccctcagcaacaagcaaaaaaaggtatggggataagggatccccctgccttaagcctcgagaaggcttaataacctctgtcaatacaccattgaaattcaccctgtactgaacttttcttcctttcttctttttcattgtgtgtaagcactcataagctaccaaaacattatccgtgatcaacctgcccgggacaaaagcactctgctgatcacttattatttcagggagaagacactttagccggtttgctaacatcttagaaattattttatagaccacattacataagctaatgggtctaaattgagttactctgtctggtttatcaacctttggaatcatgacaacagttgtgtcattccatccatctggaattttcattgtatttattgcatcaagaacttctttaaccagatcactctccaacatatcccagaatcttttatagaaaacagcgtgcagcccatctggtcccggagctttcagatcacctatactgaacagagcatttttcacctcttcagctgtatacggtgctagtaatccaaaattcatatctcccgttacttttctctgtacatccagcaaagaagatccatctatttgtgtaacctcagccgagaagagattttggaagtacccataaactatgttactcattctgtcttcatcggtttgaaaacatccattctcatcaataagtcccttaattttctttcttcttcttcttggatacaatattctttccttgatcgtgattgggacaaaccgaacgaggggtttactcaaatctaagaaaaccctagctctgaggtatttaacaggattgattctcccctcatctactataactgtgaatggttgttcaccaaccttcttagcaaccctctctgctagttctctcttcttcatcaacccatcaggcaccccatgaatgcgcgtccaaactggaattttatccaacttataatcaaacacattagtgaagccatcatattctttaaggactacaggagctcctctaaagatccatggacctccttccatgactctgttccaatcaccaaggcattgaaattgtaccataaagagatttgaatccattaccttaaacgagatatcctgtgccgaagaccaggcgtttctcatagcattcaacagcgctgagtggctaaagggttttgtagtataaaccctaaaaagagcgagccagcgtacgtccttgatcagcccttccaattcctccgagaaatctaggtcagtttcctcctccccatgcatattcaacctcttcaatctctcttccagatttggttcggatcccatctctccatcacgcccagtctcctcctccgtagggcgcttggtttcatcctcggcagatgatcgagtatctgccat

SEQ ID NO: 71079 - DNA, 945 bp, Oryza sativa
  Clone ID: PAT_MRT4530_71588C.1
atgggtgaagccgtaagcgaggtcgacgtcgacgaggaggagaaactcgagggcgtgcggtgcggagggcgtgaccgcggtcaaaagtactcccctggcccttctcgtccccgcgtccagctggacaagaacctcttcgttggggcaacgacaataattctgggggacgggaaaacaaccagcttctaggactcgcactggctcgagaataagagacccgaggatatcgctccagctatcttggcggcctccaaacaaataaccaggactgtgcacgaggctcttgcccttaacacctggattcgggatattgacctactgcgtactatagatgcagaccatctatgctagtacgtttgtctatgaaccatgatacaatgcgttggccctctaaccgacctaaaggacctcgtcgtatggaagctgacggcaatggaatctactcttccagcacggcgtagaggctacaactccttggagcggcgggacgatttacaaccagaccatttggaagtgttgagctccacctaaatgtaagttcttcttctggctcattatttaaaacagagtctaaacggcggataggctaaaagaggtggtgccccccccaacttattcccctccatcttacggcagcacacctggtactgcaagctatttccaattgcatactgtccagaagaatctaggctgaaatataacggtggacaggagcagatctccgattgcaagagtcggacggatgtgcgacagttgaataacggtagtacaaaatctcacgcacgatgagctgctggtaattatggtgcgaacgaaatgccaagatttttaggcatgttgcctccactcccaccaccatcattgccaaaatcaaagaggaggcgcatacttggatcacagtgggagcgataaaaatcacagagctaatccctacaggagagtagc

SEQ ID NO: 71080 - DNA, 375 bp, Oryza sativa
  Clone ID: PAT_MRT4530_71589C.1
atggggctgcacgacggcacggactgggcgggtttgacccggttcccgatccacagccggcagcgctctaaggtgaaccggcgaatggcggctcgccggaggaagatgtacacggaatcaagggacggggaacatgatgaacaacttggattcgggacatgggagtcgctggcggccggcggcgaggcaccgaaggcagcggcggtagattccggccgcgcgataaatggtcgccggcagcggccgaattggtggcggagggggctcgggaaggatgtggggatgtgctgcacgcgggtcgaagcgaggatggcggtgggagagagagaaggcggcggcttggttgcccaaggtgaggagcaatctcgccagtaa

SEQ ID NO: 71081 - DNA, 236 bp, Oryza sativa
  Clone ID: PAT_MRT4530_7158C.1
tcgcccacgcgttcgcggacgcgtggggaggtatgtatcctaactactacattgctgagaggagcattccaaccgttaggcggtgactagggcctgaattgatttagaacaatggatcaaatgttctatatcaagtcatgcatcatcatgcgcgacagtggaaactcgatgtcatataaagctaaataaaagcacctatccacctcccgcgtccgaggacgcgtgggcggacgcgg

SEQ ID NO: 71082 - DNA, 4011 bp, Oryza sativa
  Clone ID: PAT_MRT4530_71590C.1
atggcgccagatgagggcgacggctatcgatctacaccagcatacgtcgggttacagatcgaactggcaaccggcggcgctgcgtgcagacaacggttgctaccgatctacatcaacaaatatcgtcgggctacggatcagatcggcgaccggcggcctcacggtgcggtctccgccccggactccgggattgcaccgtggattagggttctgggaggtgtgatggacaaagggggaaaaaagaagggggtggacctggaaggcctcttcctaggtcttaagcttgtcccggaggaattgagaggcatgaaaggatcttggtgcttgaagaagaaggatgccgaaaaaaaaaaatcaggcagtggggaagttattctctccacgagcaggggtatgtcgaaggaatggtgtaggcgttgggcaaaatttggtgtccacagagagggattagggctaaggagttgggagataaccttttcctattctctttcttgcaacgcggggggggggggggggaagagaagagccattacggaaggcccgtgggaattcggaggagatctcatcgtagtggattttgatgagacgaagaggctgaaagaccttgtattcacacatttcccagtgtgggtcagggtgtacaatctgccgttcggcttgatgaatgtggatactggccgggtaattgggaataaaattgggaaagcattggaggttgatacggatgaggatgggtcagccgtgggaggttatctgctggtgaaggtgctcatggatgcccgcaaagccctaatcggcggggtgatgatggagggtgtcgccggtgagaaggagaattggtgtggagtgaagtacgagttcctgccaaatttttgttattcctgcggcgttctgggtcatgtggaggagtgtgatgataaggtatggaaggaggaagagcagcaattcggggactggttgcgagtcctaccgatgaaacagcgggatgtgcgaggctggagctcggaagggggcagttctgggggttcgtttcagcacaggagtgtcgtatcctggaggaaaagtggagttgagaaaggaggtagcagcggtgtaggtggaaaatctgctagccgggatgaccctgaactaagggatgatgctgaaagcccgggtaaagggcatcccaagatccggatgggcggtgctccgaagaagctgacctttgtcggtgatggtagttcggggagtttgactgaggagagagggcataaaaagctgctggagattacggctccctcggagccgcaactagttccgaccacgggtgaagtagctagtgggttagatggagaggacgctcgggggaaggagcacagtaccatgcagcacactctcccgttggctgctgaaagtggtactttggatactgggcactcggggacgggagataagaggaaggccactttcaagcggcgtccgcgagtgatggataaggaagtcggcgccaaggagagcgcgattgctgatactcgaaagtgctctgtaacggaggagatggttgtgaccgaagaacggaagaaacagaatgctcaggtggctgtgagtgatgacgcttccaagttcgtggccttctggatatccagagggaggaggatcccgatgttctgtttatttcggagacgaaaaaaggtggaagggggagctcctcggtccgaaagttgtatggccaagtttcgacaggctttggaggactgccagctgcatgatctgggttttgttggggatgccttcacgtggaggaatcaccatcacctggcgtccaactacataaaggaaagacttgatagagcagtggccaatggtgcctggcgagcacgcttcccgcttgttcgcgtaatcaatggggatccgcgccactcagaccatcgttcggtcattgtggaaaccggtgccactgaaaaacaacaatgggggcaacctttggagattatgcagaagtttgaggctcgttggctggaggaagaagaatgccaggccagagtggaggaagcgtgggagaatgcattggaaggtggtcaaactcggctaatggagatccaaagccgggtcctgaaggaattatgggcttgggaccgcactgtcctgggtgagttgaagaagagggttaaaaatctaaggaaggaattggagaagtgcaggagggagccaatctctaaccggcaagttaacagagaacatttgttgcggtacaagttagagcggctgctggatcaacaacatatttactggaagcagcgagcacattctacctggttaaccaagggcgaccggaacacaaagttcttccatgcccaagcatcggagaagaagaaaagaaatacaatacagaagttgcaggatggccacggtggtttggttgctggaaatcaactaaaaagcttcatttcgaaccagtaccaacaactctttaggtcgaatgggtgctctcagatggatgcagtattacaatgtgtccaagcgcgtgtgaccccggagatgagagaaggccttgctgctccttatcagagagaggaagtttgggtggctttgaaggatatgggggatttaaaagcaccaggcgcagatggtattccagcaatcttctacaaaaaatttttgtcactagctggcgataaggtaaaggatgaggtgctggcggttcttaatggtggggatatgccacagggatggaacgatacagttgtggtattaataccaaagacgaaacagccggacacattgaaagacttgagaccgataagtttatgcaatgtggcatataaactgatctccaaggtgatagtcaatcggttgaaagttgtgctgctggaaataatctctccgtcccaaagtgcgtttgtcccgaggaggttgatcacatacaatgtattactggcatatgagctcacacactacttgaatcaaaggaagaaggggaagaatggagtggctgcgatcaagctggacatgagcaaagcttacgatagggtggaatgggatttcctgcgacacatgatgctgaggttgggcttccatgatcagtgggttaacttagtcatgaagtgtgtaacttctgtgacttaccggatcaagatcaatggggagcactcagatcaaatatacccacagagggggctgaggcagggagatccactttccccttacttgttcattatttgtgcggaaggcctttcagcgctattacagaaagcacaagctgatggaaagatagagggtattaaagtttgcagggacacgccaagaataaaccatctctttttcgccgatgattcccttgtcctgatgcgagctggccagaatgatgcgcaagagttgagaagggttcttaacatatacgaagtggcatcaggccaagtcataaacaaggacaaatcatctgtcctcttcagcccaaacacacttcagagtgataggatggaagttagatcagcgctatgtattaatcaggaggcaaaaaatgaaagatatcttggcctgcctgtctctattgggaagtcaaggaggaaagcttttgagtatattaagaggaaggtgtggctccggatccagggttggcaggagaaattactatcaaaagcagggaaggaaatccttgtcaaagctgtggcccaagctattcctacctatgcgatgtcatgttttgatttgactaaaggtttatgtgatgaaatcaattccatgattagcaagtggtggtggagccagaatgacaaggaaaataaaatacactggctgtcgtgggagaagatgacgctccctaaaaagcttggcgggccaggattccgggatcttcatctgttcaacatggcgatgcttgctcggcaggcatggcggctcctcctaaatgtagactcgctctgtgggcaagtctttgttgacgaaaaaatcgaacacaccggcctgggagatctgcttagctcctgtgcaagtccaaagattgatgagatgcgggcgtgccagtcagtttga

SEQ ID NO: 71083 - DNA, 294 bp, Oryza sativa
  Clone ID: PAT_MRT4530_71591C.1
ataatggcaacatgagagtaccaaggctggtagtgtttttaagctaaggcggccggacgcccttatccatccaggatttctgacgcgtgcatgcaccaaacgatataggggtcccggaaaaagagaaccaattgtctgtatgtctactactaggggcatgacagaaacaagcggggatgaacacaagtgaattttagagtgagactctctcctacaatagtctggaaatcctgcggagaaggcccaaccggtagttctaagccaaatatgggggagccatggctggcgaaatgg

SEQ ID NO: 71084 - DNA, 425 bp, Oryza sativa
  Clone ID: PAT_MRT4530_71592C.1
ctctaaatgtgtgggtttttttatttgctgtgttcttttggaaacatttcccctccatgtttttgatttttcatttgcggggtacatgagtggaactttaattacatcgggggtccaacgtttttttcaaaattttgcatttcatggactccttgggaaaaagaaaggggttaaaaaaggaaacattaagttttaggcccttcgggaaacggcaactaaaactcccttttgaactttttcaggggattttttattacatatcaccatacattaaggtgctaaggaaatccgggaagcccttcctctcttggattcccttgagttaaactcctcaacatttccagggaagttttgggttggtcctttgtaaccaattcaccccctttggggccctttagtaaattttttgtcccttggttttttta

SEQ ID NO: 71085 - DNA, 198 bp, Oryza sativa
  Clone ID: PAT_MRT4530_71593C.1
atggaggaggccgtcgaggcggagaagaaggcgcggtgctgggcgccgtggcggcagcggtgcaggggggcggcggaggtggtggccgggtggctgcggtccgaccctaggatcaaggtcaggttggagcttgacgtgggaaggctcacagtcaccggcgtgtacgtccaaggcggagagctcttggttcttggatga

SEQ ID NO: 71086 - DNA, 938 bp, Oryza sativa
  Clone ID: PAT_MRT4530_71594C.1
gcacgagggaaacaatccttgttagtaagagaaggttctgaacctgatcgcttctgggaagcattaggcggaagatcagaatactcgaaagaaaagcaagtcaaggattggcctgcagatccacatctgtatacttgtcatttcgaacaaggtctcttcaaggcaaaggaggtattcagcttctctcaggatgacctggtaactgaagagatattgatactggactgcgtcgaagaactccatatttgggttggacatcaatctggtgttttatccatggagcaagctcttgatatcgggaagatgttccttcaggcaggcattcatcaggacggacgacggccaatcgacacgacaatgtatatcgtcactgaaggggatgagcctagatttttcacgagcttcttcaactgggattattccaagcaaacaatgcttggcaactcatttgagaggaagctggcaatcctgaaaggaatttcacaaaagctggagacaccggagagaagcctacgcaaatcatcatcgtcttcgctgccgagaaggtcgccggggacatcgtcgtcggagccgaccacgccggagcagcgagcggcggcgaggacgttcgcctcggcctctaccgggaagctactcagggagagatcaccggccgcgctgtcaccgtcgctgtcgacgccttcgccgtctccgagaagccgctcctccgcctcctcgtcgccggcgtcgtggaactcgacgccgtccacgggtggcgcggcggctcttcccgccctcgctgcacgcgtcggcggaggcggttgccaccgggacccctcgccggcggtgagcttcagctaacggctcacctgcaactgcatatgcctgtaccattaagaatttgagattcagatgaaattcaaagaacatcggccatctttttaaaaaaaaaaaaaaaa

SEQ ID NO: 71087 - DNA, 576 bp, Oryza sativa
  Clone ID: PAT_MRT4530_71595C.1
atgcagaggctcgatgggtgcagatcccttagagttagtgccaaatccaccggcacggcgtcgcctacctccgcgctagggaggccacgctgctgctgcaacgacgttggcctgcggtggtggtcagcggcgaggtcgcgcacgccaccgctgcgggtcagctcattcaggtgcaggtcggtgtccggcagcgccacagggctcacgcgcgcgcctcacctcggcttagagctcgtcagcgaggaacgccaccatgtcgagcacggacaccgggcttgtctactagtcgtcgccggccgtgaacgcctggatgctgctcagcagcttgcctcagcgctggagcaatccacggtcactccggagatcgtcggggagggtgcgctgctacattgcaaagagccaaagattccagtgctctgggtggtggccttgccggtggaccgctgctgccttgcacggggcgtcgcacgggtcacgccctctaccaacgcgccgctcgacaagtactcgccccgccctgacaaatgtctgacaaatattgatgaagaaccggtgtctcactttggccttgtttag

SEQ ID NO: 71088 - DNA, 195 bp, Oryza sativa
  Clone ID: PAT_MRT4530_71596C.1
atgggcagcgtccccatccccctccgctcccccgatgggcggcgtccgcacgggaggcgcgtggacaggcggtggatcctgggaggcggcaagctcccgcggccacgccctcccctccaccagatccggtggccggcctcccgcggccggctcctgtgggcgacggcgctggggtcggttcgagtgctgatctag

SEQ ID NO: 71089 - DNA, 176 bp, Oryza sativa
  Clone ID: PAT_MRT4530_71597C.1
tctggactgtttgaatcttggctgtacgcgtgggggagttatctggtaaccaataatgactctactgcacaaggctgctcgatcatgcactacagggaggcaccgtcaagaatatgaactacaaggaataggcatatgatctggtacagataactatggattatgcatttaggatg

SEQ ID NO: 71090 - DNA, 2868 bp, Oryza sativa
  Clone ID: PAT_MRT4530_71598C.1
atgaacctctcggacgactggcgcttcctcttccccgtctcctccgtcttcgcgccgccgtccctcgccacgttcttcgccgccgccgcatcatacgggcccctcctcttctccccgctcccgccgaacgccacgctcctcgccctcccttcccccttccagccgccgcacccctcccggcgcgggcttcgccacctcctccgccacttcgtccgctccacctccttcctccccttcgccgacctcgaccccctctcgggggcgctgctcaccgcgccgtccccgcccttcccggcgccctccaacctgctcgccgtcctccgcgccccctcctcctcgcggtccctcgtcgtcttcttcccttccggcgagaacgcggagcaggtctcctacgttaccctcgaccccgtcgccgaccccaccacgccgctctcccactccgtgcagagcgatgggttcatgcaccccaggcaccgcatccagcagcttgccaccacggcgtcctggtcctcgtggccgtcgcggtcacgcgacagctctatcgaggggtttcttcttgctgcgacgttgtactcggtgaattggttcaaggttgagtcgcggggttctggctcccccgcgctcgtgcccgcggccaagcaggcgttcgacgctgctgttgtgcacgcgtgctggagcaagcatttgcagtcggagtgtgtagtgctgctggaaaatgggcagctgtgctggttcgatctggatacacggcgtggaggcaagatgaaggttggttttggcagcaaggatgacctgggggactggctaagctgcgagtacggggcgcaaccgtggacagtgatcgttgcgagcacggcggccatccttttggttgatatgagatttggggatcatggtgaatacaaggttttagcaagagttgggatggaagggttgtttgaaactgatccttttgtcaagactcaatgttaccttgcattctgcaaggctccgtttgatgattttcttatatcggtggtgacagagcgtcacctgatggtctttgatatcagacggcctttgatacccgtgttggcttggcagcatgggcttgataacccaaatcatattgctatgtttcgattatctgaactgaggccttctaaggagcatgagtgggcatcaaattcaggctttgccattctggttggttcgctatggagcactgaatttaatctattcttttgtggccctaaggagcaagacgctacagaaaatgctcccctatatgcttgggatcttccatcacggatttctttgataggtcagcactgcagctgcagcattggacttatggaagaggtgttcaagggggtcgttccaggacatggctctgcatctcaactaattaggaactacatcattggttaccacgtgcttccgaacacaatgttggagtcatcattcactggctttgctttgatccgtttaacatcatcggggaagttagagatgcaaaggttccgtgcctctggagatttacatgatgatgccatttgtgatgaatcacaacataagtctgtgggttctagctcatccatttctcttgacactcacggagaaaatttttctgaaagatatgagtttctgaagttgcattacctatctaaatttctgaagggcaatctgcgcagctcattggagaatcatgattctgatgtcaacaaacgttcccgccatattattattagtgaagatgtatcagtatttgcaaaggataactctgcgtcttgttctcagtcagtttcagatttcctatgcaatgctagtgcgcccatgaacattttcgaaattgcatgtcaaagcatattgagcagactatcttcagatatccttcttgttgccttctccaaatacaaggacatgcttgcaagcaccaataaaaagcgcatatatgaatatctggaagttcctgcatgtttcccaaatagtaataaacttcggccttacctgttggcaaaatcttcaagcattagttggaatctgacgagcaaagcaaaatctggaaattctcttgttggtccagtactccccatacctgttctgctcgcgatggaagatagcaacaagggtatagacagcccttctcgggaagattccagctcagtaagccatcggtgcagagaagttattgaagcctttgttcctgaaatatcaattgctaatacagataactgtaatggatggtctgcttcacaagaggtgaaagatgataaaccatattttgtttatgagcctcagactgataggcccactcttgatgaggctgctagaaagaaggataaacaaacacagaagctagatgacccttcatgtttgcatgctcctacagcaccacctatggatgaaaactttatgacatttgtttgtggaagagctggaattcctcattctggacctgagcaagctgcatccaatttgtttgatttcagcccagtgaggatgaaatttgagtctccagctatagacatacagcctgctgaggaaaaagtatataaatgcttgaagaagcaatttttagcatggcaaaacgatttcaagccataccaagacttttgtaactcatatcaaatacaaaagccaccgcagtaggcctttgcttatgctgatacttgtaatattgcattagaaagacttgggtttcgggaaagtatttctttcctgatctggagtatgcccctatatttgcatattatcattttgggtatttggatcaggtaggatgaacccacttgacttttgaatcattttgtaagctttagctaacatcttgcaatgctttatggtttcaatttgaagctaaaaaaaaaaaaaaaaaaaaaaaaaaaa

SEQ ID NO: 71091 - DNA, 420 bp, Oryza sativa
  Clone ID: PAT_MRT4530_71599C.1
atggcaatcgctggagcacctccaactacatctcatcagccaaagagtgggcagtatatggacatggatctactggcagctttgttttcccttactgcaacgatatttgaggtcagtcaagttcaagatttggtccaactggttgatgctattgcccctgtagatgctgcctttacctttgctgggaagctcattgagatggtaaaaaggaagatcatagaaagaatcgattttcttgtggatgaatggtcgagaattttgaagcctaccactaagatggtcatatcaatgggtgtcatgagctaccatggagcaaagcaaccgttcaagactcgtgcttcccttgttaaagaagcccaggaactttgggacaaaaagaaggaagatgctagctctgtcgaacgaaaccagatcacctaa

SEQ ID NO: 71092 - DNA, 1234 bp, Oryza sativa
  Clone ID: PAT_MRT4530_7159C.1
gtcaatccttcattaactgattaactctataataatttcgtttgccatgctgagcagatcaaacaacaacatccaaaccaaaaccaaaccaaaacagttgtttttcacctgtataatataattataaccataataattacaatcattccaagaatgacacccacatcgtcgacacctactcgacgaactgcttgccttcgaaggtctgcgcgaacatccagtccggcggcgcgacgctgtaggcgacgaccgtgcggcccctcccgccggtgacctcgaacgacagcggctggccgcggaggtcggcgtcgcactgccagttctggccccagttcctccccatcgggatccacccggtcctcgaccctttcaccttcaccgccgccacctccccgtccgccgccacgttcgtgatcagcacctgcaggaagctggcgccgccggtgatggtgaacctcatcccccctgccctgtcacagctcaccctccggaactgcaccggcacaatgtcggccttggccttggcgacgcggaggaacgcggcctccgacatctcgaagtgctccttggggaagttgcaccagccgccgtagtcgtcggagagtccgaggttgggcgcgcagaagtcggtggccgtcaccaccaccgtcgggctgccgcggaggcaccacagcacgtggttcacgcaccgcacctcgtagcagccgccgcacgcgctgccgcgcccgaacagcgcgccgctcacgccggcggtgtacctcccgtacctgaagatgtccaggtcgccgtacccacaggctccaccaccatcattcagcgggtgccccagggactccttgatgtaggtcgccgagcccatcctccactcctcatacccgccattgccaagccttatgcagccactcaagctcactccagaaagcagcagcagaagcaagaacagcagcactgagctcatcacacacacacacgccctggctctactctctgatgatcaatgcctctcttggagggaagaaaaatgtctgtgatggattggaggagagttcttggtgctgttctttttggtattcttgtgttcttggtctgaactcactgtgaactgtgaagtctgaaatgttgcagtgttttggcctgtggtgggagactggaatcgtgggtagtcaaagatgagaggagcacaggcacaacacagggggagagtggtggaaggggtccttcctttctgctctcg

SEQ ID NO: 71093 - DNA, 268 bp, Oryza sativa
  Clone ID: PAT_MRT4530_715C.1
ttggttttttatattcataggggtttttacttctttcacaaaaataagttattttcaagagagaaaacaaaactagaggtacaatcattaagacccgaaaatcggatagattaaaattctaaacaaaaaagcgtaaaactggacggacaaacatcccttgaggcccggagaaacccaacacaggcaaggcatcgcacacatctaggaatgccctgaagcaaagccatttgtctgaaaaagactgaccgatgtcatgacgacctacact

SEQ ID NO: 71094 - DNA, 468 bp, Oryza sativa
  Clone ID: PAT_MRT4530_71600C.1
atggagatgaagccgtccgcctccgacaagaaggtcaagcgcccgccgagccggctccagaagcacgcccccgcgacgctgcggctggagccgccgtccacgccgtcgcccaccggcgcgtggggcgacgggaggatgccgataccgctgctgtccccgctcgtcgtgtcgccgtcggcggcgtgggagccggacgaccaggcggcggcggcggcaggggcgccaaggagggagggcggcgtgcagggaggagcttggcgagaaggtagtagcggcgccgccgcacgttcgcccgtgtgcggcggtgaccgccaggcggcggatgacgccgcgaagtcgcccgcgcccgcgccctgcggtggtgggtggctgcacccggcgctgtcgacgccggtggcggagccggcctccctggtgtcgttcttccagtcgcactgcgcgctcgaggtgcacaacgcgccgcaatga

SEQ ID NO: 71095 - DNA, 308 bp, Oryza sativa
  unsure (1)..(308): unsure at all n locations
  Clone ID: PAT_MRT4530_71601C.1
tttgttttttttttttttttttttttttttttttttttttttttttttttttttttttttttttttttttttttttttttttccaaaatcgaaaaaaccaaaaaaaaagccctttttggaaggatttcccccccccaggggggtcaacccaacaaaggaaaggcccaaattgggggggatttgggggttcacccaagggaaaaacgaaagccccaaagcccaagggccaaggttttaaaatccaaggggtgttnaatatccctctgtgaaaaaaagaaactnnacgtcactagaaaaaaaaacttctt

SEQ ID NO: 71096 - DNA, 439 bp, Oryza sativa
  Clone ID: PAT_MRT4530_71602C.1
cgtctttttactctcctctgttcgcgccctcctccgccggcgcttgccgccgttcgtctgcgccgccaccgccgccgccatcaggtacgcatctggtgcccatagcgcactccggagtacagcttgggaacacctcctgggagctctatgaggctagagcctgcaagccagactgatggacagatgcccaacaacagtttttttgtatgacgccatgatgctcattaacaccttgttaaggggcatggtgctgctaagcatgtccgccgagctgtcctaggaaatggtgaacctaccgggataggtgacgtgaacaccggatgctaccgagctctccttcaccgtgagcaacctgttatcggcggcgaacatgcacgcgacagctgctcccgtggcctctacgccgttgatctggtctatggagctctgtgccttgacc

SEQ ID NO: 71097 - DNA, 625 bp, Oryza sativa
  unsure (1)..(625): unsure at all n locations
  Clone ID: PAT_MRT4530_71603C.1
ggaattgtaatacgantcactatagggngaattgggttccgggncccccctcnantttttttttttttttttttgaattatggtgncagtntcnnntttggttccttcnnnttgaaanaaaaantattncanatncngntactngtntanctgaanaaannannagaacnagaanaactgatgnatcatactgnanaactctcttgnantttcagctgactccaaaanntgaagaangganaaaacnncnaagnatnngggaanacnaanantctggntggnacnccganntcattannaacttcccaagtnganttcaacccngtcatcntctnccnatcttcttcttcttccatggancaaccctcnctagtgattcaagaanntcntgtttgcngggggagggcngattactggagggcatggangttnattgatcccaaaaaaagncccctctcntnggnntcatctttaacttcgtcccacgaagaaccttctnttncttnatcgggttganacccccctnttaatcnggatncccnggcgaaatggcgtttccccgtctggntaacgttgccccccctnagttangttangntncacccgggcgaaagaatccctgacc

SEQ ID NO: 71098 - DNA, 1490 bp, Oryza sativa
  Clone ID: PAT_MRT4530_71604C.1
cccacgcgtccggcatactaagcttagtgtgtgttgaatcggcgacgaagatgtcgtcgtcggcgacggtggtgccgctggcgtaccaggggaacacgtcggcgtcggtggcggactggctgaacaagggcgacaacgcgtggcagctggtggcggcgacggtggtggggctgcagagcgtgccgggcttggtggtgctgtacggcggcgtggtgaagaagaagtgggcggtgaactcggcgttcatggcgctctacgccttcgccgccgtgtggatctgctgggtcacctgggcgtacaacatgtcgttcggggagaagctcctcccgatctgggggaaggcgcggccggcgctggaccagggcctcctcgtcggccgcgccgcgctgccggcgacggtccactaccgcgccgacggcagcgtggagacggcggcggtggagccgctgtacccgatggcgacggtggtgtacttccagtgcgtgttcgccgccatcaccctcatcctcgtcgccggctccctcctcggccgcatgagcttcctcgcctggatgatcttcgtcccgctctggctcaccttctcctacaccgtcggcgccttctccctctggggcggcggcttcctcttccactggggcgtcatcgactactgcggcggctacgtcatccacgtctccgccggcatcgccggcttcaccgccgcctactgggtggggccaagggcacagaaggacagggagaggttcccgccgaacaacatactgttcacgctgacgggggcagggttactatggatggggtgggcagggttcaacggcggtggtccgtacgccgccaactccgtcgcctccatggccgtcctcaacaccaacatctgcaccgccatgagcctcatcgtctggacatgcctcgacgtcatcttcttcaagaagccctccgtcgtcggcgccgtccagggcatgatcaccggcctcgtctgcatcacccccgctgcaggggtggtgcaggggtgggcggcgctggtgatgggggtgctcgccggcagcatcccgtggtacaccatgatgatcctccacaagcgctccaagatcctgcagcgcgtcgacgacaccctcggcgtcttccacacccacggcgtcgccggcctcctcggcggcctcctcaccggcctcttcgccgagcccaccctctgcaacctcttcctccccgtcgccgactcccggggcgccttctacggcggcgccggcggcgcccagttcggcaagcagatcgccggtggcctcttcgtcgtcgcctggaacgtcgccgtcacctccctcatctgcctcgccatcaacctcctcgtcccgctccgcatgcccgacgacaagctcgaggtcggcgacgacgccgtccacggcgaggaggcctacgcgctctggggcgacggcgagatgtacgacgtcaccaagcacggctccgacgccgccgttgcgcccgtcgtcgtatga

SEQ ID NO: 71099 - DNA, 983 bp, Oryza sativa
  Clone ID: PAT_MRT4530_71605C.1
cacgcgaggaccacgcgtccgcggctccacacttctcagcccgcccgctcctcctcctccccggcgctgcggctacacaacgcaacggcttcccggcggcacagcggcgaggaggaggtccggcaaggagatagaaaggagaagtgctcaaaatgggggcccttttgagctcccccaacagcaagaaccagccatgggagcatggtgaagcttcaaaggcagattcctccaagaagctgcggatgtcggcgccgcctctgtccggtggctacgaccaccccgggctgatcccggggctcccggatgagatctcgctgcagatcctcgcaaggatgccccggatgggttatctgaatgcaaagatggtttcgaggagctggaaggctgcgatcactggcgtggagctgtaccgggtgaggaaggagctgggtgtgagtgaggaatggctgtacatgcttaccaagtcagatgatgggaagctagtgtggaatgcattcgatccggtttgtggccaatggcagaggctgccactgatgccggggatcagccatggaggagaatgcaagaggggcatccctgggttgtggttaggggatttgttgagcgccggcatcagggtctctgatgttattagaggctggcttggccaaagggattcattggataggcttccgttctgcggttgtgcaattgggacagtcaacgggtgcatctatgttttaggtggattctctacaggctcggcgatgaaatgtgtatggaggtatgatcctgtcagccatacgggtccggatgctcggtcgatgagcaccgggcgcgcgttctgcaaggctagcctgctgaacaacaagctgtatgttgttgggggaggcaccaatcgtcaaagacgggctgggtacgctgcacatccttccaggtgaatgacccaacgacaggaattttggtggaagagcctgacatcccgttctcgaaagcgcaagctc

SEQ ID NO: 71100 - DNA, 258 bp, Oryza sativa
  Clone ID: PAT_MRT4530_71606C.1
gcgctgtggtgggaggtgtcggcccaccgcgtctccggcgtctccggcgccggccatgccgacgcgctgcggcggctggaggcgtgcgcgcacgtgccggcgaggctgctcacggcggtggcgtcgtcgatggcccgcgcgcgcgcaaggcggcgcgccgccgcggacaacgaggagggctgggacgagtgctcgtgttctgaagcgcccaacgccttgggtggcccacatgtcagtgacacagctcgtcagaaatga

SEQ ID NO: 71101 - DNA, 2430 bp, Oryza sativa
  Clone ID: PAT_MRT4530_71607C.1
atgtcgccgccggcagcaggagggctcgccggagcccgcggcgagggcggcggagcaggggtggggagggtcttcgtgggcgctgggtgcaaccgcgtggtgaacaacgtctcctggggagcttgcggcctcgtcgccttcggcgcgcagaacgccgtcgcgctcttttcccctttgagaggtgagattgtgacgacgcttccggggcacaaggccacggtgaactgcaccctttggttgcccacgaagaaggatgtgctccaaatccgctccagggagagacactatctattatcagtaatttcttatgttattatcatggcaagggagattgattaagtaaaaggagagtggactcgtatgttgtaacttcctgtgatgcacaaaaaaaagatcaccaatattgctggaaggatggtgtcagatactgtttcaatatttgcctccacctcctcagatggaactgtggtcatttggaaaatggaagatgaaccaactagtgttggcagctgtgaagtgtcttgtttgcattctatatccgttggtccaaagccaatggtttcactttcattagcagtattgcctgggcagggaggccatctcattttggcaatgggaggtttggatcacaaggtccacatttattgtggggatcagtcaggcaagttcattaaagcttgtcagcttaaaggtcattctgattggattagaagtttagacttctctttacctgtgatgatgggcagtgaggagcacagccttttccttgttagctcatctcaggatagaaccattcggatctggaaaatgaattcggatgctgtttcttctgctcacacaacacccagaaaggaagatattgggattgcctcctatattgaaggtcctttgtttgtgtccagtaatacacattaccaggtatcattggagtcccttctcgttggtcatgaggactgggtgtattctgtagaatggcagcctcctacgctactaactgatgatgaagctcatcagccaatgagcatattatctgcatccatggacaagatgatgatgatatggaagccagagaaaaataccggtctttggataaattcagtgactgttggtgagttaagtcactcagcactgggattctatggtggccattggcagcctgatggcaaatccatccttgcacatggatatggtggatcgtttcatatgtggagggatgttggactgggttctgaaaactggcagcctcagatagtcccatctggtcattttgcacctgtatctgacttaacatggtcaagatctggtgaatatctgttatcagtcagccatgatcagggtaccgggaaccaccggttcgttagtggcgccgatgaaaaggtctctagagtctttgaagctcctttgtcatttttgaagacccttcaacatgcaactttgttgaaaactgataactctggagattttgacgatgtgcaagtacttggagcaaatatgtctgctcttggactttcacagaaacctatatatacacatggaccaagggaaacccaaagcagtatttctaatgacgggccagattccatggagaccattcctgatgcagtgccaactgtgttcactgagcctcctgtagaggatcaactagcctggaatactctatggcctgaaactcacaaactttatggccatggaaatgaactcttctccatctgctgtgatcatgaagggaagatcattgcatcatcttgcaaggctcaatcagcaccagttgctgagatctggctgtgggaggttggaacatggaaagctgttggccgcctgcaatctcacaacctgacagttacacagatggagttttctcgtgacaatgcttttcttttgagtgtatcaagggatcgtcatttgtctgtcttctcaatcaggaagacagatgatggagcagagcatcatcttgttgcaaagcttgaagcacacaaaagaattatatgggcatgctcatggaaccccttcagctacgaatttgcaactggatcaagggacaagaccgtcaagatatggagcgttcaagattcatcttctgtcaagctgctcgtgacgttgcctcagttccacgacagtgtgacagcattggcctggacaggccgtgaccgtgctagtaatgctggcattctcgctattggcatggacaacggaatgatcgagctctggaacatttcaggggggagagcctccactgacagcagcggctcaggttcatctccgctcagctttgcatgcatgctccgttttgatcctctgctgtgtcatgtatcaactgtgcaccgtttacggtggcagaaatctgactcatccgatgagaaatcagcgctacagttagcttcttgtggagctgatcattgtgtaagggtgtttgaggtccgtgacatttga

SEQ ID NO: 71102 - DNA, 2064 bp, Oryza sativa
  Clone ID: PAT_MRT4530_71608C.1
ccacgcgtccgatcagttaatactcggtttgagatggcgatgaggcgatgagatcattgccttttcggtcgaatctagcagagcggcgagcaacccccacccactttgactccgatcctccccgcccccagcgcgatagcccatccgatcccaaattccggcgagatggcggtcagcctgtggcgcgcggtgatgggcgcggccggcggcggcggctcctcgtcgtcgtccgcggccggcggcgacgcggggggcggcgtggagttctggcacggcggggagcgcacggggtggctgaacaagcagggggagtacatcaagacgtggcggcggcggtggttcgtgctcaagcaggggcggctgttctggttcaaggacgccgccgtgacgcgcggctcggtgccccgcggcgtcatccccgtcgccacctgcctcaccgtcaagggcgccgaggacgtcatcaaccgccagttcgccttcgagctctccaccccgaccgacaccatgtacttcatcgccgactccgagaaagagaaggaagagtggatcaattccatcggccgatccattgttcagcactcccgctccgtcaccgacgccgaggtcgtcgactacgacagccgccccaactccaagcccccaccgcagccgaagacgagcgaagagagtgaaccgtcagctggaatattgggtggttcaagtctggctatccatgtctccatcactccatcaagtcctttgaaatttgaatttctggatcttgtcttcttcaactttgtcccttaccactcactatggtcctcgatgggcataaagactgttttttcaatggaaaaccttccgcaatggaaaacccggaagcttgggcctctgggcctaaaattccattacgtaaaggctgggaaacacccggaaaaggtcgagctgacctgccttgctaatgctaggtccacctcccggttggcgcccgcgggaaccgtccgggctgcggtcgccgcctatggccgcggcgccggcaagggcaagggcaagcggcgcgtcgtaggcgctttccacgcgccgcccggccgccgccggacggcgctcgtcgccgcgctcccggaaccccttcagccgctctcgccagcgcaggacggcgccgtggcactcgcgtcgactgaggctgatggtggggaggaggtccatggggatgtggcttccgcagaaatctcgtctccctctggtgttcttgggaagacggtgcgtgttagatttgtgctgaagagggaatgcacgttcggccagagcttccaccttgtcggcgacgacccggcgctcggcctctgggatccgtcgaaggcagtgcctttggattggtcagaaggacacgactggactgtggagaaagacttgccagccaacaagttgattgagtacaagttcgtgctgcaagatttgtcgggcaagttgcattggcagaatggtcgtaatagaagcgtacagacaggtgaaactgcaaacattctagtcgtatatgaagattggggtaatgcaaatagtcagacagtagaagaggagggtaaagtgtccattgggatggaggagggtaaattgtccgttgggatggaggaggctgtagttccagatgatagtgaaagcagagatgatattattgtagcagatgagctacaggtggatgacaatctagcggtcatgcaaaatgaatctagtgttcgagaggatgacaagaaatcaacagttgggacagttacttctgttcaagctgaattaatgaagctacatgaagctaaccaaccagagttaattgtagatgaaccacaaattcaagaggcgcttcctgaaacagcggacacagaaccagagaacggcggtgtggcaacgtgcgctgacgaccgttatgccgaaagtacagatgatgacggtgttccagtaggaggtacagatgatgacggtgttccagtagaaaatcggtggaccggtgcttttgaacatgagttgctttggggttggaaggccctgcagcagctactcatgagcctgggcttcaagatggatacatcatga

SEQ ID NO: 71103 - DNA, 2116 bp, Oryza sativa
  Clone ID: PAT_MRT4530_71609C.1
atggaaagctcttcttgcgttcagcagccagtagcccaacaaggcccattgttcgggttaaacgaacccaaaaccgtacgaaagcccgagaaaattgccttcgtctgcgccccgcgggctctcgtcccaaccgctcaccggcttcccgcggcggcggcggcggggctccatgctcacggtgaccctcctggacgcgcacctcgcgcggtgcagctcggcgcgccacctcctccagatccacgcccagttcgtcgcgtccggtctcctcgccgacgccttcgccgccagccgcctcatcctcttcaccacctccacccgcctcctcccgctcccgttccaccactcgctccgcctcctccacgtcgtccaccgccccaacgccttctcctgcaacatggtcctcaaggcggcccgcgagcatgggctgccgcacctgtgcctcccgctctacgcgtccatgtccgcggcccccgactgctacacccataccatcctcgccgccgcctgcgccaccaggagggccatcgaagaaggccgccaggtgcactgccacgccgtcaggcacgggttcgggcgcaacctgtacctcgcgaacgcgctgatgagtatgtactccgcgtgtgggtgcctcggcgacgcgcgcaaggtgttcgacgcgggtcctgtttgggacgccgtttcttggaacacgatcctggccgcgtacgtgcaggctgaggatgtggaccaggcggttggggtgtttgcacggatgcctgaacggggtgctgcggcggtgagttcgatggtgtcgctgtttgggaggagaggaatggtggacgaggcgaggaaggtgtttgatgtggtggagcgcaaggatgttttcacgtggactgcgatgatttcttgctttcagcggaatggcaagtttgcagaggcgttggctttgttctcagatatgcgtggggaggggtggcctgtggatgaggcagtcatggtctgtgttgtcgctgcctgtgcacggttggaggtaactcggaatggggagatgtgtcatgggctggctttcagagctggccttggctcgaggttgaacgtccagaacgcattgatccacatgtactcaagttttctgaatgttgttgcggcacgaagattgtttgacagtggccagtgtttggaccagttctcttggaactcgatgatagctggctatcttaagaatggctctgtcaaggatgcaaaggaattgttcactgtaatgcctgacaaagataatgtttcttggactacaatgatatctggttgtgtgcaaaatgaccagtcctcagaggcactcactattttcaacaacatgcaagcccaaggaatcaagccagatgaggttacgcttgtaagcgtcatctctgcatgtactaatatgtcttctctcgagcaaggcaagtcaatgcatgagtacataagggaacaccaatataccatcacagtcatacttgggactagcctcattgacatgtacatgaagtgtgggtgcttagaatctgcattagaagtcttcgatacaatggaagaaagaggaacaccttgctggaatgctgtcattgtggggctggccatgaatggtctggtgatgaagtcccttgacatgttttcggagatggaatcatctagcactgccactccaaatgagataactttcactggagttttgagtgcttgcagacatgctggcctagttgaggagggccaacatttcttcaagttgatgcagcacaagtatcacattatcccaaacatcagacattatggatgcatggtggatcttcttggacgtgctggatatgtcaaagaggcagagaatctgattgagagcatgcccatgtcaccagatgttccagcatggggtgctttgcttggttcctgctggaaacatggtgataatgaggttggagaaagggtggggaggaagcttgtcaatctagatcctcaccatgacgggttccacactatgctatctaacatatatgcttcagaaggaatgtggcaacatgtaaaggacctaaggggctccatgaaacaatggcatgtcccaaaaattcctggttctagtgtggttgaatcatcactacctttgtga

SEQ ID NO: 71104 - DNA, 255 bp, Oryza sativa
  Clone ID: PAT_MRT4530_7160C.1
atggcgcgcaacctgatggacgcactccagaacgatattaatatctggaaagtcaccggccggaagaaagagctcggcacgtcgactgcaccggtgaaaaacacaggatcggtggccgcccactgcaccggcgagcgcaggacgatccaacacatgtgttcccgagcgaagccgtgctcggacaccggagtagctagctttattctcgccctcatggaaggcacaaagccacgccctcgcccacaactaaactaa

SEQ ID NO: 71105 - DNA, 246 bp, Oryza sativa
  unsure (1)..(246): unsure at all n locations
  Clone ID: PAT_MRT4530_71610C.1
aacncttaaaaggccaaacttgtttntgtganccaagncgccttcnatgttctgtaanatctgccagtanggtgtagtcgnagntcagnncttaagatgaatcttanccatatgaancctgtttttgaaaagttctggtnggnccatgctgnggtctctctnggttcccgtatcgtancctggtanccttttnttttgctttgtgatcatntgatgcctnntaaaaaaaaaaaaaaaaaaaaaaaa

SEQ ID NO: 71106 - DNA, 495 bp, Oryza sativa
  Clone ID: PAT_MRT4530_71611C.1
atggaggggctcaccagcgtgcggggaagggcgattttcgacggcggttggcgacgggtgaacggcggacaagatggccccgacctcacaaagccaacggcggcaacgaagcggcgcgatggtggcactagcggcggccagaggcggcggggcggagagttcggacgtggccgggacgtggctctatttcgccggcgacgtggggagggctccggcggccggaggttgaagaaggggccgacaggtgggccccacttgtcggtgattttgagaggggaggaggcgggcgccagccaggccacggccacgggccggcccagtaaggaggactggcgcggaaggcgtattgggccgacggcccaagaaaggaaaaaaaaggaggatttcgaatccccgccatttgtgagcgtgcgcgcgtgcgacgtggggtgtggaatggagcggagaaggtgggcgacgatggttggagctagggctccggtggccggaggttga

SEQ ID NO: 71107 - DNA, 821 bp, Oryza sativa
  Clone ID: PAT_MRT4530_71612C.1
cggacgcgtgggatcatcactcgcacccggccgcggccacgccacggcacgcatctattccatcccattcttctctcgcgcggaggcggcggcggcggcggcggcggcgacgacgaggagggaggaagatgacggtggggatgatcaacgcgaacccggtggtgcacgagaggccggagcgcgccgcccacccgcaccccgccgacgccatcgacgccctcgacgtcttcgatacggtgcgggacatcaaggacccggagcacccctactcgctggagcagctcagcgtgctctccgaggagtccgtctccgtcgacgagaagctcggccgcatccagataaccttcactccaactgtgcagcactgtagcatggctacagtgattggtctgtgccttcggcttaaattgatgcagaactttcctccacatttcaagattgacattaaagttgctccaggatctcttgctaatgaagaatcagtaaacaagcaactgaatgacaaggagagggtagcagccgccttggagaaccccaacctacgccagttggttgatgagtgtctttgttccaacgattcacactcacactaacacgtccttgcgcctgcctgctgtatagtaataatcatgcatgttgcatgtgccctgtgttatagctggttatgtataatcgcggttactatgtgccattatttttgccttcagagttgtatgcaaccgagaatataccttatgcaccagtccttcagacacatagtatggctatggctatgcatatgctgcttgagtgcttgatgtaccattcgtatataagagaga

SEQ ID NO: 71108 - DNA, 135 bp, Oryza sativa
  Clone ID: PAT_MRT4530_71613C.1
atggatggcaaggcccgcgctgcttccatttcggccgctgatgagaacatccttgaatggaacgggcgcccctcgccgttccccgtcatgcagtgctccggccagtttcccggtgtcagtagccataacgagtga

SEQ ID NO: 71109 - DNA, 309 bp, Oryza sativa
  Clone ID: PAT_MRT4530_71614C.1
atgacggcggtagcaagctgcacaggtgtggatccactgcccctagcctcccagggaagaatggatccccccttcaccgttcttaggagcagcagagcctcggtgataatgacgacgacgtcgatggcggcggtggctagggtgacgacaatggcagctagggggacgatgacaatgacgataagccgagcgaacgacaaaccgccgcccccgaccctaggaggggtgactagctccgcctccctcggcctcgtgcacggcgttgattgctgcggcggctactacggctatggtgataccgacagatag

SEQ ID NO: 71110 - DNA, 1491 bp, Oryza sativa
  Clone ID: PAT_MRT4530_71615C.1
atgacagcggagagcaatggcggcaacagctcggcggcggcgacgacggcgagcaatggaggccggcggagacacgagctggtgccgaagctacgattgcctccaggctaccacttcgtgccctcggatgaggagctcgtcgacttctacctccgcggcaagatcgagcaacgtaggccgcccatggacttcatcaacgaggttgacattatgagcttcgatccagtcaaattgatcgagaaatacaagggttacggagagaatagatggtacttcttcacagtgaggaaaccatcgaagacgaagaaaaaggacgagccaaataggaaggtggtggtggatggggtagaggagggaagctggagcgcgacggggagcgtggcatatatctgtgggaaggatcacgagactgtcattggcaccaagagggttctcacctacaaatcagctcgctctgctgaggaggacaagtggagcatgcatgagtatgtcatgttagataaatcccagatcctggatacaactagggatacaatgtcgatggatcaatatgttctgtgtgcgatacagttgaagcagacatacgaggctgaaaagaaggcccaggaggaggaggagagaggcgtcaaacgcaagagaacggcaacgaggaagaggagaaaaggagacattgatcaaactacttcccaggagcaagaagatcagcagcaggagacaccaccacctggagatcctcatgatcaatccgttgtagatgccccttattattccacgcaaatggcgttaggaggagaagaagaagttgcgccagttccatggtgcgccgattgcatggcgcaacctgatcgaatcgaatatcctgcagtgtggtacaatcagcaggagcaacagccatcgcagttagttgatcgatcgatgatgacacaaggctacattggagatctttcttacattcagaatcaatttgatcaacagcaggcacatgatcatggtagcattaatgcatttgacgaggctctcgaccaatgccatgacaccaatttcgcatgggataatgctggtatctatcctggaaataacttgctagatggcaacttggatgatgatactcaggatcagtttggcaatcaatctactcttggtgcattaactggagaattagagtatggcacgggctaccagttccatgacgcactccaggctacgccaggttctgatgatgcatctgctcaatccatgggaattcaacctgctgctggacattccatgggagatgatgatgagacatgctgtaatgatgatttgtcgtcactccttgctgatatttcgagaatcttactagatggcaatggtgttataaacaatgaaggaaacccagagggaagtaatcagggcttgcacatctgcaaagatggacaccaatggccgttagaagagagcacaatgccaacggttgagtgtgttctgcagcatcctggagagtctgcctga

SEQ ID NO: 71111 - DNA, 613 bp, Oryza sativa
  Clone ID: PAT_MRT4530_71616C.1
agagcagagaaaccttcgatctgagtttcccgagatcgacgagaagcatcgcatgcggaaccaaggtgaatgagctccagatcgagattgaagagacgatgaagacgaaggatgcagaagcatcagcattcagagctgacaagataacaatggagaaaacattggagacactgagcttggagatgaagaagattcatgcagagaaggatgctgctgcagccatggttcttcagaaatccgacgaatctgaaaatctcagggctgaactgaagaatctccacaaatcgatctccgagctccgcatccgctgcaacgatctcactgatcactcctctcgcctccaagctgacaagaattcagtcatgagagctctgagcaacgagaaatccgaatccaccaagctgagactgaaactcagggagctcgagagctatgtcagcaacaaggacaatgagattggggttctgaattctgaagctgaggacagagaagggatggtggatggcatgagcaggcagtttgagcagctgcggatcgcgccgctctagaggatccaagcttacgtacgcgtgcatgcgacgtcatagctcttctatagtgtcacctaatcatt

SEQ ID NO: 71112 - DNA, 738 bp, Oryza sativa
  Clone ID: PAT_MRT4530_71617C.1
ccggcgcgctgcctctcccctctccctcagctccgctccgctccgcccgcgcgccgcgcgcacgtgcgcgggagcggcgccgagcgctcctcctcctccgctctgtccgcgcgcgtgcgcgtgagtcaccgcgccgagcgcctcctcccctcgctttccttctcctctccctggcgagctccccgctcgcaaagccggcccccgcgcgctgttgttcgcgcgcgcgcccgcgtggtcctcgcccgcaccgcgtggtcgccgcccggccccgctgccctgccgcgcctgcagccgctcggccccgcagccagcgcgcgtgctcgagccgcgcctctccatccgctgcgccctcccattgcaagccgcgcgcgcgtgccgagtggccgaccatctggtcgccgccgccgtcaccctctaccgcgccagcccgcgcctatcgcccgtgtcgtcgcgccgctccaaaccgccccgccgtcatcgccgtcgtcatcgcctcggccccgccactccgcgcgcaagccgccaagggacggaggccgagccctcctccctctgcctcgacgcccccgctccccttccccttttcccaaagaagaaaggggcgagcccccctttctctccctcctttttccccttttcctcccgccggcgtcatcctccctccctcctgtcgccgttttggccgctagccggagcgacagctcgcgccttgaccgccaaagtcggtttccaaactga

SEQ ID NO: 71113 - DNA, 402 bp, Oryza sativa
  Clone ID: PAT_MRT4530_71618C.1
atggcgcgggcgagaaacagggaagattgggaggggaaaaggggaagggagggcgcctgggtttatagggggcggcaatgtcggtttggaaaccgacttcggcggtcaaggcgcgagctggcgctccggctagcggccaaaatggcgacaggagggagggaggatgacgccggcgggaggaaaaggggaaaaaggagggggagaaaggggcttgcccccttgccgatttgggaaaaaggaggaggggagcgggggcgtcgcggcagagggaggagggctctgcctccgtcccttggcggcttgcgcgcggagtggcgggtccgaggcgatgacgacggcgatgtcggcggggcggtttggagcggagcggcgacacgggcgacaggcgcgggcaggcgctga

SEQ ID NO: 71114 - DNA, 161 bp, Oryza sativa
  Clone ID: PAT_MRT4530_71619C.1
gacacgcccaggcgcatgtgcagagtaaggccgcggaaaacccctactgcctgggctaactggttaccaccggcagggtccatagcatgaaagaatgtctgcatgcactgatgtctttcttatgaaggagatacgctaggtgaactactcgacctacacca

SEQ ID NO: 71115 - DNA, 307 bp, Oryza sativa
  Clone ID: PAT_MRT4530_7161C.1
atgagagcaatgctttgacttggcatcggacatgccaattgctgtcgggtcccaaaagccggcaacttgatgtgcagatgacagcgctgcatcggcagcagatggcaccgagccgtcagctaatagctcggctgtacccggttgacacggcataaccaaccgtcacaacctgcagacagagactagagcctctggtgctgctgacagtcggggacagcgatagcagctctgacgaccagacaacgcggatggtgcggaccatgacacgggcgatccggagcacggaagagctcgtcaagcacctgac

SEQ ID NO: 71116 - DNA, 378 bp, Oryza sativa
  Clone ID: PAT_MRT4530_71620C.1
atattttggaaattgaactcctgtgtttttaaatttttttttttttttttttttttttttttttttttttttactttttttcgggggggatacaaaaacaaacacaaaaccccaacgggcaaaaacaaaggggggggaacccgaaaaaaaccgaacacgaccaaagccggagcacaaacaaaaaaaaccgggagccacggatggactcacacggaaagccaagcccaagccaaagagactaaactgggccctgggccataagccggaacaggccgaccccacaaccaaaggaaccccaattgccagagaacccaggcgacaagcttgaaaaacaaaaacgcaggagccctcccgcccgggcccaaaactgcccgaacc

SEQ ID NO: 71117 - DNA, 189 bp, Oryza sativa
  Clone ID: PAT_MRT4530_71621C.1
atggcagttaaggaccggttcacgggaaaccctgggagacttaccgtgcttaccacaagcgggagtgggtgtgtcttgatgccttcggaaagtattgccgatgatgaattgggagtaagcttgggagaaaataaactccagacgatcgagatatcatgtgggatgaagaacaatgcacatggttggtga

SEQ ID NO: 71118 - DNA, 2534 bp, Oryza sativa
  Clone ID: PAT_MRT4530_71622C.1
atgccacccctctccccttcctcctcgccgccggcgacggcggcggcggttctccgctgcggctccccgtcgtgccgccccgtcacacatgagctgttcaggcagaagttgagtttcatggtgtcatttcaagctcaacatatgagatgtgctcctcatttgatcaaatcagttgttaaaggtattagagcaaatatcactgatggcgagaatggagcaactgaaccagctagggagctattggagcggctgtttgcgaagacgcaaaggttggataccagtgcttcccaggatagtgagctgagtatgagcattgatgtactgaagtctgaatttgaggccgccttgtctaccttgaggaagaaagagagggatctccgagatgcggagaatcgggtttcagttgatcaggtacgcctgaaccgggcgaagaaggatcttgatcagagagagcgtgggatcaatagagcatatgcaaggcaacaggaaatggagagatcactgggtaaggcaagtagagatctggttttacaagtgaggcagatcgataacctgaagcttcttgttgatgagcaagacaagaaaattgccagctcacaagatttgctttctcagaaggtaactgaagtggaaaagcttaagcaagatatgttgaagaagaatgaagaagtaaccttgatgcgttcagagatcaagtccaaggaacagctgcttcttgaagctaatcaggttgctgagcagcaagaagcaacaattaaggagctccggagtgaaattaaaagaaaagaaattgatttttccagatcgaatgaattgagaaaggccaatgaacagaaactaaaaatcgccgagcaagaacttgagaggcagaatatgggatggttagcagcacagaaagagttaaaggaagtggcgcaactagcatgcaaggatatggatggtatcaaggatacagtcagtgacttcaaacgtgtgaggtctctgctggatgctgtacggtctgaactaatcgcttcaaaagaggctttctcctcctctcgaaaacagatagaagatcaagcagtgcagatgcagaaacaagttcaagaactctctggtcaaaggctattgctttcatctttcaaccagaacttggaagctgctcggttggagattcaaggcaaggcaaaggagctcaatgctgcacagtctcgctgtcatgaacttgaatcactgttacttcaggaaaaggagaaggttgagtctctggaagcagtgttaacaaaagaaagagagagcttagaagagaaaaccaaagaagttgagttgcttcaaaaggcgctcgttcagaaggaaaatgagcacagcaattcattaaagcttgttgaaataaaagaatctgagctgttagaagcccgaaatgaagtccaagatatgaaatcaaaggtggaatctatccaaatagctgttcaggagaaggattcagagctttctgaaacacaacgcagacttgctgaagtgaacagtgaagttgttgaactaaagcagctgctagatagcaaggaagatcaacttgttcaggttagaaccgaattacaggataaagaacaacacatacagacactacagaataaattggatagcatgaaattcagttgctcacaagctgaatctgtggtgcaaaagatagctgaactcactggcaatcttgctagttcagtagaaggcgaagagatggacatttatgcattgctggatgatgagatttcgagcacaggtacagccctcaagtccaatttgcacaagcataatcaactggaggctgacatagagatgttaaaagaatccttgcatcagaaggacatggatttaagagctgcccatgaagcacttgacgcgaaagatcaagagctgaaggcggtaatgagaaggtgggatgtgaaggaggaggtagacaagttggaagggttcctgaaagatcctagtgacatcaagagaccttctgatttttccgttcatatggggctccaaaatcttcaaactgaagctgcggaggtggaggcacttgctgctactactacattgaagaaacttgcagatatggctaagggattcctgagaagtggcaaaactgattctggcatcaatctggttgcatcgccaagtgtaaacagtactagaattgtttccaagaccaaaccaaacaaggaaatggatatgattcttgatgctgaaaaggaaattgccgggctcttttcgttgacagaacagctcattaccgaggctggaatagatgttgctcaccaagcatagcttcagaacccagaaatgtatatcatattgcagttttgcaacatttagatagttgctgtgaagattcagctgaaattgttagcgttttcatttcttttgctttgggtctcatcgccctgtttgctgttggattgctctgctccaagggcgaaagggagacatcgatgttgatatgcctcttactgtttacatgatatattgcatctgctgaaatcctacccaaacaaagttaaaaacccaaa

SEQ ID NO: 71119 - DNA, 314 bp, Oryza sativa
  Clone ID: PAT_MRT4530_71623C.1
gttaaacaacaaaaaggaacatccgttccccatttaattcatctgtctcaccagttgcacaaacactgagaagcagaactccaaaccgattactgttggccagttctagcccacacacctaataaagtgagcaagggcctgaggaactctataatcactagggaaaaaaccaaattaagccgggccgccaccagacaagaggcatggaaatgaacctggcgtgtgctcaaagttgcaccagtcaaatgccgtaagtgcgcttgccatacaagcgatcgaacaagactaataccccggtgccgagagctgggaga

SEQ ID NO: 71120 - DNA, 147 bp, Oryza sativa
  Clone ID: PAT_MRT4530_71624C.1
gccacgtgcagagtccttgtacccctcgtatacaacagcaaggcttacctccctgtcatctagtccttttggttctaaagccagctgagggctgcaacatcgtgccaggccttacaccagtgtgtgttcgaccattcggacatgatg

SEQ ID NO: 71121 - DNA, 162 bp, Oryza sativa
  Clone ID: PAT_MRT4530_71625C.1
atgtggctgctcttgcggagctccctctacctccttcaatctacatggagggcgactagcagcgggtggacgaggaggaggcggaaggggacaagacaaccatccttggatttggtatggatgcaacatatgccgacggatctcaccatcgaacgcccctaa

SEQ ID NO: 71122 - DNA, 2259 bp, Oryza sativa
  Clone ID: PAT_MRT4530_71626C.1
atggcaggtgacggatgggtgatggacatcatttggcacacgctgttgctcggcggcgacgccatgggcggcatttggagcagctggtcgacggagatcctgctcggcctcagcttcgtggcgcagctggtgctcaccgtcaccgccgggttccggtggcgcggcgccggcagcaggatgcgctgcgtcatctggttctcctacgtcagcgccgactacgtggccaccaccgcccttggcaacctctccatcagccgcacggccggcagccgccgcctcgccgcgttctgggcgcccttcttcctgctccacctcggcgggcccgacagcgtcaccgcctacgagctcgaggacaaccagctgtcggcgcggcacgtgctcgagctcatcctccgcgtcgccggagcagtgtacatcgtctacaagtccacctccggcagctgggccttgatcccggcgtcctggctgatgctcttcgtcggcgtggccaagtacgccgagaagacgatggcgctccgccgcgccaacctggccaacgtccggagaaccgtagagagggagcggcggctgcagcgccgccgcagccgcactacgaaggcgaacctctcttttgccggcgacgatgacgaaggtggcctgttgatgaaggctcacaccctgttccccatctgcaagaactccatggtggactcgtcggtggagacggcgtccaacaccgacgacgctgctatagttcacgcaaaggaaaccctcttcagggaagagaactacaagaatgtgttcagggtgatggagatggagctctcgctcatgtacgacttcctctacaccaaggccgccgtcatccacacctggcacggctacgccatccgcgccgtgtcgccggtgttcaccgccgtctcgctggtcctcgtcgagctcagcaacgtcgccggccaccaccggcgatccgacgtcgtcatcacccgcgtcctgctggtggccaccttcctcctcgagacgttgtcgctgctcagggcccttgcctcgtcatggaccggcttctggctggaccgcgagctccgaccagtttggggttgtggttggattcgccatgaagttctatgcagaagccggtggacctggttgcgtcgtcaggtggcctccatcggccgtctcgccggcgccaaagatcaccggagatggtgcggcaagatggggcaactcagcgtgttgcagctcatcatcaccggcagcgccagcgagcaggaggatcgatcttgggacaaggaatgtgagacatactccaaggagaagaccatcgtggtcccacaagacgtgaaggagctgttcttccggagattgttggggcagttaatcgacctgaggaagaggatgaaggcggacacaggtacggagacggagctaaggactatggtggccaacatgaggtcgaagaggggccagctgacgctgcagaattatgatttgtggaaccaactccggtggagcctcggcgacgagctccagctgggcatcctcacatggcacatcgccacggacatctacctctcccagtccgtcaaagccatcgtcgccgccgtggaagatgatgccgtcctagctcgatggctgatgggtatcagaacgctgtccaactacatgatgcacctccttgccgtgcgccccgacatgcttccgggcctcgtcacccgcaagctgttcgagctcacctgcgacgatctggcccgggtttggtccaaacatcaaacgtcgacatcggttggtgccgccggtggcgacgacctagagtcatcttcttcctcgccaagaaatatctgccggctacgcgatctgtggcgagtttctccaaagacgatcgagcaacagaacaaacttgctgggatgcttatcaaacaatgggaatgggacagaaaacaagagtccggcgccgttgaactaaacaaatatctctcgcgcgggatcgagctcgccaagaaattgctccacctagaggtgtcacgtaaagacatcgacaaggttctgcaggtgatcctggaggtgtgggtggaaatgctcttctacgcgggctaccggtgcagcaaggagtcgcacgccaagcagctgagccagggcggcgagctcaccaccatcgtgtggctcatggcagaacacgtcggcctgttccttgtcaacaaaaccagcaagggagctgaagaagattactggaacaccaggaaaagacgctacagccggcagccagccagccagaacgtctga

SEQ ID NO: 71123 - DNA, 1736 bp, Oryza sativa
  Clone ID: PAT_MRT4530_71627C.1
cccacgcgtccgcgtcatgccgctccatctccaagcccgaatccccaaaaccctagcccaccccctgccgccatggccgcctcccccaccggctcctcctcctcggcccccgccgccgcggcggcggcggcgatggcggcggcggtggcggccgaggccaccgacgggccgaccctcagcgtcgtctcgaagcggctccgcgcgctgcggaagaagcacaaccggatcctccagatggaggaaaggtggaggttcgcaaggaaggtggccacggacaagctgggagggttgagctgggcgcaagcgcttagcttcctaactaattttgcttggaggagtgagtgttacgcgaggagaggacataatctgtgggagccattttgttattatagaactaacttagccctttattatgtcaacatttgcccccctctgtgagttctcttgtcactccattgactttcatatggatggttcggttgataatgcggaatactttggggaagtagtttaaggtcatattcgttcaccatggtcgcgcgcgcgcaggagcgggactgctgcatcacctacgactacgtcacggaggacgccgccgacctgctgcaccagtccgatctcgacaaggtgtctgctctggccgccctcgccgcctcgcgccctgccgcggcggtgggcgtctcgcaccgcgacgcgctccagtcctgcgcgcagcacgcccgcctctggcttcgccgtgccgatgagccaatccaccccgaatccagcatcacttatgcagcggttagggcgaagttggacaagatcatggcttcagactactacacagcgcaaccggagatgccggagatgggggctgcggtcgatttgtcggctgctgtgcaggagagcatggttgtgtcaccagaggcgccggctgtggaagagagccaggctgagggacacaaggatgagaaggaggcttcggaggctacagaaatctacaacgataatcagcctaatgtagctgatgctcagaatgtggaggatgaagccccggtgaatccttctgaagagttctcagcagcagaggtggagcaggagaagtttgaagcagatgtggaggaacaagagaggaatgcagatcaacagttcacttctcgacggccttaccagaaccagcgcggtggtggtggtcgtggtggtggcaggaggggttaccagaatggaggtcgtggtggacgtggggggcgaggaatgggcggtggcgggtaccagaatggtcgtggtggtggcggcggcggtggctaccagaatggccgtggtgggggtgagggtggtgggtactactataatgagcctggttactaccagcagagggggtacagcaacagaggcaggggtggtcgctctggtggtggcaactcttattacaacaatcaaggtggaggttcgcagggaggtggccacgcccatcctgggagggttgagctgggcgcaaacgcttagcttcctaactattttgcttggaggagtgagtgttacgcgaggagaggacataatatgtgggagccattttgttattatagaactaacttagccctttattatgtcaacatttgcccccctcagagttcttttgtcactccaatgactttcatatggatggttggttgataatgcggaatactttggggaagtagtttaaggtcatattcgttttccttataaaaaaaaaaaaaaaaaaaattataaat

SEQ ID NO: 71124 - DNA, 248 bp, Oryza sativa
  Clone ID: PAT_MRT4530_71628C.1
atgtctttcgtgattagtctcacctctctcacggtattaaatggtggtgttaaaaacttgattaactcctggtttggaatggttaattcctggtttggagatgagactgtgcaaccagggttggttgttcagaatggttgggcctatgcaacagggtatgttgtatagcgttagattaatattgtttaattaaatactttaccgttttattaaattctgaaatatttattaaaggctatttatgcaag

SEQ ID NO: 71125 - DNA, 1314 bp, Oryza sativa
  Clone ID: PAT_MRT4530_71629C.1
atggcggtcgagctgcgggcgctccacgccgcggtggtggcggcggcgccggcgccagccgcagcccggcctcccgccggccgcgtcccccgcgctctccaggacggcagcggcagcggtggccaccgttggcgaggactacccggtgtttactccggtgatgatgcttttcttgcatacagtcacactgtcactgcaatctttgatgatgccatggcgatgtgctttctttgttcatctcttctcgttttcaagggtcattcgttggtgatgaacttgagccattcattacttctccttaacttgcatgctcttcttgccgacgaggaagatggcaatgacgaccaccgtcagagtcacctgcggaggccttactggggccagcgcggctgcttccgtgccgtggttgttgcttcatacggaccaacctgcaggtgctttgattttcgctgtgtcaatcagaagaaggatctccaccagatggctgcaccaaccattttctcaaatccgttagagaaatggattttccacaaaaccaaggagtcagttttcttggtggactttgtgcccaaaaaggatgctgatggaaagatagaagaaattcttaatcgattggaaactgtaccggaggacaagagacagaaactaactttcgaggatagatgttgcacgggttttgtggtagatgacaagtctcaggaacttaagatattatgctctgcccattgccttgaccatctttttacttcagaaaatccaatatcagctcaagagataggtgatttatatgacattaatatcatctgtgatcactatgaatgtagtttccgcaaagacaagacaccggacaagataagatactactcgagggcaaacattgttcagattgactgtgacaaagacttaatccttctaaatgtaagcaaaaagaatgtgcttgcatatgggaagaatggacgggcttgccggcattctcatcctgcgttggttcctagtaagagacatctagagccaatggagaaggttcttatggtttcttggccaccatttaggcccaggacagtagcatcgggcaaggtttctcattgtgaccgggagtacgctgacacaagtaaaacaaacctggtcgggtacactatgacactggttgaagtgaatatacagagtgaacctgggggctcaggtgctcctttgcttgatgctgatgcaaatttcactggggtactgcatggaggggcagatggctgttcttggtttatatcattacccgacatctgccaggctttaacttcttggggtatccttactcagtag

SEQ ID NO: 71126 - DNA, 433 bp, Oryza sativa
  Clone ID: PAT_MRT4530_7162C.1
aaaaaaaaagagacgccctaacatgttttcatgtataacaccaccaactgagagccttatttgttagggaacatatgcaccgcctgtaggtgagcatgtaaaaacaatacagatccatgagcagcacgctgaactacacttatgcacaccaaacgctacggttatcactgaaagcaaaaaaagtcgctagatccatcatcagacgctatgcatatgcgggcttagatggtcggaacatactacttgcttcacttggggtcacgctacatcaattggggagcgtgataacattcggacgggcacaccttgtgaggatagtgctgaacttactgaacatccggaagggcattggaggcatgatctacactgcgcccaatggcgaggttgacaaagggagatggctcaatcactccgtacttgtcaatgatgaaaa

SEQ ID NO: 71127 - DNA, 361 bp, Oryza sativa
  Clone ID: PAT_MRT4530_71630C.1
cacacaaaacaaggcggcccacgggggcgcccctccctcccgatcccaaagccagactgacccccctaaccttttatcacaccaaaaaagtgctatagactcacactctcttcacttcgacacaaagcacaatgcctcctaggaacccagccccgcaccataatataagccttcccacaaggactcaaaccccgcctcaaacaaaacccaagcaacccaaaacccaaaagccgacaatcgaagtaaccaaaagggaactccccttactcaaccccagtatccaccaaacaaccaagaaaccctcacactccggaacggaggggaagtccacgacactcccacccttcaacagctcaaacaa

SEQ ID NO: 71128 - DNA, 684 bp, Oryza sativa
  Clone ID: PAT_MRT4530_71631C.1
ctctactcagtccatggcggaaccatccgcactgatttttcctctcactcctttcaatcacggtatcctctcattatcacaagatttatggcctcctccgtccatactaatcggcatcgcgtagagcaacgagcagttaatcgccggcggcgacggatcgagaaataacaacacagccaccgggcaccagctgaataaaggtcgtggcactagtagtggtaccgcggaagaacacacaggtggcgctggcggcaaggaatggcgtcagagaagatgccgtcgaagaacactcacgcggcggcgtgccagcgaagaatcgaggacgatggcgagtcaacaagcagttcagaagcaggggcgctcggcaaatcgattcttttttcccatcatgccccttttgattcaatggttggattttatttggtacctagcagtaccagtacctttcattacagacctatttccggcattaatcctatgccgacggtaagaattagctatagtcttgcaaaatcagtttcctgcaactatcgacccatttgatttttcaacggattgatagcatcagtttcctgcaactatcaactcactagatttttcgatggatcgatagcagaaggttcagcaggaaaccaccaagataaaacctgagatcaccggaaatatggatacaaattatcatgc

SEQ ID NO: 71129 - DNA, 648 bp, Oryza sativa
  Clone ID: PAT_MRT4530_71632C.1
ttataggccgcgggggaggggcggccggctccatggcgatgcgacggcgcgcggcgcgtggggcgcgaggcggcgggcacgcggcgcgaggcgtgacggcgacgggcgcgcggctcgagacggctcggggctcggcgggcggtgatggcgacgggcgacgcgacagcgacggcggagcgtcgacgggacggcgacgcggcgatgggacggcgcggcgcggcgcggggcttggcgcgcggtgatggcggcacggcggcgatgggcgacgtgatggcgatggggcgtgacgcgcggaggggtggggttcgaggcgatgcgaccggagacggcgacggcgcgcggcacgacgagcgcgagggggcgcggcagtggcgcgcgcgacagcggcgacgtgacggcgcgcggcggctcgaggcgcgaggcgcgcgcgggagggaagatgggacgggcgcgcggcggggcaggggcgcggggcaggaggcgacgatgtgacggcgacgacgatggcgcgcggggctcaaggcggcgacggcgacggcgcggcggcgacggcgacggctcgacggcgacggcgatggcgcgcggcgcggggcgcgagctggcgcgcggcagcggcgcgggcgacgacgatggcgacacgagcggcat

SEQ ID NO: 71130 - DNA, 371 bp, Oryza sativa
  Clone ID: PAT_MRT4530_71633C.1
acactgcagcgatctagctaacacattccttttcttcagaaaatgcagcagtatggaaagatatagtgtccagaaaaggcaaaaactactttatttctagttaattctttgctatgaatagactatggcatgttgtgctcaaacagaagagcaatgatatattgtgcaagaatacattttattggatgagttgtgcaggatattgtagacgagtccatgccacctttcttgtttacaacgaataggttactccgtaattcaattttctgttcccgactcctggacagaacagccctggaacagactagtatacttcccaggtcaatggttgttctaaaaccttgaacagaacaggcaccgagctggtggac

SEQ ID NO: 71131 - DNA, 189 bp, Oryza sativa
  Clone ID: PAT_MRT4530_71634C.1
atggagccgggaagaaacaagcagatcgaggtcgtcgaggaggctcacgaagaacagcagcagcagcaagaacacgatgtggacactggagtgctggaccccctgttcttcctgtgccacgtgttcgacgtggaaaacgatggatcgcacgttgttgaaaactatgtctatgtgtaccgcccttactaa

SEQ ID NO: 71132 - DNA, 158 bp, Oryza sativa
  unsure (1)..(158): unsure at all n locations
  Clone ID: PAT_MRT4530_71635C.1
tttttgtttataatcttcncaagggccgggggactaccaggtaatttaaaaaaaaatgacctgggccttcgttttatatgttaaaagttggacttaactaccaacaaaggttacgcgtacatagcactctctccacattgtacaatatgttcaagtgc

SEQ ID NO: 71133 - DNA, 138 bp, Oryza sativa
  Clone ID: PAT_MRT4530_71636C.1
atggctgagattactcgcgaaggggatctgacaggcacgacgcagttggtgaggccatcaggtgctggacctgctggtgcgccgccgccggtagccgctggcagaggggcacagggagacacagctgggttgtggtag

SEQ ID NO: 71134 - DNA, 490 bp, Oryza sativa
  unsure (1)..(490): unsure at all n locations
  Clone ID: PAT_MRT4530_71637C.1
gatttttctgacagcgagattattccatcttctcgcgccaaatcaaatcaaacttcagtactaggttcgatcggttggaaatcaatggagaccgtcacgtccaagcctcattttgtgctcgtcccatggataggtagcatcagccacatcctccccatgactgacatcggctgcctcctcgcctcgcacggagcgccggtgaccatcatcacgacgccggtgaactcgccactcgtccagagccgcgtggaccgtgccacgccacacggcgcggggatcacggtgaccacgatcccgttcccggccgccgaggccggcctgccggagggctgcgagaggctggacctgatcccgtctccggtcatggtgcctggcttcttccgcgccagcanagggttcgangaggccgtggcgcggcactgccgtccgcaggatgctcgttcccgccgccggncgagctgcatcatcgcggngatgtgccacacgtggg

SEQ ID NO: 71135 - DNA, 1852 bp, Oryza sativa
  Clone ID: PAT_MRT4530_71638C.1
atagtggatccccgggctgaggcttatcttcgattctccgtttgcgctatcgtaacccttgttgcgaagagaaacgccgttcccggcggaggcacggccggaaaacttccgccgcctcgcctcgctccggcgcacgtcgccggcgacgaggggccgggggcaaaccggtggtcggtcggcctgctcctctcctccccgcccgtgcgccttctcccctgctgcccgcgagcaggtgcgaatcgaatcgaatcgaaggtcaaccacgatgaagaagcccaacgtcgccgccaaggtcaaggcggccgccgccggtggggcggatggggggtcgtccaaggggagcccttccacccctgcatcgctcagggtgactaagttggtcaaggggaaggcgaaggtgaaggcgaaggctagccgggagaaggctgctgcgccagccgctgcggctggtaaagaggccgcgtccctgggtgatgctggtggcaatgctgatgcatcgcctgcggctccggctttgcgaccggccgcggtggctgatgcggacggggcatccaaggggagcccttccacccctgcatcggtcaagaagacatctaggttgaataaggtgaaggcgaaggcgaaggctgcagcagctgctgccgcttcagggtccccatccgttggtgctgctggtggcaatgctgatgcatcgcctgcagccccggctccgcgatcagctactgtggccgatggatcagcagctcgggtgatatcgacgccagcggcagctacggctgaagcatcaacgccaaagcgaaggctaaagctaaaaccaaagctggctgaggctaatgctaatgctaatgctgtagttgccaccaagaatggtgtaggtgctgataacaacgatggtgatgccatcaagaagagaaaaagagagattgctggggagaggactagcaatgtgaaggaaaggaggaaggaggaggagggaagcaagaaggaagagaggcttgacagtaagggaggagggcttatattcatgtgtaatgcgcagactaaaccagaatgctttcagagccgcttgtttgggtatcccagagggaaaatcggaatagttgagaagatccgaccagggatgaggttgttcctctatgattttgacttgaagctactttatggggtgtacaaggcagtatcaaagggtgggcttgatcttgttcgagatgcattcagtggaaaattccctgcacaggtgaaatttaagatagataaagattgccttccacttcctgagagcagatttaaggatgcaatcagagagaactatagtgcaaagagcaagttcaatcccgagctcaactctagacaagtccataggctaatagctctatttgagtctgtgagtgtacctcaaccagctccacagaagcctcttgaagagatgcaccactatgaaggaaaaacacagccacatcaatatgaagaaagacgatcttctttgcctgtcatgcatgttcctccccctaaagacttatacagggcaacacgctttgatccacatccagtggattataggattgatcattctttgtctaatgctcatgatggtccccacatacattatcagcaaacacttgttgcacgcgagtctcagcgtgttcctcttgacatagagcctcgtcttgtgccgcatgccctagagcctcgtcatggcccttctatcccagagattcagcatgttccacatgcatactaccgccatttggctccatctgatgttccatattatcgttctcaagtggatccactgcctgatcgattaacgcttgaagctgtgttttttccgaaatgtaaagataccgtgtga

SEQ ID NO: 71136 - DNA, 269 bp, Oryza sativa
  Clone ID: PAT_MRT4530_71639C.1
cggacgcgtgggcggacgcgtgggcggacgcgtgggcaaaagaggaaaaaaaacatatacacttctagtgattgtctgattgatcatcaatggctagcaaggtcgtcttcttcgcggcggcgctcatggcggccatggtggccatctccggcgcgcaactgaacgagtcggagatgaaggtcaaggaccggcagtgcccgcgggaggggcaagacagcccgcttgacccctgcccgcaggtgctcgacccgcagcttaccggcccggag

SEQ ID NO: 71137 - DNA, 4120 bp, Oryza sativa
  Clone ID: PAT_MRT4530_7163C.1
gcggctgagggtggcggagggcgggggggacccgtggctgcgcacgaaaaacggccacgtggggcgccaggtctgggagttcgaccccgccgcgggcgaccccgacgagctcgccgccgtcgaggccgcccgccgcggtttcgccgcccgccgccacgagctcaagcacagctccgacctcctcatgcgcatgcagtttgctaaagcaaatcctcttaagctggacattccagctatcaagctagaggagcatgaagctgttacaggcgaagctgtattatcctctctaaaaagggcaattgctcgttattctacttttcaagcacatgatggacactggcctggggattatggtggtcccatgttccttatgccaggcttgattataacattatatgtgagcggagcgctgaacactgctttgtcatctgaacatcagaaggagatacggcggtatctctacaatcatcagaatgaagatggaggatggggtttgcacattgagggccacagcaccatgtttggctcagcgttgacatatgtttctttgagattgcttggggaggggccagatagcggcgatggagctatggagaaaggacgaaaatggattttagaccatgggggagcaacttatattacatcatggggcaagttttggctttcggtgcttggtgtatttgactggtctggcaacaacccagtgccaccagaaatatggttgttgccatatttcctgccgattcatccagggcgaatgtggtgtcattgccggatggtttatttgcctatgtgttacatttatggaaagaggtttgtgggcccagttacaccaattatattggaattaagaaaggaactctacgaagtaccctacaatgaagttgattgggacaaggctcgcaatctatgtgctaaggaagatctgtactatccacatccattcgtgcaggatgtattatgggccactctccacaaatttgttgaaccagctatgttgcgttggcctgggaacaaattgagggagaaagctttggacactgtcatgcagcatattcattatgaagatgagaacacccgatatatttgcattggtccagtaaacaaggtattaaatatgcttgcttgctggattgaagatccaaactcagaggcattcaaactccacattccaagagtccacgattacctatggattgcagaagatggcatgaaaatgcagggttataatggaagccagctgtgggacacagctttcacagttcaagctatagtggctactggcctcattgaagaatttggtcctactcttaaactagcacatggctacataaagaaaacgcaggttatcgatgactgccctggagatcttagtcagtggtaccgccacatatctaaaggtgcatggcccttttctactgctgatcatggttggcctatatcagattgcactgcagaaggacttaaggcggcattattgctatcgaagatttctccagatattgttggcgaagcagtggaagttaatagactgtatgattctgtcaattgtttgatgtcatacatgaatgataatggtggatttgcaacatatgaactcacaaggtcttatgcctggctggagcttatcaatcctgctgagacctttggggacattgtgattgattatccttatgtggaatgcacttcagcagcaattcaggccctgacagcatttaaaaagctctaccctggacaccgcaagagtgaaatagacaactgtataagcaaagctgctagctttattgagggtattcaaaaaagcgatggttcatggtatggttcttgggctgtttgttttacctatggcacatggtttggtgtaaagggattagttgctgctggtaggacattcaaaaacagtcctgcaatcagaaaggcatgtgactttttgttgtcaaaagagcttccttctggaggctggggagaaagctatttgtcatcccaagatcaggtttataccaatctcgaagggaagcgacctcatgcggtgaacactggttgggccatgctagccctaatcgatgcagggcaggctgagagagatccaattcctttgcatcgagcagcgaaggttttgatcaacttacaatcggaagatggtgaatttccccagcaagagatcattggagtcttcaacaaaaactgcatgatcagctactccgagtatagaaacatcttccctatttgggcccttggggagtaccgtcgccgcgtcttggccgcagacaagtagttcagcacgagcagagcagcagcaccaacaatgtgcatgtatttatacgtgaaataatgtagctatgtttcagttgtaataatgtggctatatgtattctcccgttagtgatgccacgcgagcgtagtcaaatagaaacgcattttgacacaagttcgagatgaatggattcctgaatcgaatgtttgtgttcagatagaattcttgccacgcaaaatacaaacatgaaagaaaccagttggttttggggtggatagttggttgtgtttttttgttttcaggggttcagcctcctggggtcgcgtgggaagagagaagccttcctgatgttgccgaggccgcagaagagcatcaccaccctctccagcccgacgccgaacccgccgtgcggcggcgcgccgtacctgaacgcgtcgacgtaggcggcgatgctgccgacgtcgatcccccgctcctccgcctgtcgtgccaggacctccgggacgtgcaccctctgcgctcccgagatgatctcctcccctcggacgaacacgtcgaaggagttgctgtagcgtgggtcgtcggagcagggcatggtgtagaatggcctcaccgccgacgggtaccggcagagcatgtagaaatcagtgtcatacttggtatgaaccagctcgcccagcttcttctcagactctgtgttgaggtctcccatggcctccacgtggaccccagcttccttgagcatccggatgccttcgtcatactcaatgcgcagtgtcttgggtaagtacttcaaaggtttgaacggatactgcctgttaatggcctcaagttccttggcgcagttcttgttcagatgatcaaacatagcaacaaacagcctatccacaacatcacaaacctcagagtagtggcctttgattgccatttccatgtcaagtccaacgaactcacacaaatgccggtgcgtgttggagtcttctgccctgaacacggggccaacctcgaacacacgctcgaatccaccacaaattgccatttgcttgtggagctgaggcgactgcgccaggcaggccggctggccgttgtagtccagcttgaacaccgccgcgccgccttcactggacccgccgatcagcttcggcgtgtggatgccaacgaaaccttctgacagcagcacttgtctgaagatgttttcgatttcgcattggacacgaaaaatcgcctggtttgcaggtgtgcgcaggtcgatcactctgaagtccaagcgcttgtcctgcccgacatgaacgagctgctcgccggcagccttggccttcacgacgtcttcctcgcttcgcgccgcgtcgtcgacgctgatggggagattcggagtcgctttgctgatgcagtacagcttcttcacctggatctccacttcctgctgcgtggtgccgcggacgggctcccgcggcaacgagacgacgccggcgacgtccaccaccgactcccggctcagcccggcggcgaaccgcgccaccccggcgtctcctcctccgccgccgccgccgccgccacccacgacgcactgcacggtggacgacccctgccgcagcacgaggaacgcgacgcgccgccccacggcgcgcaccgcgtgggccgcgccccgcacgcgcacggcgcggccggccacgtccggccccagcgccgccacgtccgcccactcgtaaccggggacactaaacaaccccccgccgacggcgacatcgccatagccgccgccgtcctcctcctccggctgctgctgcagcggatcgccgtggttgtcgtcgtcgccggtggacatgccggatcccgaggcgaattaactagaaccggacgcgtgga

SEQ ID NO: 71138 - DNA, 400 bp, Oryza sativa
  unsure (1)..(400): unsure at all n locations
  Clone ID: PAT_MRT4530_71640C.1
ttatttcnncnntttttntnnnnttntttnttcatcnnnatttnttttnnntttncncntttnntatntnntcctaccctccncncaagggggnntngacttggcccccccnttgnggnngcccanngtgtctgccatccntttttacccacccacccntctcgcctgtctgcagatcctgatccatggaagagctctgccngccgccgctgccatggcgctctcccgtggagaagacctcgtcggggngggagtacaaggtgaaggacctcatcgtcgacgacggcggcgacgcancgctgctcatccangagggccgtcaaggccgaggaggagttcgagaagtnaggcaaggtccccgacccggagtccaccgncaacnncgagtttaagatcgtgc

SEQ ID NO: 71139 - DNA, 628 bp, Oryza sativa
  Clone ID: PAT_MRT4530_71641C.1
atggtgaggactaagtgcctcttaatttgtgtaccttggctgattcctggacgagaattttatgcacaaataagttcggaaattactagtgaatttccgggcgtgacaaaggtgacaatgttgggaaagctggcagcaaagaggaaaccatcagacatcgatccagctggaaaagaccctgagtcgaccgacaaggagactggttctgcggctgccagggaatccgagccgactgaagaaaaccgctcaactggcagtcagtcggcgaccgttaatgtagaagctgggaacaagcccctgactggaaatcagtcggcagaagctgaaactgacgctcaccaaaagcccccgattggagaccagctggaggttgaaccaaataaagacatcccggaaacagaggaacaaacgagcatccctccctttacaacaccaatgctggtccaaaggaatgaagcaaagactgcaacccttgaaaaactggtcccacatcttggaaccctggaagcagggaccagagcccaactccacgaaaccagggagcttgccaggaagactgaacatgatctcagggactggattgccgagcttcaagattccaatttcgagctgagtggttcatctaaag

SEQ ID NO: 71140 - DNA, 1557 bp, Oryza sativa
  Clone ID: PAT_MRT4530_71642C.1
ttagttcacccttatcttttccagaactttgattcgcttttctagctcggtgatcttggcagcttgtactttagatgaaccacttagctcgaaattggaatcttgaagctcggcaatccggtccctgagatcatgttcagtcttcctggcaagctccctggtttcgtggagttgggttctggttgcttccagggttccaagatgtgggaccagtttttcaagggttgcagtctttgcttcattcctaatatgaattctattcacaagacgagtggcttgattaagtgtctttgtgagtagagacacttctttgtcatctttctgcttatttattacaattccttgcggctgcatttcgtcatcccaccgtatccgaagaatttcttcttcgtcgccaattattgggcctgttataacctttagaggagggcgagctggcccttgtactttgtcaaaagtactgacctctggaccagcattggtgttgttaaagggagggttgtttgtttgttcctctatctctgggatgtctttatgtggttcaacctccggctggtctccagtcaggggctcttggtgagcgtcaatttcagcttctgccgactgatttccagtcgggggcttgttcccagcttcttcgtcgtcactcagaactaatttccttttccgagagcccgactggttagttagctttgagatgcttggctgagcagcagactggatttttggcccgccactggcctgaccagcttgtcggcggggcgagcggcgttgagcgattggaggatcagatttcatcaaagaaaattccggtagaggagggttgaaggcattatatggcaccactagcagtaggtgtgaatagctaaccacaataccgtttgagaagattttgtacatcctctccttcataatcttgaactcaagagactttggatcttcacggttagggtcattcttgccatcgaactcgaaggcagtgcgggatctctctttaataggtgccagtcggctcttgataaagtgcagagtgatttgttcccttgtagaccttgctctttgagttttagcatgcgttccaacatgataagtggttgagaagcctcgtctcccattggaagcgaattctaggtgtcttgatatactggagaaggcaggagtacttgggaagtgctggttcaggattggcttgctcttgtttggctggggcttcaggaagaaaaaacggcggaataaagcaaaatgcggcctaattcccagaaaagcctcgcaggcatggataaagttggcaatatgaactatggaatttgggttcaaatgatgcaagctgattccataaaattccagaatccccctaaagaacttcgaagttggaagagaaaagccaccatagaagaagtgggagaatacaacgacctcgtgtgtcgggggtcgggaatgcttcgccgaatgctggatgccagccgaaacgtcgtgcaccaccatttccgttaagttttcttccgtgacatcggaaggagcccattgactctcaaagctttctctctcctccgccat

SEQ ID NO: 71141 - DNA, 462 bp, Oryza sativa
  Clone ID: PAT_MRT4530_71643C.1
atggaatcccctcggctcattgaggatgatggtgaggaatgcaacagtaatgaatccgggtggacgatgtacctggcatcccccacacatagtgatgacgtgagagcaattgtcagtgaaggaagtaacgtagaagatggcagcggatttagcaatgagaggcgcagagggaaagaaaacaaaggccatgcaaacgatgatggagattacgactcattggcttctgatgcttccactggaccagctgaagtgaagatgcaagaaggcaaagaagagaaagatcatcaaatgaatggtggtaacagacatcaacatgctaaggacgaacaagatgagatacccaccaaactctcaaccagctacagcaaaaaggtaggcaagataaagaaaggagatgagaagaccagtagaagaggacaaaacaagagacgtagctcctcaagaacaagcttcttttggtaa

SEQ ID NO: 71142 - DNA, 205 bp, Oryza sativa
  Clone ID: PAT_MRT4530_71644C.1
atgcggtggccgtcgccgacaaaggtcggaaaacggggtgtgggcactgtgatcggagttgtcgccggtgttgctaatcaagatcgccggcgatggcggcctaaatcgagatccctggtgatggccgagtggtcagtttggaggatggcgtgcttctatgctcgtccagaaaaaaaactagcacgaaagttaaagcgcatcagtg

SEQ ID NO: 71143 - DNA, 762 bp, Oryza sativa
  Clone ID: PAT_MRT4530_71645C.1
gaactgtactacaaaccacttaacaaaaatatttgataattaagttgtttgtatagacaatagccgtccgaactattattcatgttcaatacaagattaaactaggacaacatcaaacaaaggtcacgtattcacgtcaggacctacaccctctcccctagcaggaacagagcagccccggccgggaaaccacacctgaaaaactgacatgcatatcaactggaaaaaccgaaacaagacacaaaccacaccgcaaatataagcattggcgacactttggcggcgccgccccggtggcctagcttcttcagggatggcggccaccgtgctgcgccgcgtcagtcaccggcacgccgccaccgcggcaatggcacaggctcatgtcgtggctgatgaacccgccccgggctcgtgactcggtgctgctgacaccgccgggagacgctccacctgcaggaataacgacggccgccgatggatggttcccgtggccgccggcagggctggggccatcgttggtgggcgaggtatccacgacgtcgaagccctcggtctccggcggcgacggcgggtggtggcgcgcgcacgccacggtcaggagatgcgcggccagcagacagagggtgaggaggagtggcacggccaaggatctcgccgccattgcaggggttgctcaagcagtcttagctcctgtattggtttgagacttgggaggagggacctgcctagctaagagcgtaagacgtcgtaggtggtggtcga

SEQ ID NO: 71144 - DNA, 1812 bp, Oryza sativa
  Clone ID: PAT_MRT4530_71646C.1
atgggtgtctcaggtgttcttgaatggtggcaggagtggcagctgcgcaccctggtccttagcagcacagccattcaactgctccattacctctttgctaacaggcgtaagcatgccacttcttcccagttcagaaccataatatggctttcttaccttggcagtgacgctatagctatatatgctctcgctaccctattcaaccgtcacaagaaccaagattccacatctagctccaccgcacaaggcagtagaatcctcgaggtggtatgggctcccatcctcctaatccaccttggtgggcaggattctataaccgcatacaacatcgaagacaacgaactctggaagaggaatgtcgtcaccatggtgtcccaggtaaccgtgtctatctatgtcttttgtaagtcatggccaggcggcgacaagagattgttgcaggcagctattctcctgtttgttcccggagtcctgaaatgcattgagaagccttgggctctcaggagtgctagcattaacagcctagttagctccgatgaccttgttccaaggacaggaaagggcaatgaacaagggggtagtatttctcttgagtcctacgtggaagaattgacaaaaaagctcaccgaaacgttttatcgtctctacactaaatcaaagatgctcgacaaacaacaaaatagatacttacttacaggctttctacgggtagtatctgtttacctaccgtttgcagcaattggcttatttcacaatagtcatagacaagcttataacagatatgacataaaggttacatatacaatcttgtgttgtactgcttttgtcgaggcatttgccgcacatggttggaacactcctatgatggataatgttctgccatggttttacaaggtttcccagtgtaggttaataggttcctatgctggtggtagcaccaagtcatgtgactcagttgtcgacattatagaactggtactgcaacatttaaaatctgggtggaaggattgcataacagattttccctcttatagggcgtttagtgatcataggggtcaatgggcgcttcggcgcaacaactgtgaccaagaagacctggcttggagtcttagagtaccatttgatgaaagtgtccttctctggcacctcgccacagatttctgcttcataagtaaaagatgtaccaatgaagtagccactcggagcatagaaatttccaactatatgatgtaccttttgttggataatccagagatgctaatggctggtaccagaaggaatctgttcataactgccattcatgagttggagggcatccttgggaacgaaccacgtgagatccagggtcttgcacagaagataattgtcaatgtggagtccactaatggtgaccctagttttatccgtgcgacgcttgtgcactttctaagatgtagagggtacctacatgccaagagtctaggtacaggttgggagttgctcacctttgtctggctcttgatgttatacatggggatggagcccttggtggagaaattacaaagggcggagttttcaagtgtaataggaagtggaaccaccgctgatgcgccatcgtcctctaatgagaccttggcagagagggaaccgaagactgaggttccaaatggaggaggcatcagcgctgctgctccattgtcttctgatgagaccttggcagaatggaaccagaagattaaagctccaagtggagatgaaggaaacatcggtgatgtgccatcgacttcgcctgacatcattgttattgatatcaaggaagacaatgcttcttga

SEQ ID NO: 71145 - DNA, 536 bp, Oryza sativa
  Clone ID: PAT_MRT4530_71647C.1
agttgattttgatcataaagtttgatcactttatcatatgttaaaagtttagtgtaaaaatatgccaaaatatcatgtttaaagtacctttaacataaaaccagtccaaagaaaataattgtatttttttaataagataaattatcaattttgttgtcaaagtcaactgcgttatgaccacgaggaaagtacccgaatctcttaacatacacgttggcacttgtcttaattgtattggacttgtcgagtttggtgatttttcgggcatttctgacatgattttccctaatctatttacaggaggaaccacttaactttgacaggacctaataatcgagtacttggtacactatacagaattgagttacatttaaagattagagacgatggtggtgttgaccaagatttctgcgagaaggcgagaacacatgcatcagctataaatttttagtgaaagtagccacaaatgtccggaccagtatgtgaagaagtataatcgagtggcaattgatcttctgtaaaaaaaaaaaaaaaaa

SEQ ID NO: 71146 - DNA, 624 bp, Oryza sativa
  Clone ID: PAT_MRT4530_71648C.1
atggagccccacatggagagggcgctgcgggaggcggtggcgtcggaggcggagcggcgggagctggagggcgtggtgcgcgcgcaccacacgttcccggcggcggagcgcgcggcggggccggggcggcggccgacgtgcacgtcgctggtggcgcagcgggtggacgcgccgctcgccgccgtgtggcccatcgtgcgcgggttcgccaacccgcagcggtacaagcacttcatcaagtcgtgcgagctcgccgccggggacggcgccaccgtggggagcgtccgggaggtcgccgtcgtgtcgggcctcccggcgtccaccagcaccgagcgcctcgagatcctcgacgacgaccgccacgtcctcagcttccgcgtcgtcggcggcgaccaccgcctccgcaactaccgctccgtcacctccgtcaccgagttctcctccccctcctcgccgccgcggccgtactgcgtcgtcgtcgagtcctacgtcgtcgacgtccccgaggggaacaccgaggaggacacgcgcatgttcaccgacaccgtcgtcaagctcaacctccagaagctcgccgccgtcgccacctcctcctcgccgccggccgccggcaaccaccattag

SEQ ID NO: 71147 - DNA, 225 bp, Oryza sativa
  Clone ID: PAT_MRT4530_71649C.1
atgaacccaaggaaacgcttggatgatggtgggcagctggtggcgttcccctctctagagatgggcggcggtgttagaagaggtgaacccacccccggcaatggggagatggtgacctccctacagcatctttcgttgtggctcctctccctcctcatcctcgccgccgccctcgccagccacctcaatctcgctgcaacctgcagaggtgacaggcaatcatag

SEQ ID NO: 71148 - DNA, 204 bp, Oryza sativa
  Clone ID: PAT_MRT4530_7164C.1
atggccggaggttacgaggcggcggcgagctcagacggccagtggacgtgggatccaccgatgccagcgaaggagtggggggcggcggggataggatttcgggtttcgacttttggtaaaattggggaaaatcgtatcctcgtcctggccgtgatggattcgttgtttgttggaactgtccctgatatgtactacgcgtattag

SEQ ID NO: 71149 - DNA, 776 bp, Oryza sativa
  Clone ID: PAT_MRT4530_71650C.1
ccggccgggactcatccccttcctccgaaaaccctagctccaccacctcctcctccgccgccgccgccatgaagcgcaatccgcgcgtgacgagctcccggcgcaagtgccggaaggcgcacttcacggcgccgtcgtccgtccgccgcgtcctcatgtccgccgcgctctccaccgagctccgccacaagtacaacgtccgctccatccccgtccgcaaggacgacgaggtgcaggtggtgagggggagctacaagggccgcgagggcaaggtggtgcaggtctaccgccgccggtgggtgatccatgtcgagcgcatcaccagggagaaggtgaacgggtccaccgtcaacgtcgggatccacccatccaaggtcgtcgtcaccaaactcaagctcgacaaggaccgcaaggccatcctcgaccgcaaggccagcggtcgcgccgccgacaaggccaagggcaagttcaccgccgaggacgttgccgccgccggcgccgccggggcctcgctccaggagatcgattaggctcggggagatatatccctttcctctctgttcgtaccgtctctcctattattatcatcatctagttaattttaatgctacttgaaatctgctactttatccctgatgaaactgtttgtcaacgtgagttttggaaccttatgtggatctagtctgatgccttggattttgatagatcaagaactgaactcattacatgttttattgctcatgctttagtgaacgttcaaatctgatgctgaatgc

SEQ ID NO: 71150 - DNA, 981 bp, Oryza sativa
  Clone ID: PAT_MRT4530_71651C.1
atggatctaagcgtattcatccacggtggcgcttatcacatacggccaccggtgccgccatccggcactccggtttctccagtggggcgcctccgtagtgttcattccgcttacagcctaatcatatcacactatatgtcgaaggtgaaagctcaaagtgtcgtctgccctcatgtatatccccagtactactccttccaaaaccatgaatctcaacagtgcttgccttttttcttcacaagatccctcattcgatggagtgtcctcattcaaatcatcaagatcaataccgacacggccttcctttcggtgtctaccgacggccgatcacttcttggtggtacaagcatctcccggacttttgtggagctttctgcctactctatatggacaacagggctgagagcgaggtgctcatttgctcttggccgaaatgtgaaggtcatctcggggtatatggcgcaggtgtataatgagaaagacaacaatggaagccctcctccttacataactatgggagaagagaagcagcacttagagaaaaccccagatggctatcgtatcaaggtctcctccctgggcactactacttcctttacgttgttaacaacagaccggatttggaacatgtggttgtccggtgatcctctattggtatctcagtcaggactcaaggagctttgcctatcattctccttgtttaagagcctgagacggcgttttgctggacatcccttagtggaggatggttcccaaagggctcttggttttgtgctccatggcatgctcggtgatgccaacgaccatgaccgcatgttccaaatccttattaatgagctggcctttgcaaatgaattttactactcctgtcttccttattggcacttcgttgggggagcgcttgaaacactcaatttggttatatctgttggaaataatacatacttagccattaattttattccaagcattattatttga

SEQ ID NO: 71151 - DNA, 375 bp, Oryza sativa
  Clone ID: PAT_MRT4530_71652C.1
atggcggaacaagggcgcgtcgggggtggcgcggtagcagtagcacacgctcggcggaagacacagccaactgaggcatggcgctggggagttggatctggacgccctgcagagaactgcctaggccctagggtttggatctggactactttgattggtgtagttgagattggcccattgggctgcttgcttgcttcaattgggttgatggggtattgggccattttgtttgttcggtttgtcggtctcttcggtagaggagaggagtggggcgccggtgctccggtggctgggaggtggcgacgcttctttcttcacactcttcttgtgaagacgacgatgagaaagagatctgcacgacgacgaggtccttga

SEQ ID NO: 71152 - DNA, 463 bp, Oryza sativa
  Clone ID: PAT_MRT4530_71653C.1
ccgcccgccgggccttcgcccaccaaaaccctagccgcgccgccgccgccgacgaccaggtaaggaaggagatccgccgccggcgccgccatgaagcgcaacccacgcgtgacgagctcccggaggaagtgccgcaaggcgcacttcacggcgccgtcgtccgtccgccgcgtgctcatgtcggcggcgctgtcgtcggagctccgccacaagtacaacgtgcggtccatcccgatccgcaaggacgacgaggtgcaggtggtgagggggagctacaaggggcgcgaggggaaggtggtgcaggtgtaccgccgtcgctgggtcatccacgtcgagcggatcaccagggagaaggtgaacggctccaccgtcaacgtcggcatccacccctccaaggtcgtcgtcaccaagctcaagctcgacaaggaccgcaaggccatcctcgaccgcaaggcgcgcggcc

SEQ ID NO: 71153 - DNA, 528 bp, Oryza sativa
  Clone ID: PAT_MRT4530_71654C.1
atgcaggggcgaaagaatgtcatgaagatgttgaaagaaatactcaatgagaggaagaagatagaaggacgccatgaaagcattgacttccttgatgtcctgatagaggaagttaaggaggataatccttcaatgaccgagaatacagcattgaacttgctcttttcgcttctgtttggcagcttcgacaccacatcatccggaataactgggatgctcaaatttttgacagataatcctgaggccttgcgagaactgacagaggagcacaataacatacggagaagaagggccgatctgaactccgaaatcacatgggaggaatacaagtctatgaaatttacatctcacgttatacacgaagctttgaggcttgctagcattactccgatgatgtttagagaagccatagaggatgttcatataaaaggttttgctattccaaaagaatcaaaaattatgatttgtccttctactgttcacctaaaccccgtggtctatgaggacccaatacattcaatcccttga

SEQ ID NO: 71154 - DNA, 6119 bp, Oryza sativa
  Clone ID: PAT_MRT4530_71655C.1
ccggccgggactcatgcccgcgcccgaaccctagctccccccgcgccgccgccgccgccgccgccatgaagcgcaacccacgcgtgacgagctcccggcggaagtgccggaaggcgcacttcacggcgccgtcgtccgtccgccgcgtcctcatgtccgccgccctctccaccgagctccgccacaagtacaacgtccgctccatccccatccgcaaggacgacgaggtgcaggtggtgagggggagctacaagggccgcgaggggaaggtggtgcaggtctaccgccgccggtgggtgatccacgtcgagcgcatcacgagggagaaggtgaacgggtccaccgtcaacgtcgggatccacccctccaaggtcgtcgtcaccaagctcaagctcgacaaggaccgcaaggccatcctcgaccgcaaggcgagcggccgcgccgccgacgaggccaagggcaagttcaccaaccgaggacgtggccggccaccggcgcctcgctccaggagatcgattaggcgcgcgcctggaaccagcttatcattggggagatatatctctgttctatcttttcgtaccgtgtttcctataattatcatcatcttctttattttctatgcgttttgctattaagctactttttccgtgatgaaagctttaggaatcatgctgtgtggtttccttatgaaaatgtattcatatgcgttggagatggaggataaacatctacaattatggttaaaatagtatgcagatgaattaaaagaaaattctaatgtggagcttcagggcacctatggcgtttttttttctcttgtagtaacttttgtttctgatgccttaagtacttcccatgagaaaccatctttgtcatcttccgattcttcgttcaggcgtgattttcatgagctggtgatgaggtcagataacaatttgactattgaaggatttgttggtgttgtgcgacttgcatgggcagttcatttgatgttaactcaagatcgaagcagtgcaagagatactctcactagttcttcgagagatgtgacagatatatgggcatgtctggagataatctgtcgccagaatagttttcaatttttgcaggaacgtattatgcaaacagctgcctacaagaatgacgatgaggacattgtttacatgtacactggctacatgcacaagttgatgatgtgctttctttcccatccaacttctagagacaagataaaggaaataaaggaaaaaacaatgaatgccctcagtccatatgggtcaataagagatcatagagaagaccctagcagaactggagaacaaattggccagcctaccaatcagcctttcatatctctcctggaattagttagagaaatataccagaaagaacctgagctagtgcatggaaacgaggaactttggacctttgtcatatctgcaggagaagatcacaccaatacactaactcttgtggcattccttggacttcttagtactttggcttccagtgaagttggtgctgccaaagtctacgaactgctccagggaaaagtttaccgttcacttggttggagcactttgtttgattgcttatctatttatgaagaaaagttcaaagaatcccttcaatcttctgcaagcgtgatgcctgagtttcctgaagcggatgcacaggcacttgtttcgtatttagctgttctccagaaggttgttgaaaatgggaatactactgaaagaaggaaatggttccctgatattgagcctttgtttaagctcctcagctatgaaaatgtaccaccatttttgaagggggctttgaggaattcgatcactgcatttatcaaagtatcaccgctgttgaaggatgctatttggagttatcttgaacaatatgatcttccggtggttacgcctccacttggtcagcataatgcaacacagatctatgacatgaggtttgagttgaatgaagttgaagcaatgagggagagttatccatccacaatatcatttctcaacttagtcaatgctctaattgcagaagaaagaaacataagtgacaagggccggaggtttatgggtatatttaagtttgtttacgaagatgtatttgggcctttccctcaaagagcctatgccgatcctcgggagaagtgggaactggcagttgcttgcttggagcacttccgcatggttttaagcatgtatgacatcaaggatgatgatatttatgctgctgttaacgcatctggaccttcaacaacatctcatgcctcaatcgacagacagctccctgtgcttgagctactcaaaaagtcctgcactctatccctcccacatgtgattttgtctgcaattcctgtaataaagcataatcctgatttcatgagtgggaaagttgctttccggaatattatgaacatcgtatcagtgggtgtggacactcttattaatgagcgaactacccaaacttatgggattcttctggagaaaactgtccatctatcatttgaaatatttattcttgtgatggagagagatctggtgcttgctgatgttttccgtccactctaccagccgttggatgttgtgttagctcagaatcatagacatattatagctttactggagtttgtacgatatgattatcttcctcagattcaacagtgctctataaaaattatgggaattctgagttctagaatagttggtcttgtccagttgcttctgaaagcagatgttgctaaatcggtaattgaggattatgctgcttgcttggagttccgctttgatgatttccaggccatagagaacacaaaagatgacgttggtgtcctaatactacagctacttatcgacaatatttgtcgtccagctcccaacattacacatctactcctaagattcgatgtcaatggatccatagaacggacagttttaaaaccaaagtcacactacagttgtttaaagacaattcttgacaatcttgaaaaggtgacaaagccagatataaatgctttactgcatgaattcggttttcagcttctctacgagttatgccttgaccctttaacttgtgggcctgtcatggatctcctgagcacaacaaaataccagttcttttctaagcatgttggaaccattggtgtgtcaccacttccgagaaggaacaacaatcaatctcttcgtattagcatgctccatgagagggcatggttgctaaagatgctagcattggcattgcatgtatctgatatatcatcgtccttataccgggagtcctgtttggctattctatgtcatacttttggccattgtgctgagaacttaaggagtgcaaacctgttacaatctcctggcagtagcaatttagcaatgaatggaaacaaggttttggatttgcttgaagttgtccagttcagatgtccggacacttccattaaatacccccagatgctttctaacctgagacttgaatcaaagattgaagagatcctaaggaattccgcgacatctgaatttggtggtgtatattattattcagagcgaggcgatagattgattgatcttgatgcatttcatgaaaaacttctccagatgtctcagttattgaacccacaattaagtgaatctgagaaaagcgagctaaaagaatcattccatcagatgctgaaatgggcctggagatataacaaaaatcttgaagaacaagcagcccagcttcacatgttgactggctggtctcaaattgttgaaatagcagtatctagaaggatgtcattacttgaagatcgttctcatttattgtttgagctccttgacgcttcattaagtgccacaacatctccagattgttcagtgaaaatggcatatattttaaccaatgtggcattgacttgtatggcgaaactgcgggatgaaagattcatatgcccaaccggtgccgattctgatgcagttacttgccttgacatcatttcagcaaagcagttgtcaaatgcagcctgcacttcattattgttcaaactcacgatggcaatactaagaaatgaatcttctgagaccttgagaagacgccaatatgcattactgttaagttattttcagtactgccgtagcacccttgactctgatgtccctccaccagttcttcggttcttactacttgaagaacaagagggagatgatgatgaacttggtcttcaaaaggttctcaaggaacaaaatgaattagcacgcagcaacttctctatcataaggaaggaagctcaagcagttattgatttggttgccaaggatgcgatccatggaagtgaagcagggaaagcaatttcattctacgttcttgattcactgattagtattgaccatgacaagtattttttgaaccaaattcagagtcgaggaattctcagatcatgtctaagtgatgttaacaactacttgtctaaggaagcatcattctcatcagagtcttcacagcgattttgcactattgatgctcaattgtcattacttctgagaatcagtcaccactatgggaaacatggctcccagattctgttgtccatgggtgctctacataatctttcgtcgtgcaacctgatgggttcgcagaaaaaggcaaattcaaggctcaactccaatgtagtgaaagagcgagctggagaaattgacaagaggagatcacttactgcaccgatacttagaatagtcacatctttcacctcacttgtggactccgctgattttcttgaggcctggtattatgagattctggcctacggaggtaccacatcagctagaactgattgtccatggcttgggtttgatttgtgcttgatttatgttatggacgctgattcatggatcggctgtaagggctgtcctggccatgccatgacatttatcaacagtttggtgaaaattgacaggtttttagaggatgaaaatttggcctcaggtgataattttgtcaagagagtttggacggcaatctttttgagactagggttagctgaggctgcgcctcagccctctaccgaccgctttctgaggtggtggagccaagcaacgaagaaccagccgaaggaggtgcggaaagggattaactccttggtgaagaacaaaattgtccgggagttagtagacttcgccaagcagcatcagcctgtttttaatatcattttaagagagagtatatctggagctaatatattcaacttggagcggcttaatatggtggtctctattcttggcaaggtatgggcatatgaggaaaatgatgaatgcagctttgtccaagatctattttccatgatgcaatttcttttcagtcttgatattgggtctctcaactttatgcaatcatcaaacatgattgagaatcagaagtcagaattgatagtgtttgccttgtgcttcagccttatctcctacctatatgttctggctacaaagaaggatatgcggtttcaaatttcgtatgatgatactactgaaggtcagcagcaaccaacactacaactgatttcagatcttctaaactcaataacagttgctatggaaagagtagctgaagaaaaatatatgttgctaaataagattcgtgacttaaatgagttatctaggaaggaggttgatgatataataaaattatgcatgaaacaagattgtatctctcccaacgataacatccgtaaaaggaggttcattgcaatgatagaattgtgttgcatggccggcaaccgaggccagctcataacccttctactccaaatcgcagaatgcgctgtcactattctccttgttcattttcaagacgagtcttgtgcaaaagatatttcttcattttctgatgagttgcttcctatcctggagaggctagagcattttacggaggacaaggtcgggcgtagcctcaagctatttcaccgatctgtaaccactctaaaagagatgaccatcagaagcatgtcattgtgatttgtgaagaacgactgaaagatgtatacgatgtaactgttttttgtagcatagatttcaagctgtagagccctgttgttgtataaggttacaactgaaatataatgttacttggatgatactgctttagcc

SEQ ID NO: 71155 - DNA, 1702 bp, Oryza sativa
  Clone ID: PAT_MRT4530_71656C.1
ttcatatccgcaacgcacgcacgacagccagagagagagagagagtcagaccgccgacacccgacgacatggccgtcgcctccgcgtgggccaaacccggctcgtgggccctcgccgccgaggagcaggacgacctgcccccgccgccgccgcccgttcccgccgccgacttcccctccctcgccaccgccgccaccaccaaggtccccaagaagaagaagccgcagcccgtcccgctcggcgagttcaacagcaccaagttcgtcgcccccgcctaccgcgggcccacccaagacgacctcctcagcctccccacaggcccccgcgagcgcaccgccgaggagctcgccaacgccacgcgcggcttcggggctcgctggggcggcgccggcgccggtggcccccgcggcgacgacgagccccgccgcggcggatctggcccccaggacttcggcccgtcgcgcgccgacgaggccgatgactggggcgccggcaagaagccgctcgagaggagggagcgcatgggagggtttggcgtggactcttcgatgtcgcgtgccgacgacgtcgatgactgggtctccaccaagagggcggcagcccccgcgcccatggagcggagggagcgtagcgtggcgttcggggccgactcgcattcccgcgctgatgattccgcgagctggatctccaacaagggctattctgcggcgccgccaccgccctccgacagccggaggggcggtccagtctggggtttcaacagggatggaggcccagacgccgactcttgggagaggaggagggaggaggtgagcggtggtggttcaagcggtggtgcccggccacgcctgaaccttcaaaagcggaccttgccactggctaatggcactgatggagaagggaaggaggacaaggaggaggagaagggagagatgcagcctaaaagcaggtcatcaaacccgtttggtgcagcccgccctcgcgaagtggttcttgctaccaagggagatgacgggaggaaggaggaggagaaggagaaagaggaggagaagctggagattcaaccaaggaccaggacttcaaacccgtttggggctgcccgcccacgtgaggaagtgcttgctgcgaagggtgaggactggaggaagattgatgagaagcttgaggccatgaagatgcgcgaggcaccaccacctgagaggaggtcctttgggaggagaggttcccctgttagaggagaggacaatgggagccgtccactgccagagagtcatgtcgagggagcttggaagaagcctgatgcagttcaggctgttggagaatccgaagatgggtctgataagcttaacacggctgaggctgcgagaaaatttgaagaagggtttgataactgactgctgcagcaaactaatctatgccggtacttgcgaacccaaggattgcagatctcttctgctaaatagcctttctattatttttttgctacttgtgtgctacagttgtaacactgagtcaattttgcgtccatgtttcttatcttttcttagcacctggtaatcgtgatttatggtattgagaattttgatctggaacttaggtcttaatcatagtgggtagtagctattcattctattgtgactgttagttgtcatgctatgttgacatggtgataatgtctcgaagaaagaaatagtgctttttt

SEQ ID NO: 71156 - DNA, 315 bp, Oryza sativa
  Clone ID: PAT_MRT4530_71657C.1
atgacggggcggcagtgcagcgtggcagtggcgtcggtgtcgtcggcagtggcggcgcgacgttatacgtcatcggtggtggcggccgcatcgaagtcagggtcggcatcggcgggaggcggagtcgaggtcggccacgtcgacgtcggcggtggcgtcggcaacgaggtggcggctgtttggagaaagaggggaaggcggcggcggctctcaccccggagatgcggcggcggcgtcagcgacggaggcggcgacgacgacgaccacaagacgacggcgagatacggcggcagcgtcggtgcggggatgccctag

SEQ ID NO: 71157 - DNA, 1037 bp, Oryza sativa
  Clone ID: PAT_MRT4530_71658C.1
ttttactggcgcgttagacgatttataggcgcgccacgcatggcgagttggtcgctcgctcgtcacgcggtagcggtagcttgctagctcagcttcagcccaccccgagaaagactcgctcgctggcctggccatggaccgccgtgtcgtgaccgtgcaggcggaggaggacgagatggtgcggcagcggcagcggcagcgtcagctcgtgcgcgagcgtgggaggcgcatcaaggcggcggcggagctcgggctggcgcggtcgtcgtcgggcgggcggcagtggggccgcgcgctgggccggcgagctctcctgctccggaagggccccgctacagcggcgctctcgtcatcgacgctactgctagagacgtcggctggccaggaggagtcgaagcaggggaaggcgatggagggagaagcagagcaggaggaggaggaggaggaggtgatggtggatgagaaggtggcggtgctgcggcagctggtgccggggggcgaggcgatggcggtggagcggctgctggacgagacggccgattacattgccgctttgcgtgcgcaggtcggcgtcatgcgcgcgctcgcctgcctcctgtccggcctcggctcgccgccggagaaagaaatatccgtcacgccggagaagcctatatgagaatgatgcgtgggcgccacaggttacgtgtgtctcgtaagaggtctcgtgtaagcgcgcgtttgaatcttctgtagtgagtttcgttcgtttctactcttcgtacgcattacttgttccctttcacctcttgctaggctggcaggcaaacgcatgttattttgtatagtgggacaacaagctagatgcaagtaggaattttagtgtaagctctgccacttgaattttccacctcctggtgctgttgcccctgtcgtcggaacatggaagtagcagcaacaaatgcagattagctagctgctggtgattaggagttgtgaatgcatggcaccagattttattgaattttgttgctaggcaaaagttagtacgagtatac

SEQ ID NO: 71158 - DNA, 2436 bp, Oryza sativa
  Clone ID: PAT_MRT4530_71659C.1
atggcgcggcatggcatgcatgctgcgttcgcgcgtgagacggcgtgcgcgatcagatcagggggagcgccagagcccgcgcacagtgcaggcgggtcgtcgcagccgcgcagcgcgaggaggccgatgcgcgcgggggccggatcgagggcgacgggggccggcgccatgaatccctacgacatgccaggacggcaggtccattttgaggaagcagcgaagcacagtgtatatggcactactgggcactgcaagggtgatatggtgatctcgtcgagaagctcttacaataggtcgccggccatacctctttctctagcgattggcggagccgcggaggtggagctccactccaatccaatccaagggttcagcgaagatcaggagttcagacggggtaatgtcctcatcaacagtggtcccctgtggtcggggcgtggaaggaggtggaaccattccttacgccacaaccaacagcagcgccaatggccacacggatggaaacctgatcttaactccgtgtttttccgcgttctctttcgttctcgcttagacctcagcttacgcttcgggctcacccagtcagtcatcaaagtgtgcgtgcttctccagaacagtgagagagagaggggcaaagggaggcaggataaaaagccgagctgtaggggactaaagaagaaagaaaagcatagaaaagaacggcaagcaagcagctcgaggcacccgcgctagtacataaagccaccgaggtgcgatttcgcgagctctagcccctaccactcggccatttcccatctgcctcctggagctttagctctaactctagttctagctctagctccggctacgtttgcaactgttgtttatctcctggtggatagcatttagactcttgaagactttgagctagttaaccttatggaagaagggtccaacaaaagagaaggacttcctcctcaactcctagatctcatcccagatgagaaggaatggaagctgagagaagcattaggtctagggagatcaagaaacgcaggcttcgacggtgaagaagacaagaagctagacctaaagcttggtcttcctggttttatagaagatgatgaggcagaaaccttaagagattacaggctacagcaagagagcccatctctctcccttagtttctttccaaagcactccaagaccaccagcagcactactacgacaactggagcaaagaggggattcatagacacagttgaggacaaaacagaaggttataacgaccagaagcagcaggcaagggcaggatgtgggaaggaacttgcagtggaggaaatgatagcagccgtgagtgagaggaagaaaggatgctgccccccaccaccaccaccacatggtgctcctgctacacctgcgcgcaacagaccacagacccagggaagaggagctgcagcaccagtggttggttggcctccaattcgatccttcaggagaaaccttgctagtagtagttcatccaaacattcccctgaaccacaaaatgataatgccaatgcaaaggtgacgctcacctgcaagaaaaaccctcttgtaaaaatcaacatggatgggatccctattggaaggaaaatagaccttgcagcctataacagctatgatgggctatcgtcagctgtcaaacaactcttccatgggtttcttcaagctcaaaaggaccaaactaatgcgcaaattgcacagcaaggtgcagatgacaaaatattttatcaattgttggatgggtctggtgaatatactctagtttatgaagacagtgaaggagacaggatgctggttggggacgtgccatggaaagtatttgtctcaactgctaaaaggctgagggttctaaggagttcagagctttcccataccctgattggagctactgctagggtctagccgtctaggagagtcaccaattgctgaaatgctgggatcttattaaccattcggaatgaatgtgtgcactcaagccagtccattctccattttaggactacccctattttgcctatatagatgatctactgagatgagttggcatacagcaaatgcaaggaaatggcaatctgttttgtaaattaggttaccttgctatgacatgttgcttaattcaattcgaagcgattttggttttatcggggaaaaaagcatatgtagacttgcaggtcacccatgtaaagtgccttgttctgcgtgataaatttgtattaatcgctgctgcaacccgacacgcagatctaatgtcaccagcgtgtctcagaggacagcaactaggctaacctgatagcatcaagtcatcactccacgtggaatatgctactagtaggaatttttttttttgacaaaaaaaacagaattatccacaaaaaaaaaaaaaaaaaaaactcgagactagttccctcgtgc

SEQ ID NO: 71159 - DNA, 2355 bp, Oryza sativa
  Clone ID: PAT_MRT4530_7165C.1
atgtggcggctgagggtggcggagggcgggggggacccgtggctgcgcacgaagaacggccacgtggggcgccaggtctgggagttcgaccccgccgcgggcgaccccgacgagctcgccgccgtcgaggccgcccgccgcggtttcgccgcccgccgccacgagctcaagcacagctccgacctcctcatgcgcatgcagtggccggtgggcaaatcaaactgggttagcatgtttttagcctcttatgaggactgtaggatgcagagaactcagtttgctaaagcaaatcctcttaagctggacattccagctatcaagctagaggagcatgaagctgttacaggcgaagctgtattatcctctctaaaaagggcaattgctcgttattctacttttcaagcacatgatggacactggcctggggattatggtggtcccatgttccttatgccaggcttgattataacattatatgtgagcggagcgctgaacactgctttgtcatctgaacatcagaaggagatacggcggtatctctacaatcatcagaatgaagatggaggatggggtttgcacattgagggccacagcaccatgtttggctcagcgttgacatatgtttctttgagattgcttggggaggggccagatagcggcgatggagctatggagaaaggacgaaaatggattttagaccatgggggagcaacttatattacatcatggggcaagttttggctttcggtgcttggtgtatttgactggtctggcaacaacccagtgccaccagaaatatggttgttgccatatttcctgccgattcatccagggcgaatgtggtgtcattgccggatggtttatttgcctatgtgttacatttatggaaagaggtttgtgggcccagttacaccaattatattggaattaagaaaggaactctacgaagtaccctacaatgaagttgattgggacaaggctcgcaatctatgtgctaaggaagatctgtactatccacatccattcgtgcaggatgtattatgggccactctccacaaatttgttgaaccagctatgttgcgttggcctgggaacaaattgagggagaaagctttggacactgtcatgcagcatattcattatgaagatgagaacacccgatatatttgcattggtccagtaaacaaggtattaaatatgcttgcttgctggattgaagatccaaactcagaggcattcaaactccacattccaagagtccacgattacctatggattgcagaagatggcatgaaaatgcagggttataatggaagccagctgtgggacacagctttcacagttcaagctatagtggctactggcctcattgaagaatttggtcctactcttaaactagcacatggctacataaagaaaacgcaggttatcgatgactgccctggagatcttagtcagtggtaccgccacatatctaaaggtgcatggcccttttctactgctgatcatggttggcctatatcagattgcactgcagaaggacttaaggcggcattattgctatcgaagatttctccagatattgttggcgaagcagtggaagttaatagactgtatgattctgtcaattgtttgatgtcatacatgaatgataatggtggatttgcaacatatgaactcacaaggtcttatgcctggctggagcttatcaatcctgctgagacctttggggacattgtgattgattatccttatgtggaatgcacttcagcagcaattcaggccctgacagcatttaaaaagctctaccctggacaccgcaagagtgaaatagacaactgtataagcaaagctgctagctttattgagggtattcaaaaaagcgatggttcatggtatggttcttgggctgtttgttttacctatggcacatggtttggtgtaaagggattagttgctgctggtaggacattcaaaaacagtcctgcaatcagaaaggcatgtgactttttgttgtcaaaagagcttccttctggaggctggggagaaagctatttgtcatcccaagatcaggtttataccaatctcgaagggaagcgacctcatgcggtgaacactggttgggccatgctagccctaatcgatgcagggcaggctgagagagatccaattcctttgcatcgagcagcgaaggttttgatcaacttacaatcggaagatggtgaatttccccagcaagagatcattggagtcttcaacaaaaactgcatgatcagctactccgagtatagaaacatcttccctatttgggcccttggggagtaccgtcgccgcgtcttggccgcagacaagtag

SEQ ID NO: 71160 - DNA, 420 bp, Oryza sativa
  unsure (1)..(420): unsure at all n locations
  Clone ID: PAT_MRT4530_71660C.1
ccacgcgtccgcccgtgcctcccttgacctccaccccacaggtgttcgccatttcgccgcccccaccaccgcgcgccgccgccgccgccatggcctccatctccgccgcctcccccgtcgctgggaaggccgccgccttcgcccacaagaacgagctcgccgccgccgccgtggcgccgtcgcagcagcagctgcagcggagggtgagtggnnaggaggnngcgcgttcggggagggtncgngccgnngnnccgcccgcccgcgccccccgcgccccgggctccgctggctcggggnngagcgccgtgncgntgnctgtgtcgatcctggcgtgggcgtcggcgcgcgcccgcttggtgcccgtggtgaccgtgtgggtggccgtctgcgtgctgntgtcgctcgtcgtctgcggccctg

SEQ ID NO: 71161 - DNA, 361 bp, Oryza sativa
  Clone ID: PAT_MRT4530_71661C.1
taaggtataccctctatccttggacgtacgttgcatactgatacggtatacccgcgtggataccgataattcctgtgtacgttaaggaaatctatcacgtgatagaaacagaatccatagatggaaggagtcctacacagacaagactgggtttttaccatatcgtgatgggtccgatatctccgagttctacttggagatcaactgacccgtggtataaaagggaccccctgggcaggacctaaggcatcgaatctcaccgcccacacatccgccacagcctacgaagccggagcctacaggagcaaagtcgccgggtgatctagtcgaaccaactcgactacggtctcgtcgatatcat

SEQ ID NO: 71162 - DNA, 278 bp, Oryza sativa
  Clone ID: PAT_MRT4530_71662C.1
gcgaactcttactaccctcaagatgccggtatgtgccaacttggagggtgcactcgatgcaagcataccagaaaggcggtgttgcaaagggtacaatcttgacagtttgggatatatgcccctgaagtgcttttgggggtgatggatatgaacccacaaagtggcttgatgaggaagagctatcaaaggaatgacagactaatgaaaaaggcgtacttgtgtgcaattctcaaaaaaaaaacgtgcgtgtttgacaactatccaccttggacatctga

SEQ ID NO: 71163 - DNA, 360 bp, Oryza sativa
  Clone ID: PAT_MRT4530_71663C.1
ggaaacatgattaatttcttggtttacttaacacaggttcacaaagaaattatatttttgcttgcaggggagaatcgagggatcgccctttttccttaacttgtttttaattttcatgtccaatcaaagaaacacacccccccacacacatgcgtgcactgaatttttttgagaaacaaactcgattgatttgattttgattcgctggggataaaagagaacctgaaataaaaatttcaaccatcatcccaccttaaaggagctggttgtttttttaaaaaattttttggggcctttgaaccaccttttgtcgccggcctgccctttgaaaatttacaatttgccgtctttgacgggggc

SEQ ID NO: 71164 - DNA, 811 bp, Oryza sativa
  Clone ID: PAT_MRT4530_71664C.1
cggcacgagggaattctccaaggtaggggcagttggacaattagctaggtaagtgtgcgagaattattttgggggcaataaacaaagcagcaaagtatctttgatgggaggtagggcggataatgacagggaggaagtgctctcacctgacctgaagtggaggcactgagaggaactcgacaggagaattttggccatcatgcattgtggatgaagaatcaaaatcaaattaaaagcaacgtaattctgtcctgtggctctgttctcactgtagcaacaaccttggttcttacacatcccgttgtatctattcggttggcagcggcctctaccatgctggtgctcttacatacttccaattaggagcagacttttctggggaaatattagtgtattgaaccagaggccatccatactttcctttgtcatgtcatggtacttaatagtttagaagtggatagtatgttgtatatatagaagagtgaggttcaagaaaaccaagatttgagtgttgttaacttaggatattgctgttagtctgatgctccacgaggccatcaaccttcttgatctgcagacgggctatcaacctttgccgccccgcaccttttctcttgccctttgctatccttgctttgctgtgtgtatcagtgtgtgtgtgtgtgtgtgtgtgtgtgaaagggccatgttgtggttgtactacgaaaatactaccgtatagatgtggtataaaaggtgtgaaaatgtatggcagaggtccctcaaaaggtgacctgcaggtttatccgtaaaaaaaaaaaaaaaaaaaaaa

SEQ ID NO: 71165 - DNA, 3549 bp, Oryza sativa
  Clone ID: PAT_MRT4530_71665C.1
ttatgcggcggcagctggactggaggaggggagggcgagccgtcgagccgaggaggacgacgactcgggcaccaccaccaccaccaccccgacacggcacgtgcccggcgtgaggcccccgccccccatgtggatcgtgcgccccctccgcttgccgtggctcgggaaaggaaaggtggtgctttgctgcggccgtacggctcgggagaagacggggttgagggtttttgtgaagccgtggagcgcgccgtaaccgcgggagctgaagccgaggcagccgaggaggccctgccggtaggggaggaacgtgcgccgccgcatctcctccgcctgcgcccggttccgcgccgcgtagagacgctcgtgcgccgccgcgaccgtgctcgagcgccgcctgcccttgccgcccctcgcgcgcccccgcgtcgcctgcgcctcttcgccgccgccggcgtccgacgacgcttccgattgtggctgtggtggtagtggtgacctcgccgcgcggagctttgcggcgatcctgtctctcgatgatgcccacgagggcgagaactgccacgccttctcgggcttggcgggggcgtcgtgcgcgtgggctccgcctggctcgctcttgctgcggtggaggagcatgtccttgaggaacacccaccgccgtgacccgcgggcggacgacgaggaggacgaggacgaggacgtcgaggaggaggaggacgagcgtgacgaggcggtgaccggtggcgtggcctcctccgacccagccgagtgcgatggagttggctcggagccaagatccggggcggggacgagcgcattgagcagcttgagccgcggggacgcgccgcggagcggcgacatggaccgcgtgcggcggtgcacggacccgctccgcagcgtcagctcgcggcctcgcaccggcccggggcggaagtcgccgccgccgccgtcgtcgtcgtcgctgccggggtcgagatccgggagcgggggcagggtgagcggccggatctggccgttgtggaagagctcgtcggcggagatcatgggcccgccggggccgccgaactcgaactccgcatcgcccacgccgccataccccgcccccgacaccacaccggaggcaaccgaggaggaggagaggagcaggtggtggatggggctggccggcgcgctgaagaagtagccgccgccggtggcaggcgacctgccggggctggacggcgcgctggagaatggggtggagcagatgctgtcgaatgtagtcgtccatggcgcactcctgccgtcccgtcgtctcacaaagacgtcgccgatcacctcgtcgaccagtgagctcagtatttccctctccaactcttctcctgtctcgaactcctccacccgaaaatcaacccatgtgcccagcccactgctcatgtccttgtcgacaagttcatcctccacccattcgcccatgctcctccaaccacctatctcattgcagacttcagtttctatgcccctgctcatcgctgccatccctttgctccatgctgcatatcctgccctgaagtatgtgagacgtctcgtctccaggcattcacttacgcagtcgaacaggagctttcccaatccaccctttgtcaggttgacattgcctagaacatccccaatgtactccagctctgagtttctagatttctttgaacattgggtgatatctgagatgtccgacgcatctattgatgctgaggtgtctgatgcatcaatcgatgaagaagacactgaatctgttgtcttggcctcagcatccactgatggtggattgcttaggaaattctttggcatgtttttaacttcagaagatgatgaatatcctttgcttccatcgctactgcttccacggaaaatttggcctttggttgatgactgcgctgattggcaataatcaacatattgagaaggttttccttcagaagggctgcagtcaaatactccgctttccatatcccaattgctggaagaggagaccacgggctcttccaaggaaaagtttgcgggcacaaatgtgtcgcccctagtaaagttgatggatggctcaatctttgatgttagctcctttagtttcttttctaggagaaggctcaaagcatcaccatttacaaagttcaatcctactgatgagagcccttcggactttttgtctgaatcatccttctcatttatggcatccaaattaaaattgcttcttgtatcccacttccctgacagtctggagggtcctgctgatggtttaaccaatggtgaggtaaaggtaaatgatactacatctgtagaatctttactatcgttgttccacttaatgtgctcatccatgacaacattaggttgaacttgcttctgaagtctagctgctgatttttcaggcacgaacatacccttctcattggtggagttcctctctatcaaacgcttcttttgtggaaagtccttgttgtttgacgatgaaccttccttatcacaacttatgctttctacaatatcctttctgctgccacctttagatattttgcttgcattcttcagcttcccagttgaggaatctccagccatctttctaccttgctggcttgagactgatttgtttggtgctgactttcctctgcttaccatagaattttgtttctggttgttttgcctaaggacaggggaggaagtacctgatgatgacggtttcttctgctgcttattcttctgggcattggactgactcctaaaaggttggcttgttctgcactcatcacgatctttctgtcctcctgaattcttcccagaagaacccaatccttctctcttttgcacattctcctttgaattcattgtctttttattgttctgcagtctgaaatcaacacatatatataactgatttgatcaagtctggtcgacaaatcaaatagggatggatataacttaacaaaacaaaattacagaacaaaaacaacaacactcgagatcagattacaaatttacactcctgccgtcccgtcgtctcacaaagacgtcgccgatcacctcgtcgaccagtgagctcagtatttcccctctccaactcttctccttgtctcgaactcctccacccgaaaatcaacccatgtgcccagcccactgctcatgtccttgtcgacaagttcatcctccacccattcgcccatgctcctccaaccacgtatctcattgcacacttcagtttctctgcccctggatcattggtgccatccctttgcgccatggctggatatcctgcccggaagcaccgcagaagtccctgctccctagcacgctcttaacaccactcccgtcatcatcatcgatcaagtgggggcgccctgacggcaaggtttcttcgcctctcttcacgagcttagcaccctggggtgagttggagaacagcgtcttccgggacttgcgcttccaggcaaagaggttgaacagcccacctccacctcctcctcctcctgccccgccgtcgccggcaccaatcttgggtgcaccattctccgtcccgat

SEQ ID NO: 71166 - DNA, 228 bp, Oryza sativa
  Clone ID: PAT_MRT4530_71666C.1
gtatagactcctatagggcgattgggttcatcgagccggccgggatactttcttttccgctctcccccgatcctcgtggagtcctcaactggatgccgctccatcgccatctcgtgtaggggacgcagatactactgccgactgcggacggctaatacgatgggagccgtgcgccagggacgtcacaacctgcctacacgaacaacggtaggataaagcagcccaaag

SEQ ID NO: 71167 - DNA, 279 bp, Oryza sativa
  unsure (1)..(279): unsure at all n locations
  Clone ID: PAT_MRT4530_71667C.1
caacccgcagctaaccncggcgacctcgtccgnaccgcgccacgcgaccacactccacacgcctttnttttcctttttcccccaaaaatccaaagcaacctngcccgaaaagaagagagaacgggccgcgccgngccgagccgcgtgggtataattnaagggaagcggtgcgctcgntcgctgcatccagctcaacgcgcgggggaggcggaggaatcggcggatcggtgggtttcgggcttncacgtagtcgaggctcganaggagggggggatggcg

SEQ ID NO: 71168 - DNA, 1852 bp, Oryza sativa
  unsure (1)..(1852): unsure at all n locations
  Clone ID: PAT_MRT4530_71668C.1
ccggccgggctctcctcctttcttctccaagtcaacagttcctacgctaccaaacccgatcggacgcggacactgacagagccgacgccgacggacaccaaacttcccttcaaatcaagggttataggagcacaccacgcgggtggcctcagaaaggaagggggcgagtccggccgccgtcgccatgtccaagccacagcagcagtctgccccccttccaccaccacacctcactcnnntncaccaccgccctccactccgccccccgcctcctcctcccgctccctcctctccgcgctgcgccgctccccggtcaccaccctcgtcgccgccttcttcctcctcgccctcttcatgtacggcgaggacgtccgcaccctcgccgagctctccatcgacgactacctctaccccgacgccgatttttacaaagtctccggccttccccctctcctcctccccccggccacctgggacctctcccgcggccgatgggtattcgacaacacctccctcccggcctacagggagaaggaatgcaccttcctcaccaagcaggtctcctgcctcgccaatggccgccccgacgacctatggcagtactggcgctggcaacccaacaactgctcgctccccacgttcgacgcgcggcggttcatggagaagatgcgggggaagaggatgatgttcgtgggggactcgctgaatcggaaccagtgggagtcgctggtgtgcctggtgcagcccatcctatccaagggcaggaagaagatcgtcaagcgcggttccttcaacatcttctacgccaaggagtatcgcgccaccctcgagttctactgggctccattcctcgtcgagtccaactccgacaaccccaatttccaccacatcgaccagcgcatcatcagccctgagcggatcgagagccatgccaacaactggaaggacgttgattacctcatcttcaacacctacatctggtggatgaacaacgaagacatcaaagtcaggaggccaaattcaacttcttggtcagatcacgacgaggtgccaaggatcgagacctatggccgtgtgttcaagacttggtcgacctggctggaacagaatgttgatcctgccaggacttcggtgttcttcatgacaatttctcctcttcacaacagtagtaagatcggtataggtggccgttggttcaacactgatgctgtcatcaccttttgccaatttaatatagacgagccctgcattagtgctactggaagtctggaactgtggaatatactaaaatataggcatcgtgtgaggtggttcccagcacaatgggggaacccgaacgggatcaaatgcgtaaaggagacacttccagtcctcaactacaccaagccactggatctcaaccatgacatgcggatgtacgacctggtagcaaaagttgctaaaaacatgaagaatgttccagtgtcgttgatcgacatcacaaggatgtcagattacaggaaggatgcccacacatcattgtattccatccgtcagggtaaactgttgacaccggagcagaaggccggcccacagaagtacgctgactgcatccattggtgccttcctggggtaccagacgtctggaaccagatactttacaccaggatcctctccaaatccttccctccatccncacatccncctctccctccacaatgagaagcanggagcatganttttttttgccccatcgtatactatataggaaatgtaccattactattcaattnttttggtagtttggtgaagaaaatcaagctatagagagaaaaaggatggagtgggcttgttactgatggcatgtaaaatc

SEQ ID NO: 71169 - DNA, 420 bp, Oryza sativa
  Clone ID: PAT_MRT4530_71669C.1
ttggcccaccccgtctttttgcacaaaattttggaggtttcaataaggggagaggaagaacgcaccttagactgtccttgccatgtggtgcccatatataggttggattatttttcgcttggttttccgcaaattcgggaaatttcaaaaaaaatgtgtcaccactacgcaagggcgggtggttcgggtattgacttcctcttcatgttcgcctctcggatgctgctactttatgaatttagggttcttctggagtacaaaaaaaaccccttaatttgatctgtaatttctgttgtttagactttccagtacctagctagctagtaggagttgcagaatagagatctgtgtccctgtcttatacttttaggtctcttcagggtttgatcagcgctgtttcaatccaaaattgtgtgtgct

SEQ ID NO: 71170 - DNA, 510 bp, Oryza sativa
  Clone ID: PAT_MRT4530_7166C.1
aaaaaacaaccccaccccaccatttaatttctcctcccccacccccctcccaaaaaaagcaaaaaaaaaaaaaaaaaaaaaaatatttatttgccacgcaataacccggttccgtttccccccgggaaacgggccattaaagggagctcacccccaaaaggagcgccccccttgggccccacccccccaccatttacaaaaacggggcatttaactggggggaacaaacccgcggggggtttttttttaccgcgacaaaatattaataaaaaaattaatattatcctaggggaaaaaacattggggggggtgggggggggagcccccttcccccccaatttttccccccccgagaaagcaaaaagggggggggggggcgaacgcccttttttacccgcgaaggggttgttggggggaagccccgccgagaaaaaaaatccccccttcccccacgggagccagaaaaccccccccctttgggggaaagggggggggccgaaggggccccca

SEQ ID NO: 71171 - DNA, 319 bp, Oryza sativa
  unsure (1)..(319): unsure at all n locations
  Clone ID: PAT_MRT4530_71670C.1
gtcgaggcctcgaggcgaaccttctagaagtttccnggcgggcncgatgccctccaacgaggccgccgcggtnggccncccggacgcagccgtcgaggggactgtcccnccgcagcaggnccggccccggggagctgcanagccgggtgaggcggccagctcgncgtggccctcgcgcgggangattcaggcgcaggcgaggcngagggggaggaggangggnccgtgccgttctggagaggacttggttcctcgcgctgctgctggcgatggcgncgcgtcgttcggatcggctgctgctctacctcggcctcgacct

SEQ ID NO: 71172 - DNA, 597 bp, Oryza sativa
  Clone ID: PAT_MRT4530_71671C.1
ttgaaaagttgggcacattggacctaccgcccagtaccgacctgtccgagcctcggagacacgaagtggatgtgctgctgcgtgacgacgaccgggcgaccatgacgccgcacgcctccgcaccgagccactcgttgatggcgctgtatgccaaattcctcggcgttagcgataattctgcggagctcgccatgttggccatcctggtctctgtcgccttcgcccagatcctcgcgatcctgtccaacagtttcgcggtgggcgacgccgccgcggggtacgagtacgacggcgcggccgaccaccccgtcctgcgcatggctgtctccaccctgaccgtcgccgtcccggcgacgttctacgtcggcgtcatggagctctacgcccgcgtcacgccggtggcgccgccgcttcggcggctcctcgccgttcttgcgccggggatggcgtggatcacactctttcttggtatgccgccactcgtcgttctgctcctcggttgactatgttgagtctgggtgaattagcagtggatctacaagaacgggacggttggctgccgctctgctgcagtgcttcttgctgcacagcctactg

SEQ ID NO: 71173 - DNA, 384 bp, Oryza sativa
  Clone ID: PAT_MRT4530_71672C.1
atgcatgtactagtgcccattaaatcggttgaggagaaacgccatcagcaacacctacttcatggaagaaagaagctaaactcacttttctctgcatcaccggggttaactgtgttctgcatgtcacctgatgtggatgcatgcacatctgacggtgaggcgacgccgcagagcagcgaacaccggcaccgccaatgctgtcacgtcccctgtaaaataatgaagcggatggatgcatcaggggaagacgtgacgaccatgattagacgagtaagagcccctttgttaatagcagttgctgcagttgagttgatcttaattgcgtgtttcagctgcaacacaagagatgcacactgtcagccacaaaatggtgctggatcaaaa

SEQ ID NO: 71174 - DNA, 564 bp, Oryza sativa
  Clone ID: PAT_MRT4530_71673C.1
ctgtaatcttactggcaaagaatttttctctctatttatatactgccttgagttgatgtgtgcaagtagggatggtcgcgggctgctctttgggtacccatgcacccactctagttcaaccaaatgaactagatactaaaatgcattgattttgttgagctagagtaacgcgtacccacggactgatccacgtctatagcttggtgcagttttaggatcagatccatctatgaacccttgaagttgggtttcacagatcaacggccgcaagtcactaggccagtagatccatcacataccaaaatgggtgagtccaactttgagttcggaccatgtcatcttccctatccaaaaaatggttagaaaaacctaggtgctagaagttctatgtatactgttttgtttattaatagatgctttcatttatctaatagggcatgatacgttcatttactaatccagtttgcttgccagtatctgaatgttgaactaatctgtgaaacattatttagggttgatgtacgtttgttgcgctatggtgacattaccaagcatcacaggaaa

SEQ ID NO: 71175 - DNA, 923 bp, Oryza sativa
  Clone ID: PAT_MRT4530_71674C.1
tgatacgctcgctaacttggctaattctgctgatatttgctctgcttctgtcatatcaccttgcgcttcggcagctgctgctggtgtggtgatacactcgcctagctttggccaccgctcatctctgctctgctttttctcctctgctccactgatcatccaattcttctcctcctgattggccattctgattggctggtgacatgtcgaagaaaattgtggtgaagctggacctgcatgacaacaaggacaagcagaaggccatgaaggccgtctcctcggttgtcggaatcgacgccatttcgatggacatggcgtcgcggaagatgacggtgatcggcacggtggatccggtggacgtggtgagcaagctccgcaaggcgtcgtgggcggcctacatcgagtcggtcggaccggccaaggagccggagaagaaggaggagaagaaggaggaggccaagaaggacgccggcggcggcggcggcgacggcaagaaggaaggaggtgacggcaagaaggaggagggcggcgacggcaagaaggagggggaaggcaagaaggaaggcgacggcggcggcgacaagaaggagggcgaaggcaagaaggaaggcgacggcggcggcgacaagaaggacggcaacggcgacggcaagaaggagggcgacgcgaaggccgccaagaaggaggaaggcggcggcggcggcggcgacggcggagggaagaaaccagccgcggtggcgccgatgccgatgccgatgccgctgcaccacctcccaccgcagtacttcaacatggagtacatgaaccagtatcaccggccgccgccgccgccgccggcctacccgtacgtgccgccgccgcagtactactacgtccgcaacatgagcatggaggagaaccccaactcgtgcgccatttgctga

SEQ ID NO: 71176 - DNA, 201 bp, Oryza sativa
  Clone ID: PAT_MRT4530_71675C.1
ctcaagacttgtgagccgtgaggacgctcttcaaggtcattttctgtatatacaaataaatgctgatgaccatgattcttttcacggataggagtgcagagtgcagtgatacgtgcattcatcctttgtaagaaatattgtatcttctgaacattatttagttcacctgacagtggatttcatttgcaaaaaaaaaaaaaa

SEQ ID NO: 71177 - DNA, 475 bp, Oryza sativa
  Clone ID: PAT_MRT4530_71676C.1
aaaaatatatattactccataattgttcagcacagatactactactctctcactcaatctatctgccatctttcagtaaaagaaaaggaaagaaatgcaattgctatttcctgattcgaatcccaggtacatccttaaggcccatcttcagagcagttttcctgtacagtgctggaggcttttccaaaccgatggatttacagaacctgttcgctaggtcaacaagcatggtcttgtctcttccaacatcacctattgaattgtagtagccaagccatgcgtgatatgctgcctccttgatgctcatatcaactatctttattgaaccatcaacctttcgtttcatctcctcgtcaatgtttggtgtttgagacttctgcaccgggagatcatgtatctcatttaagaaatactcttcccatggcgcaagcaaaagaatccctttaccagatttaccttctctttcggtccttcc

SEQ ID NO: 71178 - DNA, 108 bp, Oryza sativa
  Clone ID: PAT_MRT4530_71677C.1
gcgacgtcgtagtgctgagcctccgccggggtacccgtacgcgcagggtcagggcggtacccagtcgacggaccctaagaacaccaatgtcgttgagctcactcctgt

SEQ ID NO: 71179 - DNA, 477 bp, Oryza sativa
  Clone ID: PAT_MRT4530_71678C.1
ttggttttttttttttttttgtttttttttttttttttttttttttttttttttaaaagagtatcaactggttttttacatgggttacattatagtacaagtccacaatcaacaggggatgcagggctccatccaaaaagacatcccaatgcaccaccaccattgacggcctactccgatccaaaaaaagagaggaagggggggtggacgaaaagacttttaatcttcctccatgggcagccatgggtaacactccaacacctgaagaactccggatttgggggggaaggcccggaaaatggtggcgtggccggggtcggcaagatgggcaaaaaggttgcagagggggccgcttccccgggactttgccgggaaccaaactcccatgacggccagcatggggagccccccgatctggatctgggtggaggggaactccttgatctttttgggggagccggtgccccaaccgagggg

SEQ ID NO: 71180 - DNA, 222 bp, Oryza sativa
  Clone ID: PAT_MRT4530_71679C.1
tacacagacatagtaactccacatcagcgtactgatcgttgcttcgattttcccgggacaaaggatcgtcccaaatcatcggaaaaaacgaacgaaatcaccaccgacgcacacacaaaatcgttcttgacggaacgagagaagataagatcgatcagatcgtatcgcgatcgacttcgttttcttttcgatcggatgcgtcgaatcctgcatgcaatgcaa

SEQ ID NO: 71181 - DNA, 2091 bp, Oryza sativa
  Clone ID: PAT_MRT4530_7167C.1
tttttttttttttttttttttgcatccaacatttcctcgtctttccattgcattttgtggagagatacaagcctagattacatgtagttagcctatggcaacccctgtccgagattcaggttgataaaaggcaacattgacagccactcaactctgaacgtattcgagttggggataaaattacaggcaaagtaaaaaaaaaagtacaaaagttgttatcttacagattatacaatactatatcgacgagtaaaaaccagaattgctcttccattttctggaaaactaaagtggtctcgagcaacatcctaacagcaggacatgcctcttcttcccgccttaatctcatgtcagatttgttatttgtcacctacgaatagtagtactgtggcgtgacgtgtccgtgcgacgagtcagttgtcacaagcacagccttgtcagctcaccgtcggcgacggcctcctctcctccggcggcctccgatcgcagcagctcgctctccgccgcgcacctcttgtacggcatgaagcccctctgcagcagggtgacggacgccgagctctcgcacttggtcagccgtggcgaggccgccgcctccctgctgttcccttggccacgggactccgcgacgtccgaattctgagccgccgccgccgccgccggtaccgccgccgacgatccaagcacgacgctggaggccgtgttcgagcccgtcagcgatccttccctctgcgagactctgaactctacgccctctgaatcacggtggcactgctggttcgcagccgccgccgccgccgggtagaacagcgcgcatggaaggctcccgttgtagctcaaccatggcatgacaggttgcgcggcgaaaccatccgatcgaggaaggaagtagagaaactgttgcatgctgctcggccatggattcgacgagctcccttctggggcagcagcaaaagaaggtactagtatgtttctggttgctctctcaactgaaccactcgttgcaatgttactgccattaagcaggtgcagctggtctgaatccttaaccactacgctctttccgaatagcctgaagactgatgcttctgaggatgcttctttggcatccgtggttgcaattgacatcttagtatttggcgcctgcatagccaactcagcagtcgggatgctcggtgagaggcacccgtcctctctgtccaccgacgacgccggcgagccgccaccgtcgacatgctcatccgtaccggcggctgacggagccagcgacccgctgccgctcgagttattcgagaacccaccgcccagggcctcggtgcctatctgcgccgccgtcagcaccgacgtcggcgagccctcctcctgctcggacagggactgcatccacaacggcggcttctccagctgcctgagcgccgggacgtgcttcttggccgcgccgtccaccttgcgcgggtacgggtgcgccggcttcctcttcggccgcggcggagggatctggatggccgccgccgccgccgcggcggacgcgccgcccgagccggtgttactccccgaagattctctgacgaccttagagaagaacttctgcgcgtggctacggatttgcacggcagtcttggtacctatgtgctcttgtatacggcgccatgcgcggccgtgcagctgcagggcttccaagaacagcctgtgctcctcgtccgtccacttctcgcgctgcttcgtgatcgtgtacggctttcgcgcctttggcacgtgctcttcccctgacaaatccatgtcgccgtagttcatatggctcctgagatgatccacggtgctctcgccgccggcgcgatcgtcggcaccgttttcgtcggttgccatggcgtttcccggcaaacaggccatctccattctgaaaaaaccgaactcctcccaaaccaaaccacactccacaggatcgccacaccaaagccaaaaaatcagcgcctcccaaaccccgcaatctttgcgagttttctcctcgatgttgttgatgaggacgacgagatggggggagatgaggaggagaagggaacgaggaggcaaagaagcgagcgttacgtaggc

SEQ ID NO: 71182 - DNA, 2400 bp, Oryza sativa
  Clone ID: PAT_MRT4530_71680C.1
gggctccccacggaacctctctcccttcttggttcttcttctcatctcctcccactccagctctgcccctgagccaagaactgagcagcagagagctcgtggtctctttgccagcttctcctcagtcctcaccaagctgttcttgcagagaaaacatagccaaagagctaatttgagctcccaccatgaagtacgtgctggtgacaggaggggtggtgagcggcctcggcaagggcgtgaccgcgagcagcatcggcgtcgtgctcaaggcctgcgggctccgcgtcaccaccatcaagattgacccatacctcaacactgatgctggaaccatgtctccgttcgagcatggtgaggtcttcgttttggacgatggtggagaggtggacttggaccttggaaattacgaacgttttctggacatcaaattgacccgtgataacaacataaccacgggaaaaatatatcagtcagtcattaacaaagaaaggagaggagactacttggggaaaaccattcaggttgtgccacatattacagatgaaattcaagattggattgaacgtgtagcgatgaatccggtcgatggtaaagaaggacctcctgatgtttgtgtcatagaacttggtggcaccataggggatattgaatcaatgccctttattgaagcattaggtcaattttcctaccgtgttggacctggaaacttctgtctggtccatgtcagtcttgttccagttttaaatgtagttggtgaacagaaaactaaacctacccagcatagtgttcgtgggctaagaggccttggattggcacctgacattttagcatgtcgcagtaccgagccactggaagaaaacgtgaaagcaaagctctcacaattttgtcacgttccagtctcaagtattattaatctccatgacgttacaaacatttggcacatccccttgttgctaagggaccaaagggcccatgaagctattctgaaagttctagaccttcaatttgtcggtaaagtaccacgagaacccaagttggttgaatggaccgaaagagccagcaagtttgacaagttgaaggctacggttaagattgcgatggttggaaaatatactgggctgtccgattcctacctgtctgttctaaaggcacttttgcatgcatcggttgctatgggaagaaagcttgtagtggagtgggttccttcctgtgatcttgaagattctgcagccaaagagacccctgaagcccataaaaaagcatggaagctactcaagggtgcagagggtatacttgtccctggaggctttggagatagaggtgttcagggaaaaattcttgctgcaaaatatgcacgagaaaataatgttccttatctcggcatttgcttgggtatgcaaattgcagtgattgattttgcctgttctatcatgaaattaccgggtgcaaatagcacagagtttgacccagatacaatgtcaccctgcgtcattttcatgccagagggttccaaaacccatatgggggcaactatgcggcttggatcaaggagaacatatttccatgccactgcatgcaaatctgcaaagctgtatggtaatgctagattcgtagacgaaagacatcgacacagatatgaggtaaatcctgaaatggtaccagagtttgagaaggccggactttcatttgttggcaaggatgagagtggaagacgcatggagattattgaactacccagtcataaatttttcattggagtacagttccatcctgaattcaagtcaagaccagggaagccatctccacttttcttaggattaatagcagcagcatctggacaactagaaactttgctccaaccaagttccaacattgtcaatccaaatcctatgcccagatttcccattcccaaaaagacgatttaccatgccaagaagccactggacagcttggtaaacggatactttgcaaatggcaacgtcatccacacttgattagcagttgtgcaaatcctaagcgaggccttgtttgagatttgtttctacggttttctgcttgaaccctaatcttttcttcttcttcgttttcgtgttttttttttggctttgtatttgtctctgctcaactgagaaggctaagagttgcaagctccagatacacggttcccatgttttaagaggaaacgtcctccggtcatgttgaagcaaagtttagctatagggtggtgtagtgtgctgtttatttcctgctgaggcctcaattaaggctggaaatgtattggtagctttagtatagcctggcatctcaactatttgtacattgggaaaaaaacctacctaagtactgaatatacaaatgcttggccaagattgcttacttcaaaacaaaaaaacctcgtgc

SEQ ID NO: 71183 - DNA, 494 bp, Oryza sativa
  Clone ID: PAT_MRT4530_71681C.1
ggaaaggggacccttcatagggaaaaaaaagagcatcaaacattacaagcctggaaaaaaccgaatttggtttcacgtactcaaacaacacattagcccataaacaacaaggagggtttcttaggaaaaacaaccccaaaaggcggtcttattcgcacatattaacaaaaaagggcaccggggcgacatcgccatagctaaagctggaaaggcgcgacaatcgcgaataaaatttatccaaaaacccaccaggggaaaatcttaggggagcacggggccttcacaggttcgttcttgccgggaaaaaattcactccggcaacaaccttggggggaaaggggagcatttccggccacataatctccgggataatatccaccccaaaattttcatcgagggcaaaatcgaggggcacttgaccaggagggtttgcgcttggatcatacaggggaaacatgtaagggggctccaaagcttaagggacactaatcctt

SEQ ID NO: 71184 - DNA, 143 bp, Oryza sativa
  Clone ID: PAT_MRT4530_71682C.1
acgccacgcgttcggccacgcttacgcgcacgcgtacgcagacgtatctggcttgtttgaacgacgggcgcgtcggcgctgtaccagaccaacagcttattagggaccgccacttgagcggatgagatcgtccgctctcgtca

SEQ ID NO: 71185 - DNA, 988 bp, Oryza sativa
  Clone ID: PAT_MRT4530_71683C.1
ccggccggggcccctggaaattggaattcaactggccacataactcattccatttccacgcacaaacaaacgccaaaaatcgccgagaagaatccgaagaaaacctcacggcggcggcggcgaccggcgaccagaatcggcgaacgggcacgggccgagcagatctaggcgagggagggagcgatggggtcgagcgagatgacggcgacggaggtggcggcgctgctggatctgaagccgcacccggagggcggctactacaccgagacgttccgcgacggctccgtctccgtcaccaccgcgcagctcccgccgcagtacaaggtcgaccgtgctatcagcactgctatctacttcctgcttccatcagggagtgtttctcacctccatcgcattccctgtgctgaaacatggcacttctacaagggagagcctctcacggtctttgagctacacgatgatggacacattgacctcactgtcatcggtccacacctggaggctggccagcgtccccagtataccgtgccaccaaatgtgtggttcggttctttccctaccctggatgttgaatcattcgcatctgatggcagcgttcttgtcaagtctcgaaagagggatcctgagcttcattactccctagttggctgcacttgtgcccctggcttccagtatgaggatttcgaaatggccaattttgatgatgtgaaatccattgctcctaaggcagaaccgttcctcaagtaccttattccttccaccaagtaatcatgttttgagctcaacatactgtattttagcagcctgtctggcaagattgcctgacggtattggacgccatttttagtgtgattgcttcgggtttgtgttcttgtcttgtacacttaagaacacgcatgtccttggtgatagttgtaacactctcctgtacgaaaacagaataaaacactggcaatgttgagatgaaatttgcttgtgctaagccttc

SEQ ID NO: 71186 - DNA, 417 bp, Oryza sativa
  Clone ID: PAT_MRT4530_71684C.1
atggtctcgaagaagttgaggccatcgaacgcctccgatggcggcgccgcccagaccggctgctcgacacggccgccggggatggcggcggagaccttcttcacggcggccccccgcccagcgattccaagaaggaaaaagtacaccgaaggtccctcaacttgtcatcggaatacaaaaacatcctcgaaccgcaaaaccagagatgcgggatcccttaattatacaaaaccggtcacccgaaatcctttggtggttttgcacccggttttatctgacgtggcggctaagtcagcatgggacccacaacctctacttctgatgatcggcccatctacttctgttttcggccatcatggtgggctagtttttctccgggctgatgattggctcgttggcccagatgctttatgggct

SEQ ID NO: 71187 - DNA, 818 bp, Oryza sativa
  Clone ID: PAT_MRT4530_71685C.1
aagggtgccctgaagaaattagcacctaatttgcatctcttaatggaaaggatcttcaattaaacatggatttccgcagcaaactgaaataacatctgagggaagaggtccaaacctgcaagcctgcatactgcctcatctcaagtcttcatcaccttcgtcggtgcctcctactgcttgggctctgccaatccggaagagtagcggcagtcggcacgaaagcgggaggtgggagcccagtggcagtgacggacgggccgaccggcgtgtgctcctcttctccccacctcggccccagctctgtcctctctggcgatgcttggttggaggttcgccacatagcttctcggtcccaacggaggagccgaggatggggagcagctcttcgctctaatctggaggaatcgtcgtggtgatctggagatggttaggcggcgcgacggggatatagtgatgagggatcgcgcggctatgtggccgcggacgatgggcggctgcgacaaatcgtggacggcggagtagtcgccaggggtgggggttggcaaccgccggtggccggacgcgatggcgacgggcttcggcggcagacggcgctgggcggagtggccggccgacttctgcttaaataaactcatgtgaccaatcgcgacttctgatgtcggaatcgttatcgctctcaactggtcgatctcggtatgataaccgtagagacatagagttatcgataacattgcacgaagttcaacggtcatgagtgaatttaaattgaagtttgaaaactgctgcgcgtaacggacccagaaatttccagcggccat

SEQ ID NO: 71188 - DNA, 900 bp, Oryza sativa
  Clone ID: PAT_MRT4530_71686C.1
ttttttttttttttttttttgtgcgtaatccgggagacacgtaactatctccaattttttcttctcttcttatcatgaaaggcataaggattaatggatttaatccaaaaccatgggcagatttcagaatggaatgtacaagcagcacacggatccaaaactccatgttcagcttaatctcacttctcacatcactatacactacagaaaaaaaaatttctatatgtaataattcctatgtactactactatgctactagtatgtgtctcaattggttgagatgtcggcgaattggggtttatcggtggtggtggtggttgtcgccggcgcggtcgccggccatggagacggcggagaggcggctggggcgggggcggagcccggcgacgcgtctccggtgctgcgcctgctgcgcggcgggggaggggcggatggtggcggcgagagccctccgcgcccactggccgctctccacggcgccgatccgcaccagcgcgctgccgcccatccgcctcgcgccgccaagcctgacggcgccgcccgaggccggcgggctggtcggcgacggcggggaggatggcgccgccgccgccttgtggtgaacgctccgcttctgctccttgtggaggctgcaccggaacgaccccgggtggttggtcggcgagcacatgcaggagcggcggctcacggacgagacgctgacggacgcgcgtgctccgccgccggcgagcttgacgcgcgtcggggaggcggagcggtagtgcgcggcggagaggacgtgcccgctcggccgcctcgtggccgtcgccgctgccgccatgggagatcgccggagtcgggtggattggggagcagtggcgacgagaggaggagagggcggtttttgtgcttccgggttg

SEQ ID NO: 71189 - DNA, 772 bp, Oryza sativa
  Clone ID: PAT_MRT4530_71687C.1
ctattcggcctctccccgcgcgcgagccgccgacgggcgggcccacccgccaccctcgctgacgggtggggcccacccgtcatctccttcctccagccgctcccgccgcccgtcccgtgccaagcgccgccgaatccgccgcatcccatcgtccccgttcaaaattaagtggggggaaatattcctcgtgatcccctctcccgcgttcaaatggccggatttgctcccgcaaatctcaccggcgccattgatggcggccggatcccccgcgccggtttccttccccgccggccgccctctctccctcccgaccctttttaaaccctccccgctcctccctcgctcgtttccaccactcgccgacgacctccggccggcccactccgctcgccgggaccgtctcccacctcggcgtcgtctcctccggcttcgccgtgccgtcgccgaccccgtccaccacctcgccgagctcgccgaccgccggagcgccgtcgtccccatccacccgagccgctccaccgcctttctccgctccggccgcctcctttgccgtcgccgtcgacccggggtgagccgtggaccgccgcctctttccccctacccttcccctctcttggccgccgcaccgccgtgcctatggacgctgccggcgaccataggggcgcgggcgccgtctcccgccggccgcgccgatgtggccgcctccgggcgcaccgtgtggccgccgcgtggggcccggccgtcagccgcccgtgccctcgggtgcggctga

SEQ ID NO: 71190 - DNA, 807 bp, Oryza sativa
  Clone ID: PAT_MRT4530_71688C.1
atgtggtggccgggcgagggcctcggggtagcacgcctcgaaagcccgaggggtgtgacgtggcaccccgaggccccctggccacctcagcgctatccgaggggcggggggaggcgaagccgcgtggccacgcgaccatatgggaaggatacttccctctactgtgtgtacctcaggcgcacgagcgcggctcgacggccggcgcgcgggcgggcgtggcgaggcggcggcggttgtgaggcggccgacgcccggatccgccctccaccgcccggatccggcggcggcatccctctcccgcccttccccgctcgagggcaacgacgacgacgacgacgaggcgggagcagcggcggtgacggcgacgaggaggagggagggcttccccgctcgaggacgatgacaacaacgaggagggagggctctcctctccctactttcgcgaggcgacgaccgggcgggcgcagcgaggcggcggtggcgtccctctcccacccttccctgctcgagggcgacaacgacgacgacgaggaggaggagggagggctttcccgctcgaggacgacgacggcgatgaggagggagggctctcctctccttactttcgtgaggcgacgaccggacggacgcggcgaagtggcggcggcgagcgggcgcgacggcgagggccgacagcaaccggcccccacacgcccggatctggcggcggcggctgtcccctgcctggatccggtggcagcgaccgtcccccgcggcggaaaaccacgtgtcttcaatgcgtactcactccgtaaagaaaagacctaa

SEQ ID NO: 71191 - DNA, 475 bp, Oryza sativa
  unsure (1)..(475): unsure at all n locations
  Clone ID: PAT_MRT4530_71689C.1
cacgaggtacatgatgagggtcttagagtctgactttaagaaagtggttggcataagctggtagtggtgggtttttgttgtgatcttcctcttgctgaatgtcaacggttggcacacgtacttttggattgcttttcttcccctaattcttctactagctgttggcactaagctggagcacgtcatagctcagttagcccatgatgtggcggggaagaactctgcaattgagggtgatttggtcgtaaaaccatcagatgaccacttctggcttgggcggccaaggattatcctctacctgatccacttcattctcttccagaacgcgtttgagatcgcgttcttcttctggatactcaccacatacggngttctattccctgcataatggggcaagttggtttcatncgtgccgaggcttgttatcggggtcaccatccagcttctctgcagctacagcaccatgcctctgtat

SEQ ID NO: 71192 - DNA, 134 bp, Oryza sativa
  Clone ID: PAT_MRT4530_7168C.1
agatcctataataacgatacatcattaattcgatgggcccttggatgcgggctgcggctcacattaaatctcgatccaaagaagcaaagatgatgacagacacaaatcaattaacctagaaatctcctcgatcg

SEQ ID NO: 71193 - DNA, 405 bp, Oryza sativa
  Clone ID: PAT_MRT4530_71690C.1
cgactcgttatatattcccggagcttccatttatctcacaggcgtgcgcatgacctgacaacgtatagcataacataggcccactctacttcatgttaggcggacatgtattcgaggcacagcaggatggcgtgccgaatatgaccccaagaactggtaccacagctaggggttacgcaggtgtacagagacatggagctggctagtatgacgaggctgttaattagcaccacacttctcgagggcgtgaccatgttggcaaccaatgtgatgatcagcaccctgctgaggaacggaaggacgaggataccgacaagggcattaaggttcgccttgatgggctactcgaggatattgtggacctgcgtggcgacagagaactcgaacatgggcagctgccacatg

SEQ ID NO: 71194 - DNA, 612 bp, Oryza sativa
  Clone ID: PAT_MRT4530_71691C.1
atggtggcggcctgcgagcggtggctggcagcggttgaggcgaatgcactgcttcgggcctcgctgccggacgctgggcagcaccttaaccaacaaggaggtgtcacctgggccaatagcaacaaccaatgcctgctcctcgtcggcgacattgatagaacaaacaagtcttacatttgcacattgtgctccatgtggctggccgcagaggatagggtggagtccgtcggtgatggagcgtgcgcgcggcggcgggcgaccgggagtggcgtgcgtgcggcggcggacaaccgccccctgtccggatctggcggaggcggctgccccctgtccggatctggcggaggcggctgccccctgccagcatctggcggaggcggcgagtgggcgagctcggacggtgaggaggtggtggatctggctaccgtgacggcgatggagtgggtagctataaaagcaaagatcccatggagcgttacttcccataagaatgaggaggacgtcgatctgtacttgtgtgaggtagtggcagagctcaagctcgagcttggaggaggagacagtgggaatttgtatcgcttctgtaaaactccagcactggcgttatgctag

SEQ ID NO: 71195 - DNA, 422 bp, Oryza sativa
  Clone ID: PAT_MRT4530_71692C.1
aaacaacaagggcaggagggcctaaaaaaccctggggggggggggcccgcccacgggagaggggggataaggggcgggtgggaccgacaacaaatgggcccggggcgggaaagggtcaatcagcccaaaaggggaacccgaaggggaaggggggacccgccaaaagggctttaaaaggagggaaaagaagccccgaagggggcaagaggattttgaaaaaaggcaaagggggggccagtcttgaccggggccccccagaaaccggaaaaaagaacccttaaggggtaagggaaggggtttttgggacgttggaagacaccggaaaaaaaaaaggaaggggttggggcattttcccagaatccacgggcccaacggaagcgggtttaagttttagggcaagagcaaaaaggcaaagatggggg

SEQ ID NO: 71196 - DNA, 3468 bp, Oryza sativa
  Clone ID: PAT_MRT4530_71693C.1
atggccaaaaatatgaagaagatgagggtgcaacttgagaaaatcgcgaaacaaaacaaggatttcaatttaatgccagagagcagctccactgtacaagtactctatgatgatcgggccacatctccaaacgtggaagaatcagtcatcgttggaagggctcaagacaagcagaggatattattttacttatctgataagatcttgacccaagatttcattatccttgcaatatatggcatgggaggtattggcaagacaaccttagtgcagttagttttcagtgatacgaaatttagagagtattctcttgtgtgggtctatgtgtcccaggtgtttgatttaaataaaattgagagctctataatttcacaactacccaaaatggatcttagcatgagtgattcagaggtggcacctaccaataggaatattctaatagttttggatgatctttgggagaataatggtttcaaattagataaattgaagcttaagctaaaggtcaggacgggagccaaggtgatcgtcatagttaccacacgtgatgaagacattgctaggagattttctaatgttgaaccctacaagctagagcccttgacagatggcatatgttggaacataataaaacaaaaaagtgcttttgaagatagaggtgacaaagaacggttggaacagacaggaagggagattgcaaggaaatgtggcagtgtggcattagctgctcaatcccttgggtatttattacattccaaaaggcttgacgaatgggaatcagtgaaagacaatgatatttggaatgaatctaccttagaagatgcatcttcaccacatcatgtgcttgcatccttgaagttaagttatgtcaaaatgcaaccaagcttgaagttatgttttggatattgtgcaatatttcctaaaggtcaaaagatagttaaggatgatttaattcaccaatggatttctctcaactttatcaaaccatcaaagactgctggagattatcacgacaattttatattgttaaccatgcatgatctggtccacgacttggcaagatcagtcatgtttgatgaaatacagaatgatggtttgcaaggagacactagtggaagaaattgccgctatgctttgcgtactgaatttagcaagccattggaaacattaagggcactgcgttttatgggatgcagcatagataatagacttcacaatgattcattttcatctgctaagtacctgcgtctgttggatttaagtgagtgctctatacagagattgccagattctattggtcaattgaagcagttgaggtatcttaatgccacaggagttcaacatgaaacgattcctgatggtatcaccaagctcttgaaactaatgtatcttagtcttcggggatcttctggaatccaggcattgccagaatttatgggagaaatggaggacttgatgtatcttgatttatcagattgttcaagaataataagattgccagtgtcatttggcaagctaacaaaattggttcatctggatttgtcacattgcactagggttagaggtgtatcggaatccttggagagtctcaccaatgttgaatatttaaatttatcaaactgcaaaaatattggagagctgccaggagctttgggtttcaagaaattagaaaaactaccaacgtcatttggaaatctcaatagtttgatgcattttgatttatcacattgtcttcaggttaagggtataccagaagccttgggtggacttaccaacctccaagttctaaatttatcacattgctacaacattttcgaaaatgacgtgtatattagaaggaaggtagaagccattggtaatctcaagaaactccagtatttgaacttatcggacttgcttaataaaaagtgtcatgacaaatcaacatatgtcagtttcttcgagtgtattaataccctttcgaaccttgagcaccttgatttgtctcacaacgaatatcttaggagtttacctgactgttttggtagcctcaaaaggctacatacactagatgtctcaggctgcagctttctggacaagataccaccaagcatccataacattgataacctgaagtttctgcatgcagatactcgcatttatttggggaagtccatgttttgtctattgaacgaaagttcagtctcattgccgcactttgtggtccaagcaaatgccaatggctctggcagcaaccttgttctgcttcaggatgtaaatccacctaagttggagataagcagtcttgaaaatgtgaggtccatcaatgaggtccagataataaaacttttggaaaagcaaagaatagaagagttgaaacttgagtgggccaaagatgctgtgaggtttgtggaggatattgaattgctaggagagattattccaccaacaaatttaatggagtttgagatacatggttataactgcaccaagtttccagcatggctaatgggcattgctccttatctccctaatcttgttcgtcttaccatgatggatatgccctgctgcatcagcctaccaccacttggtcaattacctaatttgaaagagttaactcttgaaaaaatgaagagcgtcacaaaaattgatggggacttctgcggtggccgaaggccctttcctcgactgaagaaatttgtcatgcgtgatatggaaagcctgcaagtgtggaacacaatatactgcagtggtgtggatggtgtgagcgagtttatgttccctatacttcctgagttgagcatatttcggtgcaccaagctgagacttacaccatgcccactaagagccgagaaatggaacatttggggaagtgatggtgtcatatcctcatgggaagaaagtgcggcagatatcatcgcatcctgctcctctcctctagtgactactttgagtatcaactgcaaggtttctcttcatgagtggaggttgcttcaccacctcccggacctcaaaggcttaattatcaatgattgcaatgattggactatctcagcagagatcatcagagccctctcctctctagaatcattgactctggagcgatggtataaccaggcccagctgccaaattggttgggtcagctcgtgtctcttaaggaattgaaaataaacaggttcgagatgaacgaatcacaggaggacatcaaacatctcatgtcgctacagaaactatgtctgcatagatgtacaagcatgacaaagctaccaaaatgggtgggagacctcgtctctctccaaaaattggagatcttgtcctgcccagacctgaagtatttgccagagagcatggggtgcctcacctctctcaagaaacttaatatcagcttttgcgatgacattgagtccttgcctgagggtatagaaaaactctgtaagcttgaatatatatcaatgtcaggctgccctaaattggttccaattagatga

SEQ ID NO: 71197 - DNA, 494 bp, Oryza sativa
  Clone ID: PAT_MRT4530_71694C.1
tcccgggtcgctattacgcctgatcccggggcctttcggtgtgcatccatttttcggctgcacacggtactgtaggagcatggcttgccagcgaagcttttggcggtctcaagggcctcgtcgccggcaagccggctcctgcaggttccgctgtatttcgaagactgtatttccctcatgcccgatctggcataacacttgctccagccttgccgtgcgactatgaaaaatcgaatagtgacggattattggcatggcgaagagcgaagcagcggtaaaagaacccggcagtaaaagcaaactcaagctgatcatcgtcattgtgctgggcgtgctgctggccatcggcctgtcggtgggtgcgacctggtatttcatgcacagtgcccagagcaaaccggcaccggcagtggccgaagcggcccccagcggcaagcagccggcgatctacgagcccatggccccggcctttgtcaccaacttcaaggacgcca

SEQ ID NO: 71198 - DNA, 342 bp, Oryza sativa
  Clone ID: PAT_MRT4530_71695C.1
atgccgcctgccgcctgcggctgcgggtgtcgctgcttacgccttacgggccaagtggacaacctgggcctcggcctttttcccatgggggaccaaatcgagcgaagcgtggagagcgtggtcgagttcgggacagtgacggtggccactccttcccagagactggatggaggaggctgctctccaatgccacgtggccctcccccgaggggggtcgtgcccgaggtgcccatctacccgcatttatggcgtcccgagcggttgcgccacgccgcatttaatgtggcgtgcagtgcactcaaccggtctgtgaccggtcaaatgaccgatgggactggctag

SEQ ID NO: 71199 - DNA, 341 bp, Oryza sativa
  Clone ID: PAT_MRT4530_71696C.1
aaaacagagcaaaggcatttgggaagcaaccctttgatttaaattaagcgcaagaaaattagacccaaaatttgggccagggccgggcccaaccaacccccaggatacaaccaagttttgttttggggttcggcgggcataaaaccctccataatttaaaatttattctgggaggggggttaatctactttttttggggggaaaaaacaactcccctggttttgcgggcccccatggggggggcccgtctaggtggggctgggcatgggacggaccagggcgaccacacgggggggggatccccattggggggcggcccaggacacaaggttaacgaacgg

SEQ ID NO: 71200 - DNA, 546 bp, Oryza sativa
  Clone ID: PAT_MRT4530_71697C.1
tcagacgctcgacttgaatgcgtggataacagaagcatcggtgatttcggggatcgtattcctgtactcattgaaacaccggatatagtccctcaatgattcacctgggttctgagttagagcgtgcaggtcgtcctcgattgcgtgacgcttgtatgtcccttggaaattggtgatgaattgcagccatgaacgagcagatcctttcaacgtggctggtaagtaatttgccaacgcgttgtcatctgcaccagcagtgtacaggatcgtggggtagacctgaagaaattcttcggggtccgtgcttccaccgtacttctcgattgctcctggtcggaactccttgggccgccgcacgtctcgcaatgtaggggtggacgctctacacccgccaccgatctgaggttgtcgctgcgtcccgttcctcggcaacacactgaggttgaactcgtggttgttggatctaagagcatggcacttgatcgtccagcgatgtcgagatagaagcttcttgattgacaccagtgttgacattgttgtcggcat

SEQ ID NO: 71201 - DNA, 404 bp, Oryza sativa
  Clone ID: PAT_MRT4530_71698C.1
agtgcatgcagcagcagtgttgccaaacagctcaggctggtagcacaaacacatctgcactaccagcccttagtattgttcaagcgattgtgcaacagctgacaactgcagcaatttagtggtggtctactttgatgcagactgcaagctgcaagccccaactctgttggaccttcaacttgccatccatatggtggtgatctgaccctaactgactatgagtgctccccggagccttgcccctggttgggtgggtgtctggtgactggaatgtgtaaccaatgataatgagttgcgtgatggttaaataatgaaagtcatacatcatcatgtgtgactgttgaaacttagggtcatataaatctaaataaaatcatcttacctaaaaaaaaaaaaaaaaaaaa

SEQ ID NO: 71202 - DNA, 398 bp, Oryza sativa
  unsure (1)..(398): unsure at all n locations
  Clone ID: PAT_MRT4530_71699C.1
aaaaaaacctttttttttcccatttcccccttgaactttccggaaatcccaccattcccccaaactcccttttgttttttacgacaaataattttttcaaccccgtaccttttaattaattcccggggggttggccaactttttaggggaagaatcagttggcgtaggggcggccctcgtgggtctccgggttggccttgcagtaggcctcgagggggggggggggttccttgggcttggcgcgcgcggggtttgcccccccgcttaatttctccacctgggcccacgccggcgggcatttgccggttggcgggttcttcgggcacgcgcttttttgttttggggaggctttccgccatttttgtccaagatgtccggggggtttnccggcccttttg

SEQ ID NO: 71203 - DNA, 1287 bp, Oryza sativa
  Clone ID: PAT_MRT4530_7169C.1
atgcagcaacagatccaaggagcacctcagcagaagccttgggcatatatgacatccgatgtgatgagggagaaattcaggctatggcctaaggacagtgggaacttgtatctgcatccgtacccagaatattttgagagagtgccattgccaaaccgttacaaggtcctagatttctcaaagttttcaggacaagacaatgtgacaacatatgagctcatcagccgattcttggcccagtgcggagaggcatcggctaccgacgctttgaaagccttcacatggttttcagcgttaccatataattctgtacacacttgggccgatctggagaaacagttccacaagtacttctacagcgggattcacgagatgaaattgtccgatttaacgtcaatcagacagaagcatgacgaatcggttcaagattatatccagagattcagagatatgaggaataggtgctttagcttggctttgacatattctcagctcgctgatctcgctttccaaggcctattggcaccgatcagggaaaagtttgcatcccaggaattcgagagtctgactcacctagctcagcagatcgggagtgagcccgatgctcacgcatatggggcttggcagcctggggatcggtgcctccgtggtgctccacgagaggcattgccctcgggaattacgggcgagcgcggatcccaaggcatgcgtcacgaacataaccccgcaagggataacgcagaggtggaaactaacgcaggctcaggcatggtggccgacgaggtatctgcctgcggtgtcctgaccgggaacgggcccggtgccctggcatctagggctcgacagcccagaggcaagcctctcgatgggaccccacgagaggtgcgactcctaggaaatacgggcgcacacgggtctccggacccgacccccgattttgagcatggccagcccccgcaggccgggtccagcgctgggcgaacgcagcagcgaccagtatactacataagtgaggtcttaagggacgccaaatccagatgggcgtcgtcccggacccccatgcccccgggtatctttttcgaagtcataaaaacttcatctatacagccacctgagcttaccaagccaggtgatgtcccacaagaaagactaacggaagaggtcccgtccccagaagcggtgatcggggctatgaaaaccgttggaacctggatgggtgaaatccgaacttatttgctccgagctcatctaccggaagaagatgtggaagcagagagaatagcatga

SEQ ID NO: 71204 - DNA, 1662 bp, Oryza sativa
  Clone ID: PAT_MRT4530_716C.1
gtgagggaggcccagtctcgtgtgttttcttgttttttttgcacctttattgttgctattatatcttattatatcttacttgtgtacagctgctgtcctgattgtagggaaagaggttatcaagcaacagtaagtactaaacatgaatacccctttaatgacaatggtattccacagggtggatgagtctttttttttccctctactcaacccaccaaatcaaatttccactaggaaatccaatgtgacaaaagttctctgaaataaaagcttcaggcattttctaacaaccatgttgtaatcttgaaattttggctcttttcttctcttgaactaatcccagaattattatgtaactgaaaattttcacttttgtgatttgtatgtcatgtatttcttgcatccattgggctgtcactgtaccattccctcagtcacaagttcttgcaagccgcgccttaacctctcagcagcaagccttgtatccgattctttcaaccctccgaaagaaacccggatatatccgggacctccactggcgctcccggggatcacagccacaccatgcttgtttgcaagccatctgacaacttcaaaatcatctgagcatttctcgggtagttttgcccagaggtaaatggcaccctcaccacccttgacagagtccttgccaagcggagacatcgcttccatgagcaattcacggtttttcactagatctctcaccctttctctgatccattctggaccagcctctaatgcgtagagcgccaggcgctgcccgatgatggaagcacagataggtatgttatcttgcactttgagcagctgtgcatgaagaccgtcagcttcgtttgggtgggcaatgtatcctacacgccagcccatcattccgtaagccttcgagaatgagaagaggttgacaatgtgattaccctctaagcaatagtgctccattccatcatacataaagtactcataggtattgtcaactacaagccatgcaccagcatttctgcacagttctgaaattctttcgagcatcggcttcggaatgaaagctccagaggggtttccaggatttacaacactaacaagtttagggatagggttgttttcttgcagaaccttctccaaccaatcgacatcaggatgaagagtctcaggattgcttgcaccaactaatatgtcagtaactcctgtcatctggaatgacatgtaggaattgaagtaatatggtgcaaacatgacaactgcatccccagcatcacaaagggtgaggaccacatttacaaaggcctgatttgcaccagaggtaaccataattgacgacttggttagcttattctctctgcgcagcttctcgagaagtgcttctcggagttcaggaagaccatcatcagagccatatttactgattgatggttcccatacaatttctttaatcttattcatagctgcctcaggaggctgccaataaacaactccctgcgcaagcgacatcacatccttgttccctcgaagcaattcctgcatcgcattttgctcttcccaagctgaaaccttttgggctttctgctcaaaagcgaggccgaacctgaaccggcggtttttcacaccctgctgcaggagcacttgttggcttgttgcccgcggctgcat

SEQ ID NO: 71205 - DNA, 594 bp, Oryza sativa
  Clone ID: PAT_MRT4530_71700C.1
atgaggagattgagtggggcggaagatgaaccagccatgaacgagcagatcctttcaacgtggctggggtggacgctctacacccgccacctagagcgaagggttgttcgcgcccgtggtgtcatcaaggagaacgatgctcgcatcgtcggtcccgttccgatcctgggaatcgaggattacgtcctcgtctatcatcactgcctcgcccctgatctcaaccattgccaccctgagctcgaccgtcggctccctgatctaactgattgttgtcgccaccgtcacgacgaacgttattgccattgtcatgatggtcgttgcgggcttgctagtctcgatcttcgttcgagcgtcctcctcgatcgttgttctctcctcgtcgcgaaggagaatgacgctgatgttggtgtcaattggtgttctctcttcgtcgtgagggagaacgatgtcgatggcgatcagtgttgttctgatcccgacgttctctccgtcggtcgtccagatgctcacgaagatcgtgattttcgcgaggtggtggagtgggatctcaggttgctcgtggcgattgagcatagggggaacgttcaccagtag

SEQ ID NO: 71206 - DNA, 2693 bp, Oryza sativa
  Clone ID: PAT_MRT4530_71701C.1
atgtcgtattatgtagatcctcattccaactaccccaatacccaactcatccggtctacgagtatcactcgtcgacagtggcgagccaggtagggggccttggtgcccaaggttatgctagtatgacttcaagccatgccgacaacaatgtcaacactggtgtcaatcaagaagcttctatctcgacatcgctggtgtggactcaagtcggatctattgtctttctagtctacaccgttatgccaatctcaactggcccaaaattactatcgggaacgagaacggtgcggttacgacttcgagaaatgacatcttgccgacaattccttccacacaagtggagaacggaatatcgacgaccccaacacctagaaaaaatcctcaagcggccgaattctgtgccccgcatagaaactaagagccgacaaggatatccatcaagaagccgagatcttcgtgtcctatccataaggcatccaagcatactctagaggactacccagtgatactacacgtgaaggctgagttctacgcttgtagagaacatagaattcagcgcacttcaccaaccaatatcacctattgtccaatccataagtctagatctcacaatttcacgagctgaatcttccttaggacgatcaagtgccatgctcttagatccaacaaccacgagttcaacctcagtgtgttgccgaggaacgggacgcagcgacaacctcagatcggttcgtgggatttgtcgatgttgaccccgacgagtcacccgtgttgcatattttggaagaccaagagtcctctccgtcgatttcaccgcgagacgtcaacgtgatcaatacagctgagaccagcacgtccgcggcagctaggacgcctgctcaatagctacaagccctcaactcgatattgagagagccctttcgatcctgccctgaaccctgatgttgattagtaggcagtacgactataagagaccatggccaacctcaatagcgcatttgtagaggcagcaactgagcccccgctgcgagatccaccacgaggaaatagtactggtgaacgttccccctatgctcaatcgccacgagcaacctgagatcccactccaccacctcgcgaaaatcacgatcttcgtgagcatctggacgaccgacggagagaacgtcgggatcagaacaacactgatcgccatcgacatcgttctccctcacgacgaagagagaacaacgatcgaggaggacgctcgaacgaagatcgagactagcaagcccgcaacgaccatcatgacaatggcaataacgttcgtcgtgacggtggcgacaacaatcagttagatcagggagccgacggtcgagctcagggtggcaatggttgagatcaggggcgaggcagtgatgatagacgaggacgtaatcctcgattcccaggatcggaacgggaccgacgatgcgagcatcgttctagaagtcgagctcctgacccaagcaacccctgctcatcatcctcgccatcctcttcatcaggcagacctccttgatgacaccacgggcgcgaacaacccttcgctctaggtggcgggtgtagagcgtccacccctacattgcgagacgtgcggcggcccaaggagttccgaccaggagcaatcgagaagtacggtggaagcacggaccccgaagaatttcttcaggtctaccccacgaacccaggtgaatcattgagggactatatccggtgtttcaatgagtacaggaatacgatccccgaaatcaccgatgcttctgttatccacgcattcaagtcgagcgtctgagatcgttacatcacctaggaactggcgacacgatggattatgtctgctcgcaagctgtttgaaattatcgacagatgcgctcatgcagacgatgcctttagacgaaaagaatgaaagagcaagacaggcgaaaagaagaagccagccaataaagacgcactggaatcaagcaagaggagaagtcataagagtgggaagcgcaaatcttcgggagaggttctcgctactgatcaaacagacccacccaagcgtccaaacccccaaaacgatgactcacgaaaacaatgttgccctatacacaaaatgaacgaccactccttggaggattgtcacgtcttcaagaaggagcttgcgcgacatataggaatcgagaaggggaagcgagtatgcggttgtcgaagcgaataccgaagcagccactcctgacttcgactccacattcccggactatgacctcgacgtcagtcacggcgtcggttgtctgcataactcttctgccgagactgggccacctttagattatcccgaatgtcggatacaattttcttaggaacgccatggagactcacgatcctagcgaagtagagctcggctagtttgttccctccataggtggtcttcacaggaataaatcgagctaccttggttaatcgatccacaactacccatatagaatcatatccaccttgggtttttggaagtccggtgatgaaatccatcccaatttcatcccatttccattctggtacttggagaggttggagaagtccggccggtcgttgtatataccccttttctttcaactcttccaactgtttcttaacttcggccagttcatttgctgccatacggtagggtcgcttgtacagaggagtggttcctg

SEQ ID NO: 71207 - DNA, 728 bp, Oryza sativa
  Clone ID: PAT_MRT4530_71702C.1
ctcttatcaagtctgtactcatgttgcaacaggtatatctactcacagcactaagggctcaacaagaaatgcttagagatacagatactcgacgagtagtagaggaaacacttcctatgggaatgctcgaaaaacctcgttggcgaaaaacacaaagtcaactggataagaacatgctcgccaacaatcaatagtggtatagggatgctgaacctaaatagattcgtaagagctctaggagtaaggtggttattgcaagaaaataaagcacgggaaaaggctcgatcgggtgggcctcttaacaccccatgggacaacttggtcagattatttattgtcgcaaaccacaaccctattaattgggacgggtccataatccacttttgtgactcagcctagatctaaggtagacgatcaaaggacttagcaccactagtctacgcaatctccaagagaaaaaaaagaccctaaagcatgccattgaggagagcacgtggatccaagaccttaacttctcaaacattgatgatgtgacggtggagctcatcgacaagctggtcactatctggagcgtagtgcaagagatacaactcgctgacgaccaagtagatgaaattacgtggaagctcgcaagtcgtggagactcgagagcacacattggaatatacctacaagtacagtttctcgattcagtttgcacaaattacgaaataatcattgggaaaacc

SEQ ID NO: 71208 - DNA, 854 bp, Oryza sativa
  Clone ID: PAT_MRT4530_71703C.1
ggcgaattcgagctcggtaccctagtttttaacgacccacgaaaagcggagcgttacagaggaggcctggggcggcgcgacggcatgcggtcgtggtggcggccggcggcgaggcagcagctggctgcggctaggccggcccggcacgggcacggaggcggcggacagcggcggctcggcgtggaggcgcgcggaggtggcttgtcagcggcgggcgtggatgcggcgaatggccgcggctcgacggggccgacccgggcgcagaggtggcaggcagcgcagcctgcccgccgcggcagccgcccccccctcccctcactcgctcggcctggccacccggcggcagcccatggcgtggtgggtcgtccaggcctcggtggtggctcggcgtggtggctgggcagccgggatgcccgcgccgtggccaggtgtggcaccaagaccgggacttgggggccgccggttcggagcggcagcgccaccggcggccagatggcagtgcaaagggagctggcggcggtgggtcgtcttcctcgttgccggtcggcaccctcggccttcatggagctcctccccttctttgcggggagtttctatgttggattgaggcggtagctcctcagtgggggaagctcaggctaccgaagcaatgccacctagtcccaggttcttcttcggccaaatctagcggagcggcccgtgggtggtggaacggaggagtctgggcgagcttctcaggggtggtgatgggcgatggcggcatcctggatgtcgtgaccaccatggtggcatcgtttttggagcctcgtctctgtggtattgtcgtaggcctagcggcgttcggccacgcttag

SEQ ID NO: 71209 - DNA, 1002 bp, Oryza sativa
  Clone ID: PAT_MRT4530_71704C.1
ggcgttggcctaaccggatttgcagtgcatcaggtaagggaaaaaggatggttagatagagagaaggggagttctgtgattggagaggagaggagacagggatgaggcagagcatgggatggggctatcaacagatgtagattattccttgcacaagagatgatgatgagctgtgaatgagttctgagagatggctggtgttgttgttgctccctcccctgcactgcctcttccctggctcccctgcacacctctctctctctctctctctctctgtgtgttagtatattgtttttatgttttagtaattattttccttccataagtgatacggtatttgtagcatgtaggtaggaaaaaaaaatgaactagagtgatgtgacacttcaagggctgttgcaaattaacacattttaaaatgggccaagcgtactatttctcagcatgtgggtctagctcaaaacatgcatttcattcggcatgccatgctaggtttaagctcagtatagcatttcagtaatttatttgacatactatttctagctcaaaactgcatttcatacggtatgtcatccacgtttctagctaaaaatagcatttcatttggcattgctatgctagtttctagctcaaaatagcattctaatttacatgcattgataattcctagttcaaaatagtaatttaagggatctttttccacttgaacccggagctgttttagtgcaggggaggaggaaactgcgcggtctgatggagattgggcaagattgggacggaaggaagcagaacaaagcgaaaaattcaagatatgctttgcgatttgccaattgcaatagtttgcaatagaatctccgtagtataatttttggcatgtcctgctgtaactgccggaaagaacaaaagaaaagctcaatcttggttttcagaccatgcaatgcaatgatgaaccgtttgttactactcacaaaaaaaaaaaaaaaaaaaaaaaaaaaaaaaaaa

SEQ ID NO: 71210 - DNA, 309 bp, Oryza sativa
  Clone ID: PAT_MRT4530_71705C.1
atggcgcggtggagactggcggcgccaggtgaaggtcacggcgtcgatgcggcagcggggagggcggcgaccggtctcagtgtcgatgcagcggtagggagggcggtggccgggctcgcggacggcgtcttggggctcatgtacgctcaaggaggcggcgccggtgaggagctcacgggcggcagcgacgggctcgcgaacgacggcgaggagctcgaggacggcgccgggatcgggggaggtgttcgatgcggcgacggtgaggagctcgtggacggcggcggcagtggcaactcttgggctcggtga

SEQ ID NO: 71211 - DNA, 477 bp, Oryza sativa
  Clone ID: PAT_MRT4530_71706C.1
atggccgacgtcgcggggcgtgatcgctccggcctcgggccggggaagaggaaggagagggtgcgcccggagtccacgtcacgcgtcctcgctcgtgttggctcctcctacacgcgcgacgacgaacggcgacggcgaacagggcagggcgcggcaatggcgatgggcgaaaacggggaagattggtttggggaggggctcgggtttatagggcggcaatgtcggagagagaagacaatttgtgtggtccggaaagttgcagaggagaaagagggagaactacaggccgctgacgagctggaggtcgtcaccacgggtccacgcctcatcatggcccgcatcgccagggagggaggagagggagcccagtggcggtggcctaggaggaggctggctcgatccgcgctgacagcggcggttccggacagatcgacgccacctctgggaagatgccgatgccagcggcagctcagctaa

SEQ ID NO: 71212 - DNA, 462 bp, Oryza sativa
  Clone ID: PAT_MRT4530_71707C.1
atggtgggttgtgagcacatagttttgaaggtcatgctcatgacaattaaggaccggttcgcgagttactcttgtgagacattaaccgtgccaaccacaagccagcgtgggcaacggatttaccttttgtatagcatggttcattgcggggcaccggactgtgaagcggcgagaagtccgtgggggtcgctgcggagtccatgcctctggatattgaggggtgattatgatccaggaacggtgcgctatggtggattgcgttgtataaggggtactgtcacaatcccgtttcgaggtaccgtggtggtactgagggcatggtgggccgctgatggtggtgacagctcagtatgggtattcctccgcacatgtatggtcatgacgggctgttgtaaggaactcggcagccaggggtggcttctcgaagtaccaggagggcatcagataaagggtattagctag

SEQ ID NO: 71213 - DNA, 807 bp, Oryza sativa
  Clone ID: PAT_MRT4530_71708C.1
atgagtacacactgctccccctatgatctatatctcatcttaataggaatatttaagccaacgacgacgggccaaagtttaggtgacgaagataatgaagttttagcacgttcattgctcaagaagaaatggttatgcatctggactgccagcccaaaagcccaatacaacaaaaaggcccaagcccaagacactgcaaaccctagtcctcactcttcactcaattccccactctcctcagccgccgccgccactctgcctctcccccagccgccgccactccgcctctctcccagtcgccgccgccgctccgcctctcccctagccgccgccgccgctccacctctcccccagccgccgccgctgccgccgccgggagatcgaatgcccgccgccggcggtctctgcctctcccccgccagcgcccgccgtctccggtctcctcctctcccccaccagcgccagccgccgatgagagatcgagcgcccgccgccgccggtctccgcctatcccccaacgcccaccgccgccgggagatcaagcgcccgctgccgccgatctccacctctcccccagcgatccagcgcccctgccgctggcgcccgcccctagcgcccgacgccaccggcgagctcgagctcgtctcctccaagtgccggcggagctgcgtcgagttcatcccctccaccgttgagctcctccctatggtcggcggcgagctcgagctcttttcctccaccgtcaagctcctcccctcctccccgtgctcgccggctatgtctcttgcccctagctcgcgagcttaa

SEQ ID NO: 71214 - DNA, 629 bp, Oryza sativa
  unsure (1)..(629): unsure at all n locations
  Clone ID: PAT_MRT4530_71709C.1
cccacgcgtccgcggacggtgngtntncganttcccaaccccgaaaatccccacgccccgaaaatttttggcgancaaacccaccaatccttagacccacctccggccggcgacgccgccgccggcgccnggcgaggatgcacatcaaggagatatgcctggaggggttcaagtcgtacgccgggcggacggtggtgtcggggttcgacccgctgttcaacgccatcaccgggctcaacggctccggcaagtccaacatcctcgactccatctgcttcgtgctcggcatcaccgacctccgccaggtgcgcgccgcctcgctccaggagctcgtctacaagcagggccaggccggcgtcaccaaggccaccgtctccatcgtcttcgacaactccgaccgctcccgctcgccgctcggctatgaggattcacccgagattaccgtcacgccccagtttgttgtgggtgggcgaaacaagtatcttatcaatggccatcttgcacaaccttcccgagtgcagactcttttccattctgtgcagctaaatgtgaacaatccccattttctaattatgcaaggacgcataacaaaagtgctgaacatgaagcctccagaaattctctccatg

SEQ ID NO: 71215 - DNA, 186 bp, Oryza sativa
  Clone ID: PAT_MRT4530_7170C.1
atggccgcgtcggcggcccaggagggtggcccgccgcgggatttctccgagggcgctgtcagggcgcgcgtcgtcgagctcgtcaagaagttcgacaggatcgacgccgacaagctcgccattggtgacacgttttactgccatgagccaaatagccaatgcttgtggttkgtattcctgcagtaa

SEQ ID NO: 71216 - DNA, 444 bp, Oryza sativa
  Clone ID: PAT_MRT4530_71710C.1
atggacttctccggcggtagcaccaacggcggcggagtcgcgtccaggaggatgcaggccgagcagtggctggatattgcggggaaactcctcgcggcgtgggaccttgtcggctgcaagcggttcatagagcagacggtggagacgagctcctcgccgtcaccaatgtcctcttctcctcccagtcgctcctccactcgagccacgctgacccactcgccatcctcagcttcccccgacaccaaccacgccgaccacgtcgcagtatcctgcgcctaccgccgcctcgcgctcctctcctcaagcagggcagcaacccacccgggcaccaacgtcgccctcagtctcatccacgacgcgtacgccatcctctctgatcccaaccaccgtccgcggccctcctctgctgccctcgtcccccaccctcatgttacctcgtcctag

SEQ ID NO: 71217 - DNA, 1450 bp, Oryza sativa
  Clone ID: PAT_MRT4530_71711C.1
ggtgcttgagtctcctaccgctcgaatactggcaagcagtaatccgtgtaccttctccagctcgccccttagttgagttgatgccaaagctttcctgtaacatgaatgacagggctttgtgaggcaaagaaacaacatttcgcaaaagaatattgttaaagacccaatcattcctcatactccaaatagcccaagctcctacaacaaaacaacaccacaacactctaatatctgatctcctctgattctgaaaaagattcagaagatcgtttttagaagtagggaccgtattccacctaaaagcatctctataacagcattagagaaaacaagccggtgggcacctgaacatgaggtgatttgtatccttttccaagccacacagcttgcagagagggctacctggccagttcatttttttgagctatttagctacttggattctccctttcaacatcacccacataaacactcttgtttttaggggggggggggggttggggatttccaaagttcctgaagcataatgtctttaacacccccaaaaacaatttccttgtatagggattttgttgtaaatttcccagattggttcagtttccacaccataatatttctctctgttgttagctggactgtaccaagtaagtcctgcaaccttagccagtcaggtagttcatcttgacctaaagatctcctaagattcaatttcccactccccttcagacaacatttgttttacagtcttgtcagggccactgtagatactgtgaatgtaagggaattggattttcaaaggagactcccctaaccaaatatcatcagaactggatagactccccacaaccaattttatatgcactgccaaatttcgtccaccttttcacttcatgaagtcctttccaaaattgtgagcacccttcggcagaagattggaaaaaccctcccccatttgagaagtatttttcctaagcaattcacaacaagggctggtattgccagattctaatttataaatccatttgcaaagaagagcttcattcattactctagtattaataaagccaagacctccatcttctttgggtctgcaaagggcatcccatctaatcatgtggtattttttctttccatccaaaccttcccaaaagaacctagctctgatagcatccatcttatgatgaacctgtgctggtagtaagtagaatcccatcatatacatagggatgctggagagaagaaattgattagaatggatttgcccccataaggtagaaagctacacttccatgtagctaatcttttttctatttttgagactgggattgacaaatcttttgctatcaacttcagatcactgacaggcatccccaaataagtgataggtagctctcctctcttacaattaaacagatcagccactctttgtgcctcttcttccccaacacct

SEQ ID NO: 71218 - DNA, 232 bp, Oryza sativa
  Clone ID: PAT_MRT4530_71712C.1
cacaggtcaggcggggtagcaccaccatcgtcagcttaccaggccctgtagtagttgttcaagccgatgtgtgccacagctacaacgtgcacctatttagtgggtgtctactttgatcagtactcagctcaagccccaactctggtgaccattcaacggccatgccatatgtggtatctaccctaactactatgagtggctcccacggagcacttgccactgttggtgtgtc

SEQ ID NO: 71219 - DNA, 1210 bp, Oryza sativa
  unsure (1)..(1210): unsure at all n locations
  Clone ID: PAT_MRT4530_71713C.1
tgcaggagcacgaggaacacgggagacccaccgctaagctccctccctcctctctccggcgcttccgcctcgccggagatgggcggcgccacctcgccggcggcgccctgtctctccgtctgcttgctgcccctcctcttcctcttcctccacggatgctggagctgcgtagctatcgagagggagaggacgctggcgatgatcaaaccggacggtctatctggtaattacacggagagaatcaaggaggtcatcttggagtctggatttgatatcgtcaaagaggcagtggttcagctggatgcggagagggcatcactcttctatgcggagcattctgggagaagcttctttgacagtctggtgaagtatatgacaaggtacctttgtcgaaagacttgtgtattttgttccttgcttaagtcctcacagtcacaggctatagtgaatcgtttcgacagtgaggctaaaatttctaatcctaatagcattagagcaatgtgtggagtggactcagagaaaaactgtgtgcatggttcagattcaccacaatctgcagccagagaaatttcatttttctttggagatgttagatctgatactgtggaacatgatgagctgtagtcctgtagaggatagacaggtgtatatgcgacatgtcgtaaggcagataattttgcagtttatttgttccatacagtgcctaacacctggttggacgatgggatttggatccaatggaaatatctgaacatcagatgagatggagttcaaggaaattaactttagattgtgtatggtaaagaccaggacggtgcatgccagaaacaccactgaagcactcatccaaatgtaatcgtttttgtactggtgcaaacttgtgcatccaatcttctgtaagcctcgtatatttagcctagcctgtgctgttcatttcaaagaaatcgttagccatcacgaactaaaaaaaaaaaagaacgaaagcaaagaaagagaacaaaaaaaaagcagctcgagggggggccaataaaattctgaacagtaatttcagaatccagagagcccctatgaggctatgacctatctgaagttctgaaccggggagatttcacgtgagttttgtttcttgtaaatcatggacaaaactaacagcagaattgagtttcttctctctgctttgcaattaaaaaaaaaanaannanaaaaaaaa

SEQ ID NO: 71220 - DNA, 507 bp, Oryza sativa
  Clone ID: PAT_MRT4530_71714C.1
ctgcaggaattcggcacgagcgcatcatcgaagtcgcctcctatagacggatcaccgatgccgcctcccttcctccccggtgcaatgtgcaactgccttccccggcgccggcgctgcctcccttctttccccggtgccagctcctcctcccttcctccaccaccgccgaggatctcaggtacgtgcttcacggtgtggacgcagccttctacaagcttagatccgcgacaccaggttcgccccttctctccccgctgctgttcgtgtggcaagattcgccgccactgttgctccgtccggctagcatctcctccccaaatcctgcaaggaccaagtatacataatatgtgatttagccttgtaatgcatattgagtattagctggaagggaacctgccaagaatttatgtcaaatactttgtaatgcaatttagctttgtaatacataaggggaatattattccagccaagaacttatgtcaaatgcttacctttggaatcatgggt

SEQ ID NO: 71221 - DNA, 300 bp, Oryza sativa
  Clone ID: PAT_MRT4530_71715C.1
cccacgcgtccggtcatcctgctgcttccgccgcgtccatcctccctgcttaggttagcccttcgcacatactccgccggcgacgacgacgatcctcatcaatcccgcgagcgagcggcgccccgacggtcgtcctactgccgcttccgtcgcatccatcctggaggatcgatggcggcgaagttatcgttttcttaggacagctcgccaatttccataatatctgctgctaaggttgccggtgccttcctgtccatagatcctagacttagctgccggctcagcacaccgtgctatgct

SEQ ID NO: 71222 - DNA, 456 bp, Oryza sativa
  Clone ID: PAT_MRT4530_71716C.1
gataagtttacaaggattaaatacaagttggttttagctgattgctacaaaggtttcactgacatcagaacaccagccggtccgattgatcaaaaccccatcgacatcgactgcgctaagcagatctcccaggctgttgctgttttcaacttagttcgtgctaacatagatctggcactatcggccgagcctgaatttttcgtcaatagaatcttaccaaattttggtgttaacacggtgctggcacgacctagtagctcgtgggcctatgccgagttagggcggtcggatccagaaagcgtcaatagtgctctaggtaggacatgcggcaaagcgagaagttgtctttccaacgagcaccgagagggccacacaaggtcccgacgacctggtccacttgtcaacaagcgaccatatttcatatacctaatccctgtgcgctgccaggacctagcc

SEQ ID NO: 71223 - DNA, 614 bp, Oryza sativa
  Clone ID: PAT_MRT4530_71717C.1
atcttgaagaaccagaatctatttatgctttccccactgtgattcactgcggcgagctctatgaactccagttgctctggggacctgtttgtgacgccatcctaagcaaatttcactgagatgacgaaaccactattaccctaccgtaacctaccgactacaagtctacgccatatcttgtcagaagacacaccaggacgtttaagcacattgtgcagttatccacttccattcctctgcgccatggggagagagaagtggccatgtcttgtgcatgatgcgcaaatggagggtaaggcttgtcgaccaaacagttctggcaggatacaaacctgtattggaccacattgatctgtttgaagccaatgacctactggatgctctcctagctgtgggacgtgagcttctcgctccggaccaatgcgctatcagagctctaattggccaaccctaaaaatgccaaccatcggctattgctatccaagcatagaccattacggcaccgaagcagacgaatacaccataggactccgtacgccggaacttctggaactttaacaactccttacattgggacaaaatatccatcctacaactgctcgatgtgatgcggc

SEQ ID NO: 71224 - DNA, 394 bp, Oryza sativa
  Clone ID: PAT_MRT4530_71718C.1
atgtcaccagataccgacatcagagattagcctagacaaacccaatccggtgcctacggaggccgacaagagggattagcgctatctctgatctcgacgagttcatatttgaggaggaagacaactctgccgtcgactacgtgttgatgaataagagcaacaccggcttcggccaacatgatgtagggctattacctgtcagataaggggcccaaacatgtataaaatccttgtctccatctcttttacctcaatctcacatataccctggtaccgacgatctccatactatccaaataccgtagtcgcgatctcaaacatcgacagtgtaagggtatacctgagaggctatacccgcctacagtatttgtatagtatgagaatcgttggtgca

SEQ ID NO: 71225 - DNA, 591 bp, Oryza sativa
  Clone ID: PAT_MRT4530_71719C.1
atggccgatcaccaaactctctccgctgtcttcttcctcctgctcgtcccgcacgccgcgtgcatggccatggccaagccgtcctcctccacgctgctgcaggacaagtgcgagctctacgccgccggcgaccggcccagctacgactactgcatcaggacgctgcgggcggacagggcgagcgccaccgatgacgagcgcgggctcgccgccatcgcggccaggatcgcccgcgcgaccgccgtggccacgggcgccaagatcgccaggctgcagcgcggcgagacggcgcccgcgcggcgggacggcctggccgcctgcgccgcggagtacgccgccgccgtgcgccggctcgggcgcgccgcgagggacgtcgtgtcgcgctcgcgcggcggggccggggcgagggagatgcgcgaggcgcagacgctgctggcggaggtgactggcgcgccggagcgctgcgacgtcgcgttcgaggccgccggcggacaggggtcgccgctggacgccgtggaccgagatcgagctcgacgtcgtggtcgggttggcctccgacatcctgccgccgacgaggccgacgtgatgtga

SEQ ID NO: 71226 - DNA, 3028 bp, Oryza sativa
  Clone ID: PAT_MRT4530_7171C.1
gcattcaaaccctccctgcgggaggtacattggcctacatagttccacctaggaccggttgagaaatacggtagcaacactaatcccgaggaattcctccacatctacttgagtgttctttgtgcagctggcgcaaataataacacattggcaaaattacttgccaactgctttaaaaggatctgcccgcacatggcggatacaccttcccagatcttcaattggatcatgggcaaatctctggcggcaattagtagcaaactttcagggcacgtacaagagacacgcggttaaggatgatttgcatgatgtgagacaaaaacggtgaacttctcaaggactttgcacaacgattcaacgaatgtcgtaacactattcctaagatcactgactcctctgtcatcagattcaaataaggagtctaagattactacaccatccaagagttgatgatgagaaagacaacttcagcaatgaagctattcgaaatcgttgatgggtgtgcccatgccgataaggttgtttgacaaaatgatggaaaggggaaggtacttgatgagaagccacctactaagaaagaggagcccgaaacaagtaagaagccatagcaaccccataagaggaacaagaagcgtaagacggaaggggaggtactcggtacaaaaacagaaccacaacagcctcgacattttgaagcccagggtgaagcctctggaagacagtggtgtccgatacacaagaccggttcacatagcttggtagcatgctctattttccaaaaggagatggccaaatagatggcactcctacaggaccaacgagtacatttggtcgagaaagagtatagacgcccacaatccgatgataatggcaacttcccagaccctgatcaccacgtagctcacatctttggcaagtccacctcttactcttccaacgcccttgacgtgatgggaatccctagaagcgagctcaaaccctccaatcacccttccatgggatcatcccataaccatcctcaaaacagctggggaagatcactttgctggtgaattttgcactaccatcaacttcgggaccaagaagattacgtttaatgtaactgagtttagtactgcatacaacgctattctcaggaggacaacgctggtcaaattcatgtgagcatcccactatgcgtatcagcttgtcaagatgctaggactaaaggacgtcatcacaatctctaggaacaccaacatggttgtgcaatttgataagcggagtctcaatatggtcaagcaaattaccaccacactcgctgccgatgagcctccctaaaatgaactcacactcatcaatttcctccagacaacatcgacgtgtttgcatggcagccgtccgacaagcccggggtccctaggaagtgattgtgcacaaactgatggtccgtccaaagccaaccctgtatcgagcggcgctaaggagtgttcggcccaacccgaggttcgacgttggagcggaagagcagttcgcttcagaagacgctgttgttgacagaaaacacgaggcttgggagatctgcttaactccagtgcaggtccaaagctcgccttcggatgtatgagcgtgccagttgatttgatcctgcaatcaacaagaaacaaagacaaagaagccgtggttaaatctataaatgatagccgatcggctaattgccgatgacatatcatttatctctgagctgatgtcatatgtgaatcgatcggcgatcataaatagtctgcaacaatcctcatcttcgattctgtttcgataccatcttcatctccgatgctaatattaccaaatttggttgttaatagctatgcaaggacagtactgggatcaaggcaagtgcactctttgaacatattgaacccatttgtgaaatgttttgttttgaatacaagcatttcaaattcagactaggatcatgtcaactcttatttactgtctcatatctcgcaacaactcagactcagattagcaaagtgcagcttacttcctccagcaaaaaaattaatcgggtgcatgactgcccttggttggttcatggccaagattggagaaaaaggtttgcccttgaagaagcacggtaagtttgagtggacaaaggaagccgaggacgcattcctcgacctcaaaacatatctctgaaacccttccttccttgccgccccaaactgcacgaagaactcttcctgtacattgcagccactccatactcgatcagcattgtcctatttatcgagcacgacaaaataaaatgactgatctattacgttagtcaagtccttcacgacgcaaagacaagatacccccagattcagaagttgttctacgttgtggtcgtgacatcatgaaaacagcgccagtgcttccaagcctacaaaaccatgatcatctcctcctatcctcttgagaaagtcttctgaagtaatgatgtggccagatctatagccaagtgcgtcgtcgagctcaaccaattcgatgtcattgtcgcccctaagaccaccaacaggtcccaactccttgaggattccgtcgccgacaagaccatcctggtgaatagcatggtcgacaacatggctaaagaaatatggatagtggcattcgacgaagtgttcaacagccaaggagtaggattaggagtcatcctcacttcaccaacaggcgataaactcaaatatgttatacaacttgaatttcgcgcaacaaaaaacacaaccgagtacgaaggtttactcgccagatcatgagcagccacgacacttggaataaaatgattggtaatcaaaggggacacagacggcagaactagtcactgaccaagtacacgagaattacaagtgctcttatcccgaattgaccaaatacttagtcgaggtgtgcaaactagaacgtaggttcgacgggtttgaagtacgccacatataccgtaggggcaactcagagccgacaactattgatatttcttacaatcacacggatgccaggcgatactggt

SEQ ID NO: 71227 - DNA, 2364 bp, Oryza sativa
  Clone ID: PAT_MRT4530_71720C.1
atgcctcctccgcgccgccgcccgccctccgccgccgacgccgccgccctccgccgcccctacctccgcctcgtcgcgctctcctccacgctccgccacctcgaccagatcctcgccgtctccctcgcctccggccactacccgctcgaccccgccccggccacctccctcctcctccgctacgcctcgctccgcgcccccaccggccacctcctccgcctcttccgcggcttcccccgccccgaccggttcctccgcaacgcgctcctccgctccctcccgtcgctccgcccccgcctcctcttcccctgccccgactccttctccttcgcgttcgccgccacctcgctcgccgccttgtgctcccgtggaggcggcgccgcgtcgtcttccgcggcgcgcgcgctgcacgcgctcgctgtggctgcgggctacgcggcggacacgttcgtggcgtccgcattggccaagctgtacttcgtgctgtccagggtcgaccatgcacgcaaggtgttcgacacggtgccttcgccggataccgtcctgtggaacacgctgctggctgggctttccggttcggaggccgtggagtcattcgcgcggatggtgtgtgatgggtcggtgcggcctgacgcgaccacgctggcttccgtcctgccagccgcggcggaggtggcagatgtaacaatgggaaggtgcgtgcattcgttcgcagagaaatgcgggttggcagagcatgagcatgttcttaccgggctcatctcgctgtactccaagtgcggggatgtggaatcagcacggtgtctctttgacatgatggagaagccagatttagttgcctacaatgctttaatctctggttattctgtgaatggcatggttggttcatcagttaatctctttactgagttgatgaccctggggttgtggccaaactcgagcacactggtggcactgattccagtgcacagtccatttgggcatgatctgcttgctcaatgtttacatggatttgtcctcaagtctgggtttactgccaattctccagtgtcaacagcaattacaactttgcactgtaggttaaatgatatggagtctgcaagaaaggcctttgatacgatgccagagaagaccatggaatcatggaatgcaatgatatcagggtatgctcagaatggcttgacagagatggcagtggcactctttgagcaaatggtgaagcttaatgtgcgaccgaatccaatcacaatctcaagcactctttccgcatgtgcacagcttggagctttgtccctggggaagtggctgcacaggattatcactgaggaggacttggagcccaatgtctatgtcatgacagcgctcatcgacatgtatgcaaaatgtggaagcatttctgaagctcggagaatcttcaacactatggataacaagaatgtggtctcgtggaatgcaatgatagctggatatggccttcatggccaaggtgctgaagctttgaagctctacaaggacatgctggatgcacatcttcttccaacaagtgctaccttcctgtcagtactctatgcatgcagccatggagggttggttgaggaagggtggaaagttttccggtcaatgaccgatgattatgcgatcaatccaggtattgagcactgcacatgcatggtggacctccttggcagagctggccagctcaaggaggcttttgagctcatctctgaattccccaagagcgctgtcggacctggcgtatggggggcattgcttggcgcttgcatggttcataaggatagtgatcttgcaaaattggcctcccagaagttattcgaacttgatccagaaaacagcggctactatgttctgctctctaatctgcacacatccaagaagcaatactctgaagcagctgtggtaaggcaggaggcaaagagcaggaagctggtaaaaacaccagggtatactctaatcgagataggcaataagccacatgttttcatggccggtgaccgtgcccacccacagtctgaggccatctattcgtatttggagaagctaactgcaaagatgattgaggctggataccgaccagagacagaggcagcattgtatgatgtcgaggaggaagagaaggagcacatggtgaaagtgcatagcgaaaagttggcaattgcctttggattactcagtactgaaccggggacggaaatcaggatcataaagaatcttagggtgtgcctagactgccacaacgccaccaagttcatatccaaggtgacacagaggctgattgtggttagggatgcttcacggtttcatcatttcagagatggggtttgctcctgtggagattactggtga

SEQ ID NO: 71228 - DNA, 390 bp, Oryza sativa
  Clone ID: PAT_MRT4530_71721C.1
tcagtacccaaggggggtgggcgaagcatgcaggggcagcaggcgagagcggcggtggtagacgagagtggtggcggcgaacgagagcggcggcagcagctgctggcgccccgtcgccacccaactccggtgacgcctgccccctgctccgcttcgtgaggagatccacattgacctgctccgcttcccggggcggcgcgaacacacggtgacatcgacgagaaggcgctggggcagcagggggatgacaccgatgagcaccctgatcccggtgctgccttgtcgccccgccacccctgcctgcttcgcctgccacacgctcgctcgtcgtgctcgcccgctgcccctgcttgcttcgcccgtcgtgcgcttgcccgccgccgccgccat

SEQ ID NO: 71229 - DNA, 725 bp, Oryza sativa
  Clone ID: PAT_MRT4530_71722C.1
cccgcaactataaagagtccaagaaaatataatttctgcatgttacgaatttggatgttctcttaggtcaattatattgatttttcatttggcttatgtatacaatatttcacctgaaaggtgatgacttgctatctaaaataagaggatgttggtgagtaaaataagaggatgttggtgaacctgcctttgctcatggtcatgaacgtttttataaacgatattcctagtgctcttccctgtggggtatacttgtttctttggcttcgccaaaattcttaatggttgccttcccacacctcttgacaatgtgacagacaactgaccatgtgaaaaaacgggatctagaagatagatcgcaacatttggaatggtttatccttatgatttattaatgaccgttgtgaaactgaaacgtattggaaactgcttcatcttgaagttgaaaggaagagatatatcgtctgagggagacaaagggataagtgggatgaacagttttttggtagcatgctgtccaccaacaatctcagcatcaattgcattatcttaaaatgctcttacatcagtctagttttgttgcacaacccgctattaggatcaaggttctggtatattgcggttacagagttcatccgcaagcgcacggatataccattgtagcatttcacccgagagtattccaagggtatcatatttgtttaatcccgtgggaagattataat

SEQ ID NO: 71230 - DNA, 105 bp, Oryza sativa
  Clone ID: PAT_MRT4530_71723C.1
atggcacttcttggcaaggataatagtaaggctgtggtgttcttggcagctcttatggtgatggctattgctttctcatcctctcatgcagcccaaggtatataa

SEQ ID NO: 71231 - DNA, 396 bp, Oryza sativa
  Clone ID: PAT_MRT4530_71724C.1
cccaaaaacaaacccaacatttttttaaaaaaaacccccattgggggagggcacggattttaaaataaccaacccagggggagggaaaaggaacaccggggggaccaaaggggggagaaacccaaaaccggggggggggggcccaaaagggaaaaaacccggccctgggaaaagtttttaagcccgggggggggggcggctgcctcggggggaaccccggccaggcccaaactaggcccttaaaggggggcctaaacttgggggcaaagcccccccgggattaagggggacccccctgggggctttttagccccccaagagaaaaggtgggggaacccccaaaaatcttgggacaaaggcccaaaaaaccctttcctctcggggggggggcccccc

SEQ ID NO: 71232 - DNA, 238 bp, Oryza sativa
  unsure (1)..(238): unsure at all n locations
  Clone ID: PAT_MRT4530_71725C.1
gaagttcgattgagtattatagacctttttactaggcaaaccacagcaatacagtattgattaatttcactgagaatagcactggtacatcacatcaacaaattcatacgttgatacacccatagtctcccaanccaccagctncttaattaatcgataacacgcgggtttaattcancaataatcatcacacacacaaaccacactcatataggtggtttttattgtggactaatta

SEQ ID NO: 71233 - DNA, 355 bp, Oryza sativa
  Clone ID: PAT_MRT4530_71726C.1
tgttgttttcggaaagaagagaaggaaataaagggggtagagagagaggaggaaaaaacttttccccaatcccatcatgcctttacccacccatactcgtcttctcctacttcgatccgagctccagatctgctgagccggttgccaacctttccagcggttggggctgtggcggacatccacgacgcctctcccggagcagggggcctcgcccctgcgcctgcctcattagcgttaacgccctcgatactgccgctacgtctagttcccacctgcttatgcctttgttctctccatcccacacctgcctttattctcctaacgtcatccaatcttctcttcttcccgtctaatt

SEQ ID NO: 71234 - DNA, 246 bp, Oryza sativa
  Clone ID: PAT_MRT4530_71727C.1
tttttttttttttttcatcgaaaagcttaagcttttttttttctcttctctcacgaacagtcaagtcaaataaacacataggcgattaccacggcatggtcatcatatcatcatatatcactccatccacaacaccacgtgtacaccaattcttcgtggcaatctccgtgcacgcaaccagccaaaatttccagttactgttttgcatgggattctcggcatctcatcacacccacacacaatcat

SEQ ID NO: 71235 - DNA, 771 bp, Oryza sativa
  Clone ID: PAT_MRT4530_71728C.1
ctattgccagttatcaaccggcacctttatgtcctcttctcccaccagcacaaagaacaccactgccagccatccacctcccttcacgcagccaccgcacgtcgctgctgcatcccctccacccagccgcacaccgggccgccggatctggtggaggggaggccagatccggccaaagacccaccggatccgccgcctcaccacgcgccgcccgtggggacaccgcccttcaggaggggggtagagggggaagggaaggagcccgccgccgctgctcactggctgcgagatcccgccgccgccacccatgaagcaatggcagcaactaaccccattgcaagcgaagtcgtcggcaatgtcgccgcggacaccgtccgagctactccgccgacaacggccaccgtgcgagctcctctgacagcaagcatctactggcgcataccactgcgggggcaagctcctaaagcggaaacacgcattcgacatcgccatgcagaagaagcatgcaaggatgaccacaaccaaccaccatcttccaagccaatcccgagctccaaggtgtacacctaccaacaagatcatcttcccaccatcactggccgacgcttcttctcgccatgctctgactcgccggccttcgctcacccagtcatgcagatgcagtacgagtgtactaccaccaaccgtgtggcgtggccatggaaggaatccattgcatatcggctccaggcgcgccgtgcaagaacatacttcctccgttttaggttctaa

SEQ ID NO: 71236 - DNA, 319 bp, Oryza sativa
  unsure (1)..(319): unsure at all n locations
  Clone ID: PAT_MRT4530_71729C.1
cggacgcgtgggcggacgcgtgggcgaagctgctgtgtgtgctttaatggggttcaacacagactggatacagatttcttcttcttgcagtgcaggaaggaagtagtagcagttttgtctgcaatcccacactaatcttcctctttagattcagcttcagttacagcctagtcatgtctcatcagatgagagtagtgaaatacaaatgccaatctcagtttctcacatcctattgcttgctgtatcaaacaatggatagtttttggagcctcatttggaggggagatgtatcaattcgatgctagtatgtggtctttnt

SEQ ID NO: 71237 - DNA, 163 bp, Oryza sativa
  Clone ID: PAT_MRT4530_7172C.1
cggacgcgtgggcggacgcgtgggcggacgcgtgggcggacgcgtgggcccggttctgtgtcgaccatcctgggggaccccaccacccattcgcagaatcgcagtgcagactgcagactgcagaggccgtccgtcggcgtctacacgtgcacactccacacaa

SEQ ID NO: 71238 - DNA, 267 bp, Oryza sativa
  Clone ID: PAT_MRT4530_71730C.1
tttttgaatttgaataaaaacaatggctggtagggagagttgagttaaaatgtacttggactcccatactaaccagtatatacagatgtgggacacactgatgcagaaaaatttagtgtactacaagcttatggcctttgcttagtgctgtaccacatttacatccagttaattagctggataactaatgtgtggcaaaaccaaaatgactgtattatgcgtacacttttatagtgggcgtatggagaagagtagagggcatgtgct

SEQ ID NO: 71239 - DNA, 711 bp, Oryza sativa
  Clone ID: PAT_MRT4530_71731C.1
atgaagtccccagctagctcacatcgggaacagcaatggctgagctcggtctacggctcacctgcggcgatcggtggatcgaatcggttcgagaacaaaagagaaaatgtagagaacgttcttgcgcatccaggcttggatagtgcaaaagggttagtgcatgtgctctcatatggtaccagggtgctcaccaagcagagaaacggaggcagcgaggtccagggagcggtggagacggtggttgttggccaacggcagcaaaactccggcgtcgacgtcgccggatcgactcaaggcgcgaactgcaacttcgagagtacaggggtgttacggatgagccacagagggtgcatgcgcgaggaatccggcggaaactcaccggagcttggtgttgcttcggtggtcatgttccataggagggaagagagagggactcactggggatgcacagcgacgatgactaagtcgccggagccggggaagatgaccgagctctgggcattctgggcgtggggtgtgttttcttggacttggaacgcgatgtggggagtgtgctgttgcttctggtgctttgtcttgggaaataagagcagcaagaagcctgggctagagatcctcttggtcgagggtgatgtggagagtaaatgtgctgaagtggattgggttagaagtctctggtttaggtttgatggagggatgaacatgggttga

SEQ ID NO: 71240 - DNA, 1227 bp, Oryza sativa
  Clone ID: PAT_MRT4530_71732C.1
atggcagttttcagattggatcatagtgtcgatcaaattcaagaaatgaagtccccagctagctcacatcgggagcagccatggctgagctcggtctacggctcaccggcggcgatcggtggatcgaatcggttcgaacacaaaagagaaaatgtagaggacgttcttgcgcatccggtgctcaccaagcagagaaacggaggcagcgaggtccagggagcggcggaggtggtggttgttggccaacggcggcaaaactccagcgtcgacgtcgccgggtcgactcaaggcacgaactgcaacttcgagagtacggtggtgttagagatgagccacagagggtgcatgcacgaggaatccgacggaaactcaccggagctgcgtgttgcttcggtgttcttcactacaaagccacatgcctgtgatccatcaagtctaccaaaatatcccccgagcaaggaatatgatgctaagctgcgagatgaggaaatcaggaggaaaaggatgattgcattgaaaggacaaaataatgaaactagacgaaggaaacaacctcagtctggaaatggagatttacagcaacgacgggcacaggcaaatagaaaaggcactcggatggatgacggcattcgtggctttagaattgatcctccagcaagagtcggcgaaaatggcattgctcagcgtgttcctctgttgcatgctggccgttcatcgtctactctgggccgatcgaatgagactgatgaaaagacccaaagattttacacatctcagatgccgaacttgtcttgtgctgctgagccacgaggcggtgctactcggtcatctaaccatggggatggtgccaagaggccacatttgagagagcatccatctaggtcaaggtacaggcaattaactgctgttgattcctccggtagatctgaatggacacaccagtttcaagaaagaccgtcatcttcccatcggaaggaaggtggggcggctaacaaggagcatactgtggtcatgagagcgaacgtggaggcatgtatggcgtatcatcaggtgaatggcagtaagaagaacaggatccactactctgggccgttgatgcctcacggaggtaacatggaggagattctcaaagaacacgagcgtcaaatccagcaggcgatgagagacatgaaagagtatatgaaaaattgttacaggcgaggcgatcgttgcaaggtgtacaattaa

SEQ ID NO: 71241 - DNA, 273 bp, Oryza sativa
  Clone ID: PAT_MRT4530_71733C.1
atgtgtggaggggacgctggtggtgagggacgcaggacagtagtgagggagaatgaagacttaagtggcggaccacataagaggtctgcctgcgaaaatggattttcacaggcggacaacgagcttcaccctggtttgcatttttttgtaggcggctatttagctccgagggtcatattcgcctgtgaaaataaatatccaacgtcggcatcaggaatcgagcaatcagctcaaaccatcaggattgtaccagcacagtttggactgccatag

SEQ ID NO: 71242 - DNA, 1164 bp, Oryza sativa
  Clone ID: PAT_MRT4530_71734C.1
cggcacgagtcacacagtctccactcacacgcattgcaaaggagaggcgacaatggaggggaaggaggaagacttgcggctgggggcgaacaggttctcggaaaggcagccgatagggacggcggcgcagggcgccggggacaacaaggactacaaggagccgccgccggcgccgcttttcgagccaggggagctcaagtcgtggtctttctaccgggccgggatcgccgatttcgtcgccaccttcctcttcctctacatcaccatcctcaccgtcatgggggtctccaagtcctcctccaagtgcgccaccgtcggcatccaaggcatcccctggtccttcggaagcatgatcttcgcgctcgtctactgcaccgccggcatctccggaagacacatcaacccagcagttacttttgggctgttcttggccaagaacgtgtccctgagccgggccatcttctacatattgatgcaatgcctaggggccatctgccgaactggatttgtgaagggcttccagcagggtctgttcatgggccatggcggtggtgccaatgttattgccactggctacaccaagggtgacggtcttggtgctgagattgttggcaccttcatcctggtctacaccgtcttctcagccactgatgccaagaggaatgccagggactcacatgttcctatccttgccccactgccaattggttttgcggtgttcctggtccacctggccaccatccccatcaccggtactggcatcaacccagccaggagccttggcgctgccatcatctacaacaaggaccatgcctggaatgaccattggatcttctgggttggtcccttcgttggcgctgccctggctgccatctaccaccaggtgatcatcagggcgatcccattcaagagcaggtcttaagccccgcgccgccgctgcgcagccgacgacatgcaacgcaatcgtgatgtcctgtttcccgcgcgccactgccgcgcatccgtcgattccctccatctctagtccccaagagtttttcctatctgaaccctgaacaactcaatcgtgttatccagtactcagtcactgtatgtttttatgtgatggagatcttaattcttaaaaaaaaaaaaaaaaaaaaaacaaaaaaaaaaaaaaaacaa

SEQ ID NO: 71243 - DNA, 1116 bp, Oryza sativa
  Clone ID: PAT_MRT4530_71735C.1
ggttacaatggcagccagctctgggacacagctttcacagttcaagctatactggctaccaaccttatagaagattttggtcctactattaaattagcccatggctacataaaaaactcacagcttcttcatgactgccccggagatttgagttaccggtatcgccatatatataaaggtgcatggaccttttctactgctgatcaaggttgggctgtatcagatagcactgcagaaggattaaaggcctcattgttgttatcaaaaatttctctggaaattgttggtgaaccattaaaagtcaatagactttatgatgctgtcaattgtctgctgtcttggatgaataacaatggtggttttgcaacatatgaactcacaaggtcttatgcctggctggagattctcaatccttctgagacctttggggacataatgattgattacccaaacagaaaatgtgaattgaattctactggcagttacgtggaatgtacttcgggggtgatccagggtttgacagcatttaggaagcactatcctggacaccgcagggaagaaatagacaattgtatccaaaaggctgatagtttcattcagagtattcagagaagtgatggttcatggtacggctcctgggctgtttgtttcacttctcggacatggttcggagcgaagggattaattgctgctggaagaacgtacgagaactgtcctgcaatcagaaaggcatgcaacttcttgttgtcaaaagagcttccttgtggtggttggggagaaagccatttgtcttgcaaaggtaaggtttacaccaatcttgaaggagaacgtccccacggagtaaacaccagttgggccatgcttgcgctaattgatgccggacagggtgagagagatccagcgccgttgcaccgagcagctaggattcttatcaacctacaattagaggatggggagttccctcagcaagagatcatcggagcattcagcaaaaactgcgccatcagctactctcagtacaggaacatattccctatttgggctctcggagagtaccgctgccgagtcttgttaggcaggcaggatgcatcggtgaccggcaacactgctagctga

SEQ ID NO: 71244 - DNA, 1326 bp, Oryza sativa
  Clone ID: PAT_MRT4530_71736C.1
aaaaaaaaaaaaaaaaaaaaaaaaaaaaaaatcttcttcttcagtgtactctgcctttataacaccctactcctctctctcacctccaccatctagctcactcacacagtctccactcacacgcattgcagaggagaggcgacaatggaggggaaggaggaggacgtgcggctgggggcgaacaggtactcggagaggcagccgatagggacggcggcgcagggcgccggggacgacaaggactacaaggagccgccgccggcgccgctgttcgagccaggggagctcaagtcgtggtctttctaccgggccgggatcgccgagttcgtcgccaccttcctcttcctctacatcaccatcctcaccgtcatgggggtctccaagtcctcctccaagtgcgccaccgtcggcatccagggcatcgcctggtccttcggaggcatgatcttcgcgctcgtctactgcaccgccggcatctccggaggacacatcaacccagcagttacttttgggctgttcttgggccaggaagctgtccctgacccgggccatcttctacatagtgatgcaatgcctaggggccatctgcggagctggagttgtgaagggcttccagcagggtctgtacatgggcaatggcggtggtgccaatgtagttgcccagtggctacaccaagggtgacggtcttggtgctgagattgttggcaccttcatcctggtctacaccgtcttctcagccactgatgccaagaggaatgccagggactcacatgttcctatccttgccccactgccaattggttttgcggtgttcctggtccacctggccaccatccccatcaccggtactggcatcaacccagccaggagccttggcgctgccatcatctacaacaaggaccatgcctggaatgaccattggatcttctgggttggtcccttcgttggcgctgccctggctgccatctaccaccaggtgatcatcagggcgatcccattcaagagcaggtcttaagccccgcgccaccgctgcgcagccgacgacatgcaacgcaatcgtgatgtcctgtttcccgcgcgctactgctgcgcatctgtcgattccctctatctctagtccccaagatgtttttcctatctgaaccctgaacaactcaatcgtgtaatccagtactcagtcactgtatgtttttatgtgatggagatcttaattcttaagttatcatctctgttgctggaaatccggtttcctcttcgtgcatgaaccgcgcctttaatacacgtactagaataatcttggcaggcaaaaaaaaaaaaaaaaaaaa

SEQ ID NO: 71245 - DNA, 807 bp, Oryza sativa
  Clone ID: PAT_MRT4530_71737C.1
atgggcgagccgacgacgggagggcgcgagcaagggcgagaccaagctagtggcaggggcacgcgagcatgggcgagccggcggtgggagcacgcgtgcaggggtgagccagcggcggccacggcggtgtccaaccagcctcgatccgccatcggcctccaacgtcagcagcacgcgcgatcttccttctccaatcctcccagaatcccgacgacaacattggatggggattttgtttcagatctgtacatggatgaacccaacccatctcacttcgtccccaaaccaaacacatgcaaatttggttggactcaatgccgttgctgccgccggaagcgcctccttccttttgccaacaagggtgatgtgaaccgtgcaccctcgcctgctgtctcgagcgagtcgacgcccgccatctcgagcgacgcccgccgggagaaggggctcaacgccaccaccgtcgggagcacctcctcccatgatgctgctgcgaaccggctacttgctcgatgcatggcgatggggcgacctcctctgtcgatggccaccgcaggcaaatccttgcgtgatggcaacgggaacggcctcctctcactcgatccggataaggccttgttcagttacaccagaattcaatccgagctaggaatgacaggtataaggatcgatgttgtcagcaaggacttcgacaacatcgtcgatgtcgagctcggtgggccatggccgctgccgccggtggagctgatggcgacgctggctcacaagtttgggattatcggtgaagttggtaactgtgttcaatgttga

SEQ ID NO: 71246 - DNA, 228 bp, Oryza sativa
  Clone ID: PAT_MRT4530_71738C.1
aagcaaaagaaaagcagcaacaaagatgtgctgcggagcgatccttgcggagctcataccgagcgcgccggctgcgagtgcgcgtcacggcgggccacgtcttgccgtgcgacgccaacaatgccatagaagaagggcgcgcgcgccgacgacttcgaggccgcgttccgcgacttcgacaatcgactccgattacgaggagaggatgctggaggaggcggaggagga

SEQ ID NO: 71247 - DNA, 445 bp, Oryza sativa
  Clone ID: PAT_MRT4530_71739C.1
tgcacacgaacaatctactgccgggaacgtcaacgctctatgatctcacaggcgtgtcatatacacgactggatgcttgagcctgtcatctacacgcttatgttggtgcatcaagcattggagagggtaaatagttgggatcacttaatgacttactgggcgctataagcccacaagagcatgatttacagccctaatgaggcgtactcaagactataggctaatgcgccgtctgcgatcatgcagtacatgcaagctgtgtctaccgaactaatgtgagtcccagatgctgagcttacaacgatggagagaccaggatgacgcgcgcatcgattgctggaagagactagctgatgcgacgtggtgactgtgtggcctcatcaactggctctgatgacgcggatctttggacaccgaacattggcacctctgattctgacagtga

SEQ ID NO: 71248 - DNA, 263 bp, Oryza sativa
  Clone ID: PAT_MRT4530_7173C.1
gctacaaaacccctcataagtattaggtatcggtttatttaaaactggtacataagatctttttctacttccgtagaatgaaaatgtacagaatcggcacctttgagcaacttgtagtcggtaagtacacggtaactgcaactaattcagatcgtgggcaagaacttgtagtcgatcttctacacggtgaggtacatgtcgatctgcaggacggcgttgttggtggtggcgttgaaggagtgcgtcctgaggaggccgtaccc

SEQ ID NO: 71249 - DNA, 206 bp, Oryza sativa
  unsure (1)..(206): unsure at all n locations
  Clone ID: PAT_MRT4530_71740C.1
gntccgnaaggaaattacggaagtaccaccaccaccctgcgcangtgtctcctgtaccctcaccgacgcgacaccacccngtccccccttatccacggaggcggcctactccttcgcccagngccgccgatcttggtccgcacggacgngngggttacnttccacggaggggnaaggnctcaatttaggctgttcaactattcctt

SEQ ID NO: 71250 - DNA, 500 bp, Oryza sativa
  unsure (1)..(500): unsure at all n locations
  Clone ID: PAT_MRT4530_71741C.1
ctgcaggattcggcacgaggacacgtctatccgtnctaaaatttcncatctcaaacatngctgtacgtcnngcaggccggngacntnccctncntacagctccntggcggacaccangcagatgcacaatgccgaccnctcganggngggnggcgcgaacaccgnatgcgggctggaccaccccntagcganggcgatcntaagcncccgcgccgnggngttcgccnagcgcagacagagnttcatcgaccgcggaggccgcnccccggcggcgcgtncgctcatgtcgccggngacgaacggcgcnnntttttttctctnggactggggcncnccggaacgaaanctggacnggggcgtccagngcaacgagctgcnccagctccgcaantcngcgtcgntcgcgttccgcngcnaatccgccatgccggtggcnacgcaccccncggcggcggganccggaactgtctgggtgaantcccctgttnnnggaaggccna

SEQ ID NO: 71251 - DNA, 704 bp, Oryza sativa
  Clone ID: PAT_MRT4530_71742C.1
catcggccaggattgccgtggactctgtcatcggcactggtgacccttggtggcttttgcagacatggctcaaccttcacacgattaaagtgtctggaagatcggccctaaccatgatgagcttcccaaccctcgagcctactgaagatgatgaagggaacctggttaaaactcaccgatgcacgtcttttggggaagtggcctttgcttatcttgggtcagatctatcggttgaactactctttgattggtttaataacttctatgatggatttccaaagaactccaggatctggtttgcctacgagcattcccaagacttcgaactcccagccgatttcagatttgaggaaatcaatcacgaggcaacctttgaccgctggcgggtcgagtggaaaaagcacctcttccaccaatcggcttcgatgtatatgaccactatgttcccggatcagatcccgcaagccacagactccttacctccccacattggccaaagcggggaacccataaattatgctgcggggattattccgaacggtggggggctcgctcactccatcatcggttataatgctccgaggaaatcttcattgctccatggtctacctcgtgaacctattgaaactgacccggacgtggaggagtgcctggagaacgaggaaatggatgaggccatcgacgatgctgctgctgatgcttag

SEQ ID NO: 71252 - DNA, 334 bp, Oryza sativa
  unsure (1)..(334): unsure at all n locations
  Clone ID: PAT_MRT4530_71743C.1
tcctttacattgntgctccctccgactatattgtcatccgtcgaagcgccaaccgagttaatcccccataccgccctcggcgacatggaactactcattaacaggattggtaaggataccctgaaagcagtggatcacatctatatgtggagggccgcgtgagactacccgcatcacagaaaatatgtgggcgatgataaagtgatccattctactagaggtaggggccaggatgtcggtacaggaacttttattgaccaccttcttatgagcaatggatctaatacaaacacattatgttcaatatgcaacaatgaatgtgccaccagcaata

SEQ ID NO: 71253 - DNA, 1533 bp, Oryza sativa
  Clone ID: PAT_MRT4530_71744C.1
atggtgtccaaccacgacgacggcaagccaccggcgaagtggaagaaggtgtgcgtcgtcggggcgggcatggccggccttgcggcggcgcgggagctgcgccgggagggccacgccgtgacggtgctttagcaggccggcgacatggtctggtaatgtttgtacgacccttgcaccgaggacacgctctgctcgttcctgggtgccgtttgcgagtacaatagaatgtccacgccgcccctccctagctgacctcgcgaggccatgggcttcaacgacttcctcactctccccgtcgaggacgccggcaacagcggacgcgacccgcgccgcttccccggccaccgcgaggtgctcctctacctcaaggacttctgcgacgcgttcggcctcatggacgccgtccgcctcagcctcaacaccagggtcctccgcgtcgccatggcgcctcctcaatgtcgcgcccccgccgtcgccggcggcgagcggaaatgggtggtcaggtccgtacgcgtcggcgagcgcgacgacacgggtgttcaggaagaggtgttcgacgccgtcgtggtcgccaccgggcactactcgcagcccagcgtgccaaccatcaaaggaatggaggcgtggaggcggcggcagctgcacagccactcgtaccggctgccggagccgttccgcgacgaggtggttgtcatggtgggctgcggcgacagcggcaaggacatcgcgctggacctcatcagcgtcgccaaggaggtgcacctcacggacaagtcgacggaggaggccacgacgccggcgatgtccaagctgctcgccaagtacgccaacctccacctgaggccacgggtcgaacacctgtgcgaggacgggacggtggtgttcgtcgacggctcgcgcgtcgtcgccgacaccgtcatgtactgcaccgggtacgtctactcgttcccgttcctggacacggacggggtggtcaccgtcgacgacaaccgcgtcgggccgctgttcgagcacgtgttcccgccggcgctggcgccgtcgctgtcgttcgtcggcgtcccgaggaaggtgccggcgccatggttcttcgaggcgcaggggaagtgggtggcgcaggtgctgtccgggaggaggacgctgccgccggtggaggagatgctgcgcgccgtcgacgagcactaccgcgccagggcggccgccggcgtgccggtcaagtacacgcacgagctcggcggcatcgagcctcagaagtacatcgagttcggggagaagtattgcgggttcccgcgctacgaggattggaagagggagatgatcgtgtccaccatcagtaggagggatgacgacgacatggagacatttcgcgaccgcgtcgacgacgacagtgaccatgtccggctctgcctcaagagctggcactgctcatcacctgctcgacatcaagcctctcttgctgtttctgctgctgatggccatcctcctcctcctcgtcttgcacagacggccaaggccatcgctgctgatgctctgtag

SEQ ID NO: 71254 - DNA, 1306 bp, Oryza sativa
  Clone ID: PAT_MRT4530_71745C.1
gggtggcgcggcgactaccccctcccagctagagggaggaggccgccctcaaacccacgtggctcccccgatggaggtcaaccccgaggtgttgcggcggcggccccctcccagcttcctcaaatttcacccgctgcccccggccgaaccaaaaaaggggaccacacggttccctggtggaggagttaaccctccgatatctggcgcgccaggtagggggcacgttcgtgatttttgaggtttttcgagcgctggcatggttagcgtcgcgtcgccgatgtgggggaaggcgcagccttctctggagtgccgcgccaccctaggcaggggggataggccccccacatccccaccgagtaaggctggcggccaggtctttgtagcgagtctttggaatatccgatgacccccaacgttccggcccagcctcacggccaggtctttgtgacgagtcttcggaatgttcgatggcccccaaagttccggcccagcttcaccgagatgtgcaacggcagcgtcaacccctccgagtccctcaagatctacacgacgatcatagaggcggtggggggtgacgaccgggtcaaggcgaacctcttccccatggccctccagggccaagcgcggggtacgcttatggacctgccgcctgcctcgcggccagctttggtcccgccggctggctacggcgctcggcccggctcaactgatcgtcctttcaaagtttcaacggccagctttggtcccgtcggctggctacggtgcccggcctggctcaactatggaaagggatcactggctctagagtttttcggctctcacactcgtgcgaaggtagtcgtccatgtagaagggagagatattggaaggaggccaccgaaaggaaagagcaaacagaatgtgtagcgtggggccataggctcaaaataagttcacaacctaaggtacgggctgtcgagtcgccctcaagttggagcgaaaaaggcgcatgggccctagtgccagcaaagaatggagaagagaccgagcccacatcgttagactaggagagtggcgtcaaccctggccaccgggggaaggttttggacagggctaacgccgggggctactgtcggtgatatgggcccgggggcgtgctgcgcatctgaccggactgtgaccggttgaatgaccgatgggacggcgactgtgtacccccaccctatcagtgtgtcaggcggcgagtggcatgctccatcccgtcccatcataatgaggaggggcttcacagcctcttacctttctatggcgaagtctttgttacttt

SEQ ID NO: 71255 - DNA, 975 bp, Oryza sativa
  Clone ID: PAT_MRT4530_71746C.1
ctacctcccctcgccgacgcttctggccggcgatggcatgtacttgatcagcacgccggcggcggctctagcgcggtagtgctcttcgacggcgcgcagcatttcctccaccggcggcagcgtcctcctcccggacaacacctgcgcgacccacttccctcgaagaaccatggcgccggcaccttcctcgggacgccgacgaacgacagcgacgaggccaacgccggcgggaacacgtgctcgaacagcggcccgaccaccgggcactactcgcagcccagcatgccaaccatcaaaggaatggaggtgtggaggcggcggcagctgcacagccactcgtaccggctgccagagccgttccgcgacgaggtggttgtcatggtgggctgcggcgaaaacggcaaggacatcgcgttggtcctcatcggcgtcgccaaggagcatcaaacgctccaattaagctgtttgcatcgtttcctgcccaaggtcctaaatcttatcttaagattgcaagagcacttcagatgggtaaaccttgtgctaggcaagtacttcacttccatcctcatctttgcgagctactatgtgaccattggcactctgatagacaggccagccaagctttctctggatgacatcaagcgaggttggaagcggcccaagtacaatgtcactgccactctgcaggtggactttggtgtccttgtggtgtatgtagattctgatagctggattgcacgtgttcccgccggcgttggcctcgtcgctgtcgttcgtcggcgtcccgaggaaggtgccggcgccatggttcttcgagggaagtgggtcgcgcaggtgttgtccgggaggaggacgctgccgccggtggaggaaatgctgcgcgccgtcgaagagcactaccgcgctagagccgccgccggcgtgctgatcaagtacatgccatcgccggccagaagcgtcggcgaggggaggtag

SEQ ID NO: 71256 - DNA, 2355 bp, Oryza sativa
  Clone ID: PAT_MRT4530_71747C.1
atgtctcacgagaggtcagcctgcaataggcgaccttccaaacaaaaggagtggtaaaggaggtagagtgatgacaccgaagcggggatttaggaagctttcggacaaattgaatggcaaaggcaacctggtaaaatgaagcaggaacggcgccaagaaaagtatcgggatgagttgaaaaccaagcgaatgatatcttctgacacaccattaatgtctgcggagaagatgagagaggctcaagcttctcagcaaaacaccataccttgttttaagtggcaatgcaaaatcaggtcaaacgagcgatgccagtggctttgctacagtggagaaagagcaccctgggagtctgacgcccatgcttggggccaaaaaggtcgagcactttctgggcatcaaacgaagcgcccagggtggaggattgcctccaccacctccaaagaagccaaagaactgaacctgcagtggacttggctgagtagaaatcaggtggtttttagtgcatttgctactgtaggtttggagcagatttcgagggacctacaccagcagataccaacgacccatgaagcagccccaaatgagttaacatgtaagaacctgtgaatttttattccaagttgattatgttaacattctgacatgggcgatgtaacttttgtaaccagctgtacttacaaggctgcaccacaaatgcagtcagaactacagaggtggatttaaaatgttgtcgggtctcaacaaatctacagaagttattaaatcttggaaggcggggcagttgtcatgaccctaaaagatcagagcatcctggctgatggggatatcaatcaagaggctgatatgcttgagaacattgagattggtgagcagaagcaaaggaacgaagcttacaaggccgcgaagaagaaaggaacatatgatgacaagttcaatgatgatcccttgtcaaagaaatctatactctcacaatatgatgacccaatggaagatgagggagtgacacttgatgaaggtggacgcttcagtggtgaagctgaaaagaaactggaagagctccgcaaaagaattgaaggtggttttgtgcagaaaaagacagaagatcttacttccgcagcaaagatgtcatcagactattatactccagatgaaatgctccagtttaagaaaccaaagaaaaagaaatcccttaggaagaaagaaaagcttgatctggatgcacttgagtctgaagctattgctgctggactggggacaggtgatcttgggtccagaaaagatgcaagacgacaggctgctagggaggaagagcaaaaggctgatgctgaaaagagaaactatgcgtatcaagcagccattgcaaaggctgaagaggcatcaaaagcattgcgcccggagaaaaatatttctggtaaacacgctgaatctgaagaactagtttttggtgaagattacgaagatttgcagaaatctctggagcaagcaaggaaattagctctaaggaaacaggaagagactgctgcatctggtcctctggctgtagcagaactggctactgcaagaataggtcaaaaagatgcagatgctgccgaaggagatgcacaacaaaataagactcgcaaaccagaagcagaagatgtttttatggatgaagatgatgacatgatcatgtcagacactgtggcaaaagatgacatgagtgggctggccgtggtcaaagaggaaactagcgttgaagtcccagtaaagaatgaagaggaagaagagctaaaaccagatgagattgtacatgaagctgcagttggcaagggtttggctggtgctttgaagtttctgaaggaacgaggaaccctcaatgagggcacagattggggaggcagaaccacagataagaagaaaagcaagcttgctggtattgaggatggaccaaaagatattcgcatagaaagaattgatgaatttggtcgagtgatgacaccgaaggaggcatttcgggatctttcacacaaattccatggcaaggcacctggtaaaatgaagcaggaacggcgccaaaaaaagtatcgggatgagttgaaaaccaagcgaatgatatcttctgacacaccattaatgtctgcggagaagatgagagaggctcaagctctcagcaaaacaccataccttgttttaagtggcaatgcaaaatcaggtcaaacgagcgatgccagtggctttgctacagtggagaaagagcaccctgggagtctgacgcccatgcttggggccaaaaaggtcgagcactttctgggcatcaaacgaagcgcccagggtggaggattgcctccaccacctccaaagaagccaaagaactga

SEQ ID NO: 71257 - DNA, 464 bp, Oryza sativa
  Clone ID: PAT_MRT4530_71748C.1
tgaaagagaaactatgcgtatcaagcagccattgcaaaggctgaagaggcatcaaaagcattgcgcccggagaaaaatatttctggtaaacacgctgaatctgaagaactagtttttggtgaagattacgaagatttgcagaaatctctggagcaagcaaggaaattagctctaaggaaacaggaagagactgctgcatctggtcctctggctgtagcagaactggctactgcaagaataggtcaaaaagatgcagatgctgccgaaggagatgcacaacaaaataaggttgttatcacagagatggaagagtttgtgtggggcctacagttgaatgaagagactcgcaaaccagaagcagaagatgtttttatggatgaagatgatgacatgatcatgtcagacactgtggcaaaagatgacatgagtgggctggccgtggtcaaagaggaaactagcgttga

SEQ ID NO: 71258 - DNA, 975 bp, Oryza sativa
  Clone ID: PAT_MRT4530_71749C.1
atgggcgtcccgccggtcgactgggaggcggagagctacccggcctactcggacttcgcggcgatccccttattcgccgtcttcctcttcgccgtccgttatctcctcgaccgcttcgtcttcgaggttgtgatggttttcacggttctttttccccaccacgcccattttcgtattgttactggagtgtggttagccaggagactgattttcgagaaggatgagaagcttgatcttgcgacgcatgcagggaggataaagataagaaaatttaaagaatcagcttggaagtgcatatatttcctttctgcggaacttttggccctgtctgttacctacaaagagtcctggttcactagcacaaaaaatttctgggttggacctggagaccaggtctggccagatcaaagaattaaatttaaactcaaattggtgtacatgtatgctgctggtttttatacatactctatatttgctcttcaattctgggaaataaagcgctcagattttggtatttcaatggttcatcatgtagtatctgttattctcatagcattgtcttacatattcagatttgctcgtgtgggttcaattgtccttgccatccatgatgcaagtgacgtattcctggaattggggaagatttctaagtacagtggctaccagttgcttgctgatgtttcatttcttatctttgtctgttcttgggcagtccttcgcctgatatattatccattctggattctctggagcacaagctatgaagttgttccgatgttggacaagaagaagcataagtttgatggtccactacactattatgtattcaactgtcttctcttctccctccttgttctaaacatatattggtgggtcttaatgtatcgaatgctcgtggagcaaatactgtctaaagggcatgttggggatgatgtccgatctgattctgaaggtgaagaagaacatgaggattga

SEQ ID NO: 71259 - DNA, 2478 bp, Oryza sativa
  Clone ID: PAT_MRT4530_7174C.1
ctcttctttacaggaacttgtttgttttgcagccacgaccaccaccaccctccaactgtccaaccccacacaggtcagcacaaggcatgggggagcttagctagctttgccttttgccttctccatggctccatcctgtgagcacatatactactaatccacccctaatccgttgcagaaagcctttgctctcttcttgctttcctcaaatcgttgtgtcaagccagcagctggagcagagcagccatggcttcctaggcctacctagacgaagatgcggagttaggcacggactcttttgaccagcctggatgttaaatcagtgaacttccttggatgcttaaagaaagtggagtgagcttttctctagatttgcagttgtacaagcaatattgaccatcatgtctgttgaggcggtgaagcagattgtgcctgcacacctggttaaacctgctgttgatcctgttcatgcaaaggcgagcaaggccggaaaagatggcaggtcagaccttattgctaaggagattttagaggagcaaaagccggctcatcggcggcaagagtcttctgaatctatattggacaagggtccttctaacgttggttcagactctggtgtcttggatgtgccactaaccccaaaaggagactctggggagctgaaagaaatccaaggcttggattgcaacgggaatcaggagaagaagacggcgcaaaagagcagcactagcgagagctttgcttctgctaaagttagcgacgggacgaatggtctgaggaagacatgtggaagtggcaaggtcagtgatacagctgattctactgagagtgggaagagcagcatgtgccgtccgagcacgagcagcaacgtcagtgatgagagctcgtgcagcagcctgagcagcagcacaacgaagccgcacaaagggagtgattcaaggtgggaagcaatccggatgatcaggtccaaggatggtattctaggtttgagccattttagattgctcaagaaattgggctgtggtgatattggtagcgtctacctctctgaattgagtggtacaaggagttactttgcaatgaaggtcatggacaaggggtctctagcaagtcggaagaagctgcttcgagcgcaaacagagcgggagatcctgcaatctctggatcatccatttctgccaacactgtatacccacttcgagacagataagttctcatgcttggttatggagttctgcccaggaggggacctgcacactcttcgacaaaggcagcctggaaagcatttctcagagcaagcagcaaagttctatgtggcagaggttcttcttgcattagaatacctgcatatgcttgggattatataccgtgatctgaaaccagaaaatgtccttgtccgggaggatgggcacataatgctgtctgattttgatctctcccttcgttgtgctgtaagccctactgttgtcaagtccgcgaatcctggaccagatgcgttgcagaggaacaatcaagcttattgtgtccagcctgcctgtattcagccatcctgcatccagccatcatgtgtagctccaacaacctgctttggtccccgttttttctcctccaagtctaagtccaagtccaagaaggagaagaaatcaaagcctgaggttgtcaaccaaattagcccactgccggagctcatcgctgagccgactgatgctcggtccatgtcctttgttggcactcatgagtacttggcaccagaaatcatcaagggagagggtcacggcagtgctgtggattggtggacctttggcatattcctgtatgaactcttgttcggtaagacccctttcaagggatcaggaaaccgggctacactcttcaatgttgttggccagcccctgcggttcccggaatccccaatggtgagcttctcagccagggacctgataagaggattgctggtcaaggacccgcagcaccgtcttgcctacaagcgtggggcgacggagataaagcagcatccattctttgagggcgtgaattgggcgctcatacgatgtgcaagccctcctgagatacccaagccagttgagctcgagcgcccaccaaagccagcaccagctactgagaaggttgccccggctgccaaccagaagggctcagacaattatctagagttcgagttcttctaggtttgctttcctttgtgtttctgaacagggttggtgcatgcaagctgatgtatgaaaggatggcttagaaatattatgtttaggttattagatgtattccgagcaacctttatttttcattgaagtgcttatgatctaatccgtccttcgcatgttgtaatttttaattaaatctagtgatgatgcttgaaaggatgtggtaccctgtttcacctggcactattaattccagttttgcttcagaataaaaaaaaaaaaaaaaaaaaagcttctaaacaaaaaaaaaaaaaaa

SEQ ID NO: 71260 - DNA, 980 bp, Oryza sativa
  Clone ID: PAT_MRT4530_71750C.1
atggagcttaacccgggcatcttggatcatgaaggaaatcatcttcttccccaagctcacaaccatcttctccaccaaccatacagagttacatacaccgatagagttagatgtagtgtgttgattttcgatacctcccaatcttatgtcatgtcaccaccaactaatctaatctaccacgacaacgaaaacaggacaacggatctcaacacccaaccaaagccgctaacaaggcacaagctagacgaacatacgtataacaaatatcgaagagtggatgaatgggagcatgctgcccctactcaaacacaaggggtaatgaaatattatcgattgacacgtgagaaaagtttcaagtttggtgaatgcatcccctgtatttacttcacactattactcgcaaccatatatgccatcgagcaaacttcatgttctactcgtcttatggccttatgggccagaggaccgatggccttaaaagcccaagcatacagatgggcctttgtttcccacagaaatagaacatcacggcccaaaccaactcatcccaacgatagtgatcggtcatatgcgaatgggagagaattggaggggatcgaatctatgagttgtgtttggttgattgctttacaatgtcaagccatatctattagccgacattatcttgagtacaagcatgcagaatttctacaagttcgtgccatggagcacactactacattatctgccgtacgtgcggccacgctacacggacaggaataaaaccgcatttacatatgctgcccatcgcattcatccaagctgtttctagcagtagcgttgatcgagcagaggctaacacaatccatcggtttcaggacggagtgttgtgcttgtgcctgcgctacacaacaaaaaccgcaattgcccatgaatcattgccacaactcacactcacgggcatcatcaatctcatcttgttttcaatccccggcatcaat

SEQ ID NO: 71261 - DNA, 771 bp, Oryza sativa
  Clone ID: PAT_MRT4530_71751C.1
atacacagtaatcctacggatattaccttataatattgaatttaaacgcaggaagaaccaggctaggaaggtggtgtgcatcccagcgcctgcagcagcaggagggaggaccagtggggaggttgttccttccgatctctgggcttggaggaagtatggccagaagcctatcaaaggctctccttacccaagagggtactacagatgcagcagctcgaaaggatgctcggcgcgcaagcaggtggagcgcagccggaccgaccccaacatgctcgtcatcacctacacgtcggagcacaaccacccgtggccgacgcagcgcaacgcgctcgccggctccacgcggtctcatcacgccaagaacagcagcagcaacagcagcagcagcggcgcctcctcagcctccaagaacaactcctcccacagcggttaccaccaccaccaccaccagaagccactcgtcaaggcggaacccaacgatcaatccgccgccgccacgaccgccgccacggtgccggtgaaagaggaggccgccatggagcacagtgatctcatgcagcagatgttcagccagagctaccggccgatgataccggaggcagcggccggcggccaccacgacgacttcttcgccgacctcgccgagttggagtcagatcccatgagcctgatcttctccaaggatggtggtcatgctggcaatgagcggaggagggcgactagagagacatttgtcgatttttcacgtcggccgatgctggccaaggtacc

SEQ ID NO: 71262 - DNA, 146 bp, Oryza sativa
  Clone ID: PAT_MRT4530_71752C.1
atcactcgcgctccctcggctgctgcggccgttttttaaatcgattggcgacggcacggcatggcggcgtgctaacagatccacccacgtatcagatcaaagcagagatgatcgcggcgtttcttcatccaagcgcagccgagtag

SEQ ID NO: 71263 - DNA, 1343 bp, Oryza sativa
  Clone ID: PAT_MRT4530_71753C.1
agccatgacaacagccaagtggcttcggagcacaatctctccccttccttcaaaaccttccggggagttactgcgcttcttctcagcttgtccgaggagctccgcctccgccgctggccgcccacgccgtctccgcctctgtctcagccgcccgtcgccgccatcgtcatcgtcgtcttcaacctcctcctcatacaccgtgccgccgccgccgcccgccgtctgcctctgcgcgccgattactgtggatgcatggctagctgctgtggagccgcggcagggccgcgcgtggccgacggaggcggcggaggcgcgcttggccagtggaggcggcggagccgcgtgcggcccgcggaggcggtggagccgcgcgcagccggcggagacggcgaagccgcgcggagctggaaggcgagcggaggaggccctcgcggcgggcccgtgcgcggccggcggaggcggctccgcccgcggcggccgcgggctcgagctcgcgggcggcgcgggcgtaggcggcgagcggcgcgtcgccgccggggttgttgcgggcgaggaggtcgcggaggtagcgccacttgtgctcctccatggcgcggaggcgggcggcgccgcggtggaaggggccgacggagaccatctggggctcgtagaggtggcggttgcggcggcagcggcggcagtgacgttggggggtggtgttgatgatggcgtggcagctggacggcggcgatgctggcgccggcgacttcgtcggggaagttgaccttggccttggagcccttgaagcggacggcggcggcgtcgtaggcgcgggcggcgtccgaatcgaagcccccacacacgcgaagctggcgcgggaggcggccgacgcgagcgcccggaagcgcaaggcggcggacggcggcggggagggcgacgccgcggcgacggtcccggaggaggcggtgatgggggaggcggcggcggcagccgcggcccccgagccggtcgtcgaggggggaggaggaggggggggggaggggttgaatcctaaccctagcggcggtgggggaggaggtggtggagggtgctcggactccgtgtcggtcgagggaggaggaggaggtggcggcggccgcggaggaggaggaggtcaggcagcgacgaggaggaagaggagggggaggtggaggtgggggtggtggtggagatagggttggaggcggttgcggcattgaaggtggaggaggaggaggatgtttgtgtatccgtggcaggtcattggattctgtcacgagttagtttctcagagtgcatgggggaggaggagaaggaggaagaggagaaggagtgaggaggagaac

SEQ ID NO: 71264 - DNA, 274 bp, Oryza sativa
  Clone ID: PAT_MRT4530_71754C.1
gcgtgcgccagagaagctactgcataattaggtgctgcggatccactgggattgccaacatgaacagattggcaaatcttatgcaataaaaggtttttgggtgcaactccataattgatctcaggagatcttatcagaacattgtgtgcgaacagaacagccactttctgtatttttttcagccgacatgtggatatagcatagctgatgactttattgcggctttattgtgacggcacactttgatgcgttcggctaccacatctgcaagctt

SEQ ID NO: 71265 - DNA, 142 bp, Oryza sativa
  unsure (1)..(142): unsure at all n locations
  Clone ID: PAT_MRT4530_71755C.1
gtacctgatcggcgacgtcatgggtggcggcgtgggggtggtcgacagagagagcatagaggacnaccttttcagcggagccggaaactgcgacgacaggcccgtactgacggcgcccgatgccatgaaggaggagggcatc

SEQ ID NO: 71266 - DNA, 513 bp, Oryza sativa
  Clone ID: PAT_MRT4530_71756C.1
atggtcgaagatcttggtccgaatggcaatggattacaaccgcagttcaacattttccaggaccggatcgactacgtggtgcaacatgctttgatcaaccaatcaggagtcttggtgaataccttaactaacatggtaaaatcaggggttgatggcaaaatagctgagcatcaagttacagggccagtatatttgccaggtggtgtttttccaaattacagacctttggttacaggcaaccaacagggttcttctagcgcaccaccaacacagtcgatggcaccagctgcggcttctgctccagctgcacaggttgcaccatcattggcaccgggacaaataaccaatcctaggctgttgaccagagaacagccacagcatggtggacaaaacatcaatcggctaacccaggagaaggtggctgctatgttctatccaaatcaaccaactgccgatctagcgctgccgaaccagcatacgtcagcagcaaaccttgctaaatgcatcggctag

SEQ ID NO: 71267 - DNA, 690 bp, Oryza sativa
  Clone ID: PAT_MRT4530_71757C.1
atggctcctcgcaagccgaacccagcttccgtgacgggccctgatcccggcaggattgatgacgacaccaccgcctatctcggggcttcgcttgtggacgaggatgagttggcaaagctggtggagctccctcaactaagcccatcggctctcgtccgaatcgccatcttcgactgggcgtgccggaccgctgggttcgaaccattttttacggcaccattttttacgcaacggacgaagaagacagcgttcgggagcgtgaacttcaatgttcgccccgagcactctgatctttggccggtcaacgccgccatgttcaagttggctcgccactggatgtcgaagtggttttaccactccatccccttcgaggccgggtctgagtcggcgaaagctctccgatggcggcgcagggcgatcgcgccgaacaagaagcccaaggtcaccgtcgatggcgccatggaagcccggtatgccccgattgatccctaccgagctccacctatacaacctagtagaatagggacaattcggcaaacatgcatgattgataggaggaaaaagaaggacttgaatcatgaccgttccattcatcaatttcccaagatggtgatcaaccaccaacgttgggagaggatgaggataaagaatggaaatatattccgtgctgatggactcacatggttttga

SEQ ID NO: 71268 - DNA, 3255 bp, Oryza sativa
  Clone ID: PAT_MRT4530_71758C.1
atggccgcaaataatctactactggtgggtgccgctgctccccgggaagcggaggccggcgacggcgccgccgagtcgaagatcgcggcggcgttgggaacactcggcctggccgccgtctccacggccaccgctttggctgcagcgttcgagccggcggtgacgggtggattcgccgccaacacctactacaacctcgccctggcagtgaccttccttgccggggtgaccctgatcggcgctttagtgtgggtgtccgacaaaccggctgcccgccgccgtgccgccgggaagaagctcctctacgccgccatcccgccgctagtcgccactcgccaccgtcgtcggtctatcggtggcggcgctgctctggatttggaaaccaggaacgtgatcgccaggtgcaatagctctggcgacctctacccgttctacccaccagccaccagcactcatgccctcctcgccgcacccacctcgctttggcatcgtcgtctcggtcatcttgggcgtgaagctttgtccaagctcattagatccagtgtcatttcatatgattgctcacactacatttggacgtttccactacgcctaaaatccgatactttttccaccattgccaatttctttgcccatgttaaaacgcaattcggcaccaccattaagagcgttcagtgcgataacggccgggagtttgacaattcccctgcccgcacgttcttcctctctcacggtgttgcgtttcgcatgtcgtgtccctacacgtcccagcaaaatggcagggccgagcgctctctccgcacactcaacaatatcttgcgctctctcttatttcaagcatgtcttcctccggtctactgggtcgaggcccttcacaccgccaccctccttgttaaccggatccccaccaagacactgtcctcttccaccccctacttccacctatattcgacccagcccacctatgaccatctacgcgtgtttgggtgtgcttgctatcctaatatgtcatccactgccccccacaaactcgctcctcggtcatccctatgtgttttcctcgggtattcttcggaacacaagggctaccggtgccttgagcttgggtcgaaccgcatcatcacctcccgacatgtcgtttttgatgagtccttttttcccttcgccgacatgtctacatcacccatggcatcctccgccttggatatttttcttgatgataatgaactcaccgctcaaccccctcgagcaaagtttgtgcatgcaggtacctcctccgccgcgcgtggggctgttgagccctccacgccccctcccgcgccgtcgagcatcgggcctcggtccccggctacccttgctggaccagaggccgggccacacggcgggtctccggctggagctgcgaccagccagcctggcgcgatcagtcctgctcgcacggccgcgcccagcgctgcgaccagcactactcgcgctgtgaccagcgcgcctcgtgctgcgaccagcggcacgaccccgtcgctctctcctctggccggtactgctgcccctccgccccgagcggaggtagctgccagtagtaccgcggccaccgggcgtacactggccacccggccggtctccatcgcccccgtcgacaacgcgcactctatgcgcacacgtggcaaggctggcatggcgcagcccgtggatcgtctcaatctccacgcggcgcccctgtcccccgtgcctcgctctgtccgtgaagccttgtcagatcccaattggcgtgctgctatgcaagctgagtttgatgcactgctcgccaatgacacctggagcctcgttcctcgcccccgcggtgttaacctggtcaccgggaagtggatttttcgtcacaagcttcactctgatgggtctcttgacaggtacaaggctcgttgggttctccggggttttactcagcgacctggtgttgattatgatgagaccttcagcccagtggtcaaaccagcaactgttcgagttgttctctcactggcactctctcaggactggcccatccatcagcttgacgtcaagaatgcttttcttcacggtactctctcggagacagtttattgcattcagccaactggctttgcggacccatctcatgctgatcttgtctgtcgcctcaacaagtcgctatatggcctgaagcaagctccacgtgcctggcatcatcggtttgcttctcacctcatctcccttggatttattgaagcacaatcagattcttccctgtttatccatcggcgcgggaacgacacggtcttgttgctgctctatgttgacgatatcgttctcactgcttcatctgccagtcttctgcagcaggtgatcgctgctcttcagcgtgagttcgctatgacagatatgggtccccttcatcactttttgggcatcaccgtcacgcgttttgccagtggattatttttgtctcaacgtcagtactctcaggacattttggagcgagccgggatgggtgagtgtaaaccttgcagcactcctgttgatgtgcactccaaattgtctgcagatggacctccagttgctgattccacacagtatcgcagtcttgctggcgctctccagtatttgacattcactcgccccgatattgcatttgctgttcaacaagtgtgtctttatatgcatgatcccagggaaccccatttggctgctctcaagaggattctgcgctacatacaaggcaccctgtctctcggtttgaccatgcgccgctcaccaccgacagatcttgttgtatacaccgatgcagattgggcgggctgtccggacacacgtcgctctacttctgggtacgcagtgtttcttggcgataacctcgtatcctggtcctctaagcggcagcacacggtatcacgctccagtgctgaagctgagtaccgcgccgtggcgaatggcgttgcagaggcgacttggctgcgacagctgctgatggagcttcaccgaccacctcgcacagctacagttgtctattgcgacaatgtcagtgcaatgtatctttccagcaacccggtacagcaccaacggacgaagcatgttgagatcgatcttcactttgttcgggagaaggttgccttgggacatgttcgggtacttcacgttcctacgacttcacagtacgccgacgtcttcaccaagggtcttcccacctcgctgtttcaggagtttaggaccagtctaaccattagcgacgctcccgattag

SEQ ID NO: 71269 - DNA, 234 bp, Oryza sativa
  Clone ID: PAT_MRT4530_71759C.1
aatatatacaacaaataattatcggaaaggggaggggcatgcattaaattaattctccctccaacagcccatacaaattatacaactcaaaaaaaaatatacggattacaaggagaatgctcaacaaaaataaacatttcccttcaatgaaccttgatacagcaacatacacattttctccacccaaaaagaactaacaaaagaacagctcaaaaagcctccaaacaccatgat

SEQ ID NO: 71270 - DNA, 930 bp, Oryza sativa
  Clone ID: PAT_MRT4530_7175C.1
atgagctattatggaagcagctcttctggtggatggggcagtcggagagtcgagtatgggaggacctatatagtgaggccaaagggaaggcaccaagccaccattgtgtggctccatggtctaggtgacaatggtgcaagctggtcccagctcctggattctctttcattgccaaatatcaagtggatttgcccaactgcagcaacccggcctgtcacggcattcggcggattcccttgcactgcgtggtttgatgtggaggacatttcagtggatggccgtgatgacattgaaggactggatgcttcagctgcacatattgcaaacctgttgtcgtcagagccacctgacgtgaagcttgggatcggcggtttcagcatgggtgcagctgctgccctccactccgcagcgtgctacgctcacggcaaattcgcgaatagcatgccatatccaatcacactcagtgcggtcatcagcttgagtggctggctcccttgctccaggaccctgaggagcaagacggagagctcacacatggctgcaagaagagcttcctccttgcctatcttactaagtcatggaagaggtgcaacgtcaactgaacccactgagactatcgagtgggtgacaaggtttgaagggccatggagtatgaaggtcttaccatgctttgagatttcgcaaaggtttgaagggtcatggagtatgaaggccttaccgtgctttgagattttgcaagggatgattgtgtttacagttgcatttttggcagaaagtggctattgtcttgaggttgaggatggtaagttattgattacatttacagtttctactggcaaactatgtcagataaatataggcaagataaaacaaatgacatgggtgaagaacaaaatggggtccttcccaagttactccaaaatcaattga

SEQ ID NO: 71271 - DNA, 1180 bp, Oryza sativa
  Clone ID: PAT_MRT4530_71760C.1
atcgcatcgtgcccggccggggcgttggtcttcgtcttctctcctcctcctcatcttcatcttcttctccccaatcggcggcgccgccgcggaggaatcgcggattgcgtcatcttctcctcctcctccgcctccgcctccgcttccaatccccgtcgtcgtcgggtcaccggagccaaaccctagaggctagaggaagagggaagccatgttcgggaaggggcatgatctcgaggccggcggctcgtcggagccgctgtacccggggatggtggagagccccgacctgaggtgggcgctcatccacaagatctacgtcatcctctccgtgcagctcgcgatgacggcggccgtggcggccttcgtcgtcaaggtccgcggcgtctcggagttcttcgtctcctccaacgccggattcgccctctacatcttcctcctcttcctgcccctcatcgtgttgtgccctctgcgctactaccaccagaagcatccggtgaacttgctgttgctcggcctcttcacggttgccatcagcttcgccgtcggcatgacatgtgcctacaccagcggaaaagtcatttttgaggcggcagctctcacagcagtggtggtgatcagcttgacagcatacactttctgggctgcaaagagaggccatgacttcaatttcctcggccccttcctgttttctgctgtgatggtgctgattttattttcactgatccagatattcttcccattgggcaagatctctgaaatgatatatggcggactggcatcgctcgtcttctctggatacatcatctacgacacggacaatatcatcaagcgctacacttacgatgagtatgtctgggctgctgtctcgctctacctcgacgtgatcaacctcttcttagctctgctgcgagtgttgagggcagctgataactagttcatcaaggctagtctctaccctgcacataacgaatgtccgtggattcctgtaccctgattaagcatcacgcttttgttgattctgctgtaaattcttgcttagtggatcctggagactttttatggaaccgcataattgaatttgttagctatatttcaacaaataaatgcaattgttgccttgcttctttgctcgctgaaaaaaaaaaaaaaaaaaaaaaaagagcccaattcctgcagcaaa

SEQ ID NO: 71272 - DNA, 225 bp, Oryza sativa
  Clone ID: PAT_MRT4530_71761C.1
acccacgcgtgcggcaagagggcaacccgctggtggtggtcgaggcaattaaaattgagcacacagtgcgcgcgccctgctccggcactgacgcagagctgcacagttttgtggatgcacaggtggtggatgcccacgtgctgtgaatgtcgttgtcctcccacgcaatatcagccacagactgagggcccgcctggaactagctgcatggcttgcaagcttgca

SEQ ID NO: 71273 - DNA, 186 bp, Oryza sativa
  Clone ID: PAT_MRT4530_71762C.1
atggtggagaccaaccttccttcttccacgaggccagctgatctcatgagaggccaatgtgctgtggtggatcagatcattgctggagaaggtgatgtttttggaatgattttgggggaggcatggggatcaatcgacaagggccaggttggagaaaagttgctgtcaattatccttttcctctag

SEQ ID NO: 71274 - DNA, 1146 bp, Oryza sativa
  Clone ID: PAT_MRT4530_71763C.1
agcccggctgcacgccctgggcgccaggcgcaaggaaacgaagcgcggtttccgtagcgccgccgccgccttcgccgccgcgggcaccactcccattaagaccggatcagctctctctctctctctctctctctctctctctctgtccgttgcgctcgtctcctcctctcgccgcgccgccgccccccgcccccacgatcgacgactcgccgcgccgccgccgccgccgccgccaacgcatgcaggcaagatgaagttcggtgcaatatatgaagagtatcttcgggaacagcaagacaaatacctaacaaagtgctcacatgtggagtacaaacgtctcaaaaaggtactgaagaaatgtcgagttggtcgctcattgcaagaagactgccccaatggtgaccagcaggaggggaacaacgaatctccagatatttgcaaatgcaattcatgcacattgtgtgatcaaatgttctttacagaacttactaaggaggcttcagaaatagctggctgtttcagctctagagtacaacgtctcctaaatcttcatgtcccttcaggatttctacgctatatttggcgtgtaaggcaatgtttcatagatgatcaacaaatcatggttcaagaaggcagaatgttacttaattatgtaaccatgaatgctaatcgctatccgtaaaattctgaagaagtatgacaaaatacatggttctgtcagtggtagagatttcaagagcaagatgcaaactgatcatattgaactgttgcagtccccttggctgatagaactgggtgctttccatctaaactgcaatagttcagatattgatgaaactgtggggttccttaagaatgagttcttcaagaatttttcctgtgatttgaccgaagcacgaccactaatgactatggctatttctgaaactatgaagtatgagtacagcctaacttgtccaatttgcttggatactttgttcaacccatatgcacttagctgtggccatctcttttgcaaaggctgtgcttgtggagctgcttctgtgtacatctttcaaggtgtcaagtctgcacctcctgaggcgaagtgtcctgtatgccgatcggatggtgtctttgctcatgctgtgcatatgactgaacttg

SEQ ID NO: 71275 - DNA, 573 bp, Oryza sativa
  Clone ID: PAT_MRT4530_71764C.1
agctggcacgcctgcatgagctggtaccctatacagcggtcgacctacgcgttcggaaatatacgactcaatggaggcagctgatgacaccacctacaccatcaactggaaagagtgtattgctgccacccagcctatcaatcgaacaaaccgtctgatacacttgatgcctatacttacatactaggacacacatggatgtgctattatgacctaagacaggcttcatacagctctgatgtaacgtgacatctgagatactatccttgaagagatgattctggtggaagaccaaaacattgatggtcatatacagtatgctggatttggcacacagacgcaaatcatcaactttccactcgactggcaaacagtgtactgcagcctgcatgtatccgtgtaggatgcacctgatgtataccgaactcctgtcaactgccaccctgaagaattgaattagtgctactgagcctttcatctgtatatgacaacacatagttgtggcttcgagacaagagagccatgactagatggtttatcacatgtcaccctacatgcaaggctgaagaagac

SEQ ID NO: 71276 - DNA, 834 bp, Oryza sativa
  Clone ID: PAT_MRT4530_71765C.1
atggctaagaaatccaagaaggagaagggatccggcggccgagctcaccgacgacctcatcgtggagatcctctcccgcctcccgggcggtggcgcggcctcatctccgaccccgaccaccgcaagaagctcaccgaaaccctcgccggctctctctactaccgggttgcccttcttggcgacatggcgaagggatccaagaagaagaagggatccagtgcgacgaggaatccggcggccgagctcaccgacgacctcatcgtggagatcctcttccgcctccccgccaagtcggtccgccgatgcaggcgcgtatgcaggcggtggcgcggcgtcatctcctatccccaccaccgcaagaagatcccccaaaccctcgccgggttcttccacctcagcgtgaacgaatcacgctttcccgtggaagcacgcgatttcgtgggatttgaccctgatgtctcctcccaattccatgtctttcagtttgtgacggatgcgaggctgtggttggtgttaaggtctactcttcggaagtcggagaatggaattacagttcttgaggactattctaaggatgaatggacactgaagcataaggtgactattgaactgctgtctgggaagataagttgcaagtaccaaaccatgttctaccgtggggttgcagttcatctagactgcaacttagtttactacattgctgattacatactgatgtcgtatgacatggatcgtaaggaaccacgtgttattcaagatcttgggtcagattgtatgatggagtatcttccctatgttccactctacgcaaaaacattgtctagcggccgctag

SEQ ID NO: 71277 - DNA, 1905 bp, Oryza sativa
  Clone ID: PAT_MRT4530_71766C.1
gacgccctccaccgcttcggaatcttcctccccaaccacacgaaaaccaaaaaaaactcaccttcaccctcgccgtcgcgggccccccaaaaaaattcacccctttttccccacgctccggtggctccacgccgccccgcccgccgccgcgaccacccgttccaccggcgaatccgcggatttaatctcccacagctccccgtgagatcacaaagaccgggcgggcgtgggctgtgggctgggatggtgggcgacctctcctccctcctcgccgccgcctcctccgcctcccccgtcgtcctcgcgccatcaaaggagctccatggcgtgcacttgccgatgccgctccaggggaagaggccgccgctgcagccgcaggacgctgccgtccacatcgaggccgccgccgccgccgccgccgccgccttccaggggcaggtgatggtgcccggccacgcgcatgccggcgctcccgccgccttccaggccttcgctgtgcccgacatggccgcgctcatcgacgtccaagcagactctcaccctgactcagttcaacttagccttgggattgccgagcaatgctcaaggcaggagaaaatcctgaaatttctaaggtcagggtccgatgtgaaagaacttgatgtatctttactgactgaacttacggggcatcaaactctgccaatcaacttgggtactcaaccatacatccctgatgataagttatcagctcttccaatcagcatggccagtcaaccatatatccctgacgataagttatctatctatgagtttgaattggatgagccccagcagtatctaccagaaaatcaacttgtcatccctgatcctcttgtggagtttttccagtcccatggttctgcccttaccatagatcaaaacaggagaatcctcttcaatggaaatggagatgatatgagatatttactttcgattgtcttggcattcaatatgtctaaacgagaaataagcagttgcaagacagcatatctagttccatattttgaaaggaaaaggcgatcccgagcaagcagccatgcatccaattcaaaattagcaagcacagcagttgatgcttcaaaaagcactgcaaatgggaagtcaaaatcttcatcaaggaagaagcagaagagtaaaaatattaaagaacgtgacctgtacccgaagaactatttccatgctagtgaagcatttttatctatgctcctggacaaggacaatagcagctcaacaattcattcactgaaaaaagctggtcctgagatcagtgaactgctgacaaaatgctctattggcatcgctggaactggcttggctgttcttctctcagttgtgtgcaagatggctaccggtatgaagagtcctattgctgctacgcggctggtgaacactggtgttggacttgggctcttttggctctcctgggcagtaaacggattgcgagacacaattactagcatatttagaagcccaggtgacatgaacttgaaggacgaagaggttgcagtcagaatacaaaagagcatgaacgacattctcttcagagctatcactatattggcaatcactgcttttaagtttgcgtaagtggttacatactaatttaccttttccccgacccacctgtaatatataatccaccattttggttcaggagtacagcactagtgcttctgtaggattaagtgccaattgagcaaatgatccccggtaattttgtagaaaatgagaaaccgttgtgaactgtacagaattttgctggcagcttggtgtatatgaaagatgggtttttttcttatctgtagatgaacaatccaatgcccaatgatttatctatccagcagacaggttccatattttagctacttaaaaaaaaaaaaaaaa

SEQ ID NO: 71278 - DNA, 361 bp, Oryza sativa
  Clone ID: PAT_MRT4530_71767C.1
tttggttttattacgccaaaagatcactgatttttaacaaagcacaaagccaatgcatgctctggcattaataccaaactgttactgattgacaaagccaaaaattagaccagaagacacaaaagaacccaatataattatgcagccaaggaaaactgataaaggtgcccaatttgaaaacccaacaccataaaacccttaaaaaccttagttctacatgcggatgaaacagaagttgccctaacccttgtgcatcacgtcgaacgccgtgaagatctccgagaacggcacacagtgtgggatgaacgtcttcaccttcagaatctagtatatgaatagctcgacaaccgtgggcagatcg

SEQ ID NO: 71279 - DNA, 1316 bp, Oryza sativa
  Clone ID: PAT_MRT4530_71769C.1
ggtccggattcccgggtcgaccacgcgtccgccgccctcccccacgcgacggcggcggcgacgacgaggaggtggccgggatccggcagcgcggcgtctctcggccgcccgtatccggcggcggcgcggcgcctctccgctgctcggatttttatttttgtgtgtgggcaacataaccaccccggacgctaaaatgtgattttcgtgtgcggggaacgccgagactgagaacgccccctttcctttccccctcctctcgttggaggcggccggggaagctggtgggcatatggagtgcgcggcgaaggggctggtggcggagccgtgtgccggcgaggcccgccggcgctgcggcggttgcggcgccgtcgcctactgctcgcgcgcccaccagactgtgcattggggatttcataaagaagaatgcgcaaggctcgcagagcagatgagccgcatcgatatgctgaaacaatttccattcacgttctctgtggaatctcctgctccgaatcatacattccctagtctaagatgtttccttttggaatcattcaaacttcaccaaaaaggactctggaaatcagaatgcatatgtgatccagaggttacttcagtcaaggacttaagcaaaacaactgactggagtatgggaagcgccctctgcccatgcacagagcctgaacataatgtatccacacccctgacaagctggaaagactactataggtggagatcgcttcctttgcaatcacctgttgctgttttacttcactggcaacttactttatatctcattgttgccccaaatgctggtatagctgcatatcctagttggattccaactattgaaataattaggaaagttgggattcctgcaattttcacggacttctgtgaagaagctgcacatctagcttcgtcctgcattacctccataactggtcaacccctcagagtcccaattcagaattgcaagtttgtatcaccatgaaatgttcagagattcaactcttaacaaataatatcactaactttttcaaagaaggcaaggataccatgaaatattttcatggacgaaattgccacctgtttttattatttagtctttcagaatagatgccttggttacttgtaagaatgtaagatgcactcatcagctcatgcttgtaaatacagttgtcgtataattgtagacctgtagtaacttgtaagatactacatatataataccctaaagttgcagaaagacttgctagtaggtagtagcaatcccatgctggacatggtgaaatatggatcagttatcaacagctttt

SEQ ID NO: 71280 - DNA, 1735 bp, Oryza sativa
  Clone ID: PAT_MRT4530_7176C.1
atggccggcgggaaggagccgatcgaggtcaagttccggctttttgatggtacggacatcggcccgagcaagtacgacccctccaccaccgtctccgcgctcaaggagttcatcctcgctcggtggccgcaaggtagttctgctagcactatagaacttagcacatctttggtcctttgcgtcaatatgattgctgggccattcacaaataaggaaataactccaaaaactgtcaatgacctgaagctcattaatgccggacggatattggagaataaccggacacttgctgagtcccgtgttccagtaggagaggttccaggagctgggtatcattctaagactgtagtgtcctgtcctccaaagatgaacatgtatagggatagtatctgtaatctgaatacagtgtcccacaagaagagcccagccctttttccaatagcggggtttctccggctgtccgtgcgggtgcccgtccggatttgtatgctacaaatattttcgaggatagcaacacgaatccctcaacgagtcatctgtgcatcgaattcatatagttcaaattatcgaagtactagcacaagcagtcccatgaattcaaatgaaatgctgggagctcaggaaacggtatctactgaggggaacaacagctgttctagtgttcagtccactcctgacatagagaagaagtatgtgcatcgtgtatatgatgccatagccccacatttcagctcaacacgctttgcaaaatggcctaaggttgcaggattcttgaattcgttgaggccagggtcagttatactggatgctggctgtggtaatggcaaatatctgggcttcaatcctgactgtttattcataggatgtgatataagcccaccactgattgatatatgtgctgggagagggcatgaagtgttggttgctgatgctgtcaaccttccatacagggataattttggtgatgcggcaatttcaatagcagtactgcatcatttaagtactgatgccaggcggaggaaggccattgaagagttgatccgtgttgttcggaaaggtggtctggtgctcatcactgtctgggctgtggagcaggaggacaagtcacttctcaacaagtggactcccctctgtgagaagtataatgaagagtgggttgatccgagcagccctccagtgcgtaatcaatccaatactgtgcttgaaagcatatcagagactgatgaagacacaggtgcagtgaagcaaaggaatgatgatctgaaaataagtaatgatggtttggatgataacgccgatgtaacttgcagcaattccaacattgatgagtatcacaaaacccagcaggagtactttgttccttggcatcttccatttcaccgagctgaaattggtggtgcatctgctgctgctcttgaaaatggatttgcaaaaagagatgacaagaagggtactgtggtctacaaccgctattaccatgtttttgttgaaggagaacttcaaaggttagttgctggtataaacaatgcagttgttgttgaccaattctatgacaaatcaaactggtgcatcgttcttgagaagctttgaccatgcagctaaaagtgccggggagaaactcatctggagcctgtgcccttgtatctttgtaaggactgccagttgtaggcgagcacggttttgcgctccaaatgtacgaggcctgacacaaaaaaactgcattattgaatttagc

SEQ ID NO: 71281 - DNA, 507 bp, Oryza sativa
  Clone ID: PAT_MRT4530_71770C.1
atgtcacaactagatggctggcggcagaggcagagaacacccaggcagcgggcgactgagggggagctcgcccgggaggcccgcggcgaaggcagagatcgctcgggcggtgagcggctgagccctccccaacgcgcctgccacttgccctcccccgctgcgaccttctccgttcggaccaccgccgcggccttctccgcccggaccaccatcgccgccgcactacaggaaaggagagggggtgtgctgggagacggcggcgggcttgtcgcctccttcatgagagctacgactccgccaccacagatcccgaccgacggcgccgcgatggtaggtcaggcggtgccatccacgcagaggctcgaggcggagccgttgaccctcgaggaccgctgttgcctagccttctcgctcatcgagatcgatgtgcgagacacggccgagggagaggatgtggcgaggacgctgccttccgccggggatgttgccgccgccgccgccacctaa

SEQ ID NO: 71282 - DNA, 1996 bp, Oryza sativa
  Clone ID: PAT_MRT4530_71771C.1
ccggccggccgggaaaaactcttcttccccctcccgccccggccaggtgtttgacgaaatggcctcctccgccatggagctctccctcctcaacccggcggcaatgcgcggcctctccgccgccaagccccgcgtcgtgtcttccaggcgcatcgtgcggttccgcgtggcgtcgtcagccgcggcgccgcccgcggcgaagcccgggacgcccaagaagcgcgggaagacggagatccaggagacgctgctgacgccgcggttctacaccacggacttcgacgagatggagcggctgttcaacgccgagatcaacaagcagctcaaccaggaggagttcgacgcgctgctgcaggagttcaagacggactataaccagacccacttcgtccgcaacccggagttcaaggccgccgccgacaagatggaggggcctctcaggcagatcttcgtcgagttcctcgagcgctcctgcaccgcggagttctccgggttcctcctctacaaggagctcggccgcaggctcaagaaaacaaacccagtggtggctgagatcttctcgctcatgtccagggatgaggcccggcacgctgggttcttgaacaaggggctgtctgatttcaacttggcactggacctcgggttcttgaccaaggctaggaagtacaccttcttcaagcccaagttcatcttctacgcgacctacctgtcggagaagattgggtactggaggtacatcaccatcttcaggcacctcaaggcgaacccggagtaccaggtgtaccccatcttcaagtactttgagaactggtgccaggatgagaaccgtcacggtgatttcttctccgcgctgctcaaggcgcagccgcagttcctcaacgactggaaggccaagctctggtcacggttcttctgcctctcggtgtatgtgaccatgtacctaaatgattgccaacgtactacattctatgaagggattggtctggacaccaaagaattcgacatgcatgtgataattgagaccaaccgcacaacagcaaggattttccccgctgttcttgacgtcgagaaccctgaattcaagaggaagttagacaggatggtggagatcaacaaaaagatcattgccataggcgagtctgacgatatccccctggtgaagaacctgaagaggattcctcacgttgccgctctggtgtctgagatcattgctgcgtacctcatgcccccaatcgagtctggctctgttgatttcgctgaattcgagccccagcttgtctactgattctgtaggaagaccatctccagcttttttttccttcaaaaaggaatgctgatattttctgcctgaggggcttcgaacggtgagatgatgggtggttagcagaatctgcacctcgtgtgttcctttgtaaagtattgagacttcaacaatgtaccatttggcaaagcttttgttatgatctccatgtaagtggcagtgaactgcatcacagtgggggttacagttttccaacagaagggtaattatatgatgttttggggttgttgatacttcatacttaagttccttagcatcctaagtatcaattagctgtgctctgcattatggcataatgtttggtcttggtgaaggtgaatagtgacgccaactactgaaaacctggacaatgcaagtgttggaagatgttgtaaatgttggatctaacatgacacgcacccacctattgttgccatagttcgtgagccgcaatctctatttttgtcggaaaggaaaagagtattaatctttactatcacgaccggagaagaatgccgttacagtgcgatatggtgccgggaacattcctgacgtgatagcacgttcaagtgatagacaaactattttttcaagcaattgcagggagtttcgatgtaatattagtagctttcatgagtttttgctatgaagcctcaacaagttgaaaaaaaaaaaaaaaaaaaaaaaaaaaaaaaa

SEQ ID NO: 71283 - DNA, 465 bp, Oryza sativa
  Clone ID: PAT_MRT4530_71772C.1
atgcattgcgaggcggctagggttttccttcctttcacggacgggaaagcagaggcttttagtgggcccagcccagcccagcccagcccaagcccgtacaagctgagctctttctcattgggctacatctcagaaaggcctgtttctgagactcggctcggctcggagccgacgtgcctccaccaccactcgtcgcacgagcttggcgaaggtggagggagtggctcgtgggcttcctccgcggccgacacggcttggcgggtgggcgggcagagccgcgtcgggaacggaagaggaggaggaccaacaacgcttcctcctcaagctcatgccttccacaaggaccatcatcagcgtcatcggtcggtgttcgcgtccgagctacatagcggcaggcaggaggcggaggctgacacccatgacgacgggttcgctggaccaccacaaatttctaaggctctctga

SEQ ID NO: 71284 - DNA, 180 bp, Oryza sativa
  Clone ID: PAT_MRT4530_71773C.1
atggggacggcggtggcggcggcgtgcgcagccagcggtgacagcggtgacagcggaccgcgcggcgacaggagcaggtggtggatccagcgtcggcaacgggagcaggcggtggctccatcgctggtgaccgcggggacgacggatccgtcgccggcgatggcggcgggcctcggctag

SEQ ID NO: 71285 - DNA, 1352 bp, Oryza sativa
  Clone ID: PAT_MRT4530_71774C.1
atccgcgcgacggccgcacccaggcatacggccagcaacacaaccgccacacccagctaagcgccggtcgaccgatcgatcgatcgatatgggctcgctgagaggaggcggcggcggcggcggaggaggaagaggagattgcagtaagcaggaggagacggagagggtgatgaggagcgtggacgcggaggaggcgtgcgcgctgctgagctcggggaggcaccaatacctggacgtgaggatgtgggaggactttgacaagggccacgtcgccggcgcccgcaacgtgccctactacctctccgtgacgccgcgcgccaaggagaagaacccgcacttcgtccagcaggtggccgccctctaccacgcccacgaccacatcatcgtcggttgccgctccggcgtccggtccaagctcgccacggcagaccttgtcgccgcgggattcaagaacgtgaggatccttgaaggcggctacctctccttgctccgcgctgctaatcaacaataaccgcacccgagcctgattttttacctacagatcatgcccactaattatataatactacggaggagtactactttttcttcgggggtgattatatactaatactatacttgtcgctcgctacagattattgagatgtggcagcttgattattgctcaagacaagacgacgatcgaagcagaacatagttcaagatgtttccgatcgatccatccatcggttgaatgtatatgcgactatatatgttcggtcggtcaaaatatgtaaataagtcgaccttaattgcttgagagaattgatggagcactataccgactgttgtcctccaccgcgccggagccgcctcgcctcgacgcctccgttctccaccgcgccggcgcgccggcatccatcgcgctgcggccgctctagaggtcccagctacgacgcctacttcctacgtcgttgttcctctactacactgttactccctcattctcttcttcctcgatcacaatcggcgcaccactctcctcttttcctgcggcggggccgggacccgtgcgcccttgtggcgcggcttccccccgcttctggcctcggtccacactgttgactggaaaaccctggctaacccaatttaacggttgggaacatgcccttagccagttggagatatcaacaggccgcccgttgccctccaaactttgcgcttctatgggaaaggtccccacttatagggtactatatgcgaattgttgttttaacaataaaccatcacgtaaaatcgaatcaagtcttactatgataaatagtgaccgggggtctgctcgagatgatgtgcacgtgcgttcattcatccag

SEQ ID NO: 71286 - DNA, 451 bp, Oryza sativa
  Clone ID: PAT_MRT4530_71775C.1
ccgggctgcaggaatcggcagaggtgaaatggaacattgtctggatacgtatgtagactgttttcatggcatgtgagccgatgccgaccacatactgatgttttgctagtagtccatcttggcaaagctgtgaagccatataggcaatgccctgctttgaatgctaatggactgaaaaaaatgtctctctaacggttcggtaccttggtaaaatggggttctgatcagtggagatgagacattaagaacactttaccacctcttcagtttttgattaattcaaggctttggtctgtttaccaaacctgtagtccatcttggcaaagcggtgaagcctaatcggcaatgtcttgctttgaatgctaatggactaatagcaaatgtatctcacggttctgcaccttaccaaattggggttcacatcagtgtagatagagacactaacagtgta

SEQ ID NO: 71287 - DNA, 158 bp, Oryza sativa
  Clone ID: PAT_MRT4530_71776C.1
gcgagtacgcgtccgagagatcagggctaacagtgagagtgacgctgaccaactaacaaagcgcctcttttggacgccaccaacagcaaacaatgcactactgattgaggacaagcactgacttgaccagatcagcgaaaggctacgcataggaagat

SEQ ID NO: 71288 - DNA, 363 bp, Oryza sativa
  unsure (1)..(363): unsure at all n locations
  Clone ID: PAT_MRT4530_71777C.1
ccaacagtaagtattcaaagagcaatttcatatgctctgataagttaaagtgtcaataacatgtcatgatacaatccccatcaagagccctaagtgttctatttacattgtaactctagttaaagagattaatcctagtactagtgtactggtacagtacaacggtacaagtaccagatctatgacacgtgtgtagtatacctttacagttccccgtttcccgctatgacgcggcacaccaaaaatttcagcgaccccgcttcgacggcggcggcggcggcgccgccgggcggnggactacgtggcgacggccgnccagnagcctggcttgcaggccctggccggcgtgctgatgatccgggc

SEQ ID NO: 71289 - DNA, 472 bp, Oryza sativa
  Clone ID: PAT_MRT4530_71778C.1
actagttctagatcgcgagcggccgatgaagatctccacgaggcttcgggggagcaccagctttttccgccacaggatcgccgccaccatggggtcctcctcctccttcttataagatcatcttctccgccacagcattctgtaaatatatccacatcgaacgcgacaagcgcgtttgattgatgggatttttctcccctctcctaacgacaagtaattaaggcgcgcgatctcgatctctagcgttgagaacttgatccgcgatggagtccggccggttcatcttcagcacggcgggctccggcgccgtgccgccgtctcccctccgtggttcagcccaggtaacgaatagcttcctaaatggctaaatcgatttgtgaagtgtgattagagattagtgagtctgtgaataactgagtatgcaatttataaattgttactgattagtgaatatatgatgatctattgaatc

SEQ ID NO: 71290 - DNA, 1402 bp, Oryza sativa
  Clone ID: PAT_MRT4530_71779C.1
aaaaagataaactggaatgataattcccaaactgaccggatacaaaaacgttgaatttcccgagtcctacaaccaatcatatataccagttgctcactactatgctccttaatcctgaactaccgagaggatgtatgtacacgaacttgattgtctgctaaaggttgaccaatttgctgtcatagatgagcctcggtttgcagaaaaattgagtctcaaagcattgatcttgattaacaatcaccaattgtggttcttcagcgagggctcatgatgaattctcatatctgtttccattcctgagagctggccaagaaacatgcagcacaaagttggcaggatcagcaggcaacctgtcaccatcatccggggatcttgcgcagttcaaccttcaagtgattcctagattatgttcaatcttcaaccgcggtgttgaagacaaaactagggaaaactgtcgtgatgtcccttagataaggcagtgtcatgttcttcaatagatttttatgttttggccgctttttttttgaacactgtatcaaaaatcaacgtgcatataatatccattcaacagaatcgcatctattacaagccttccattataggacgccgatagtgcagtgctgcataagacaatttacactgtccacatgcgttgacattactacagacagtaagactcaaaacgacaacacgcatacattacggtacagagcacaaatataaaaaggttacgtttattcgccttaatttatcttaagatggtaggattatataatatatggcaaacacaaacggtgactgggcaaaccattgcacctataccctgacgagaattcaacagggagaaaccacaccacgttctgatatccatggcccttgattttttccatcaatgttggaccatgcgtaaccagggttatgatgggcacatccccattgaatttttgccacggttctttagccttccttggattcccggtgcacgaagaaggcgtagaagcccccaaggacagtcgcgccggccatcgcccaaaccagtatttgcacgggcagcggcatgatcgccgcgaccttataggaaaaaacaacggtgagcagcgtcgtcaggatccacacggccgccttgaggttccccctctcccgcgagttgggctccgccttctcgaacatgcgcaagcagacgaagagcagcacgaggtcgatgtaggagaaggacacgaaggacacggcggcgaggtcgccgtccgagcggtagatcgccatacctgaattgaaagttagaaagacaaaaccgagggccgtcagccaggagaaaccgccgtcatgttcgccgtcggccggcgcaaccgcgcggtcaccaccagcagggcggccggcgactccaagaaatcccggccgg

SEQ ID NO: 71291 - DNA, 327 bp, Oryza sativa
  Clone ID: PAT_MRT4530_7177C.1
atgtcgacgtttgaggtcacgactacggtatttccatggtatggagatcgtcagtaccagggtatatacgagattgaagtaaaacagatggagacaagaatttttacacaggttcgggccccttatctggcagaactctacttgtccttccttattcagaacttcttctatatacgaggtatgattttgtataagacttggtatatgtgctctcaagatgggccattgaaggatgtgcgatatgaagatgatatgaagccatatccctttggtctatatgtcgataatttaagtcctaatccttcatcttctacaccattccattag

SEQ ID NO: 71292 - DNA, 665 bp, Oryza sativa
  Clone ID: PAT_MRT4530_71780C.1
gcggatgactgcattcatgttggggacggactctagaacatgccaagaacagatcctccacataggggtcaaaatgtgccggtgccatagggacatgcactattctttgcatgaaaacagaagccggacccccccattgaagacccatctattccatggataagacactgccctaaagtgatggtgagtgtttctcagaccataatggcatacccgttcgtgttacatgttcactgatagggtaagaggttcaagcctggtatatatatagtgctgggccgaaatttttcgtcatggtctgattgcttaaaagcaaggtcaaggtgacccagattcccagaagattatattagtactgatcaggaattcagttctgtcgtttggaatgcgcacttgcacaccgactacgcaacatataattaatctgctactgcgcctttcgtgtgcatgctttgccttttcttttgtgcacaatacggttcatgtttgtggctctgcgagcaacattaaccttaaaggcttaaagcaccccgtggtccagattagtgtggtgctgagccgtgctgacaaactaagctcaaatctcacgtaggaatagcagtggaatgtgtagttttcaccatggattctcttttcctccatttgttcaagcatctttcttttcc

SEQ ID NO: 71293 - DNA, 464 bp, Oryza sativa
  Clone ID: PAT_MRT4530_71781C.1
ttttctgaagtcaggttctcagtgcccaggctgccgtttcatatgagagtgcaagagcaaaagttgcagattctgtcaatgccactaatatgagagagattgtttttacacgtaatgctactgatgctatcaatttagttacatatacgcggggcatgctcaacttaaaacaaggtgattagatcgttgttactattgcaaagcatgataagactgttgacgcttgacattttgcttcccataagactggagctactttaaagcatgatgggctaaccaaaaaaggagttgcagacattgagcaattgatatgtcttgtgtcatacaagacgaagattgttgttgttcatcatgtctcaaatgtactcggttcaatgcttcctattgaggatattggaacatggtcaaacagaatcggtgctaaagtccttgtccatgcttgtcaaagtgtttctcatatgcct

SEQ ID NO: 71294 - DNA, 230 bp, Oryza sativa
  Clone ID: PAT_MRT4530_71782C.1
ggatggaaagggcacaaaagggcccaacaagaacaatgatccaaaaaattccctatttattgggggcgatctttttctaacttactacaagatattggaatctttacaatacaatgcgctaaccggaaaaaagggggctacttttgcaccgaacgtgttctaaagagtttctattggggttctacattgatgcagtttcctcacatttttaagggtcagggtcggcccaa

SEQ ID NO: 71295 - DNA, 425 bp, Oryza sativa
  Clone ID: PAT_MRT4530_71783C.1
acggatgtaagtgcggcaccagctgctcctgcaccgactgcaagtgccgtccagggaagtcacgaagcaaccgaacactgttcgccggcgagtcacttaccttaattagcccacaataaaaaccacccatatgagtgtggtttgtgtgtgtgctgattattgctgaattaaacccgtgtgttatcgattaattagcagtggtgcttggtgactatctgatcaacgtatgatttggtttgttacttctatctagtaatacttcgttttttgggtgtatttatttttatattggtgcgtttaattttttctttttttaattgtttattttcttttttttcatttttttatatttttacttttattttctttatttttttttgtgtttttttttttttttttttttttttttttcttttttttattta

SEQ ID NO: 71296 - DNA, 1972 bp, Oryza sativa
  Clone ID: PAT_MRT4530_71784C.1
cccgggctgcagcccgcgctttcgcgagagagagcgatacgaacaagagaaaatcttctccagacaccgcggcgggcttccccaccccatcggaaggaagaagacgaccagctcgcgcgctcggatctcagccatggagaaggcgatcgatcgccagcgcgtcctcctcgcccacctcctcccctcctcctcctccgaccaatcgctcctctccgcgtcggcgtgcgccgccggggacagcgccgcctaccagaggacttccgcctacggggacgacgtcgtcgtcgtcgctgcctacaggacacccatatgcaaggccaagcgaggaggtttcaaggatacatacccagaggaccttcttactgttgttctaaaggctgttctggacaacactaagatcaaccctggtgaaattggtgacattgtagttggcacggtgctaggtccaggctcgcagcgtgcaatcgagtgcagggctgcggctttctatgctggagttcccgaaaacgttcctgttagaactgtcaaccggcaatgttcctctggattacaggcagtggctgatgttgccgcggccattaaagctgggttctacgacatagggattggtgcaggcctggaatccatgtcagtaaatgctatgggttgggaaggacaagtaaaccctaaagtaaatgaagtccagaaagcacaggattgtcttttgcccatggggataacgtccgaaaatgttgcgcaccgatatggtgtaacaagacaagagcaggatcaggctgctgctgagtctcataggagggctgctgcagccacagctgctgggaaattcaaagatgagattgttccggtgcctacaaagattgttgaccccaagactggagaggaaaagaaagttgtgatatcagttgatgatggaattaggccagggaccacagcatctggattggcaaagcttaaaccagttttccggaaggatggtaccacaactgcaggcaactctagtcaagtgagcgatggtgctggagctgttcttctcatgaggagggacgtagcgatgaagaagggacttcctattcttggtgttttcaggagctttgctgctgttggagtagatcctgctgttatgggtgttggtcctgcagtagcaataccagctgcagtgaagtctgctggactccagattgaagacattgatctgtttgaattgaatgaggccttcgcttcgcagttcgtgtattgctgcaacaagctgggactggacaggtcaaaagtaaacgtgaatggaggcgcaatcgccctaggacatcctcttggtgcaacaggtgcccggtgcgtcgcaactcttctgaatgaaatgaagcgccggggcagggactgcagattcggtgttgtcaccatgtgcattggatctggcatgggggcagcagctgtgtttgagcggggtgactcggtcgaccaattctcaaacgtgcgccaccattagcggcagttttctaagagaaatgcaaagcaaagcagtggtgcaaaatcatcatggtggtcagtccaatggagcatactctggcagtaagatctataccgaaaactaaatgcaggaaacacgtaatcttctccggtgaaaggtgtaacagtatattgaagatcttttcatgtaacattttgcactaataataatttatgcgaataaggggcatgcatgctcaatgtttgttttaaaaaaaaaaaaacacgaaacactgagaggagcacagtggttgcaaatgttgaagggcctgataagggtaggcctgatcatggataatttggcccaaatcaaatctggcctggcctgatcgttgtccaaaatacttagtactactttctctgtaaaaaaataatacagtataaaacaatttattttgcttgttaggacaatgctttaatcaccaactgctttattaatatattatatttatgtgacacagtttaaattcaa

SEQ ID NO: 71297 - DNA, 825 bp, Oryza sativa
  Clone ID: PAT_MRT4530_71785C.1
atggccgtcgtccatccctccctcagcggcagtggaggggaggacggcaaggacgtggcgaagcggcacggggcggcgtcgctcgccggggctcgtgctcgtcacggcgaaggagatggtgaggacggcggggcgaacgcggcagggagcggttgcggctcgggtttcatgacctccgattggggtgacacgatccagaggcttaactccgtcaccgccgcatcgtcaccgtcgcttcccctgctgaccgtcgtgaacaacaccgcgctattggcgcggtccccgacgaactcctcttcatccacggcttcgtcgtcagcgtctagctcgccaccgatctcagcggcttcatcacggcagcttctttctgaggcagctgctgccatcgctaatggcaaccacatagtggcggcttctctcttgtctgccctgaagctgtcggttaacccgcagggcgacgcggagcaaaggctggtggcgatgatggtggccgccctatcctcctgcgttggcacaagcccgtctcaacatttggcggacctctacatcggcggtggcagatacggcctggtcagatctagcggcagtggacccaccggtggtaggagtggcgacagtgactgcggcgagctcaggcagtggcaggctcgtcttgcgaccgcgcggatcccgccacctctcctccctcactcccttggcttcttctctcccaatggccactgggcgcagggtggcggatccagcctggtcggatccaacagcgtcggcaagcttgggcgacggcaagctcaaatggccggcgagcatgggatatgtcggctgtag

SEQ ID NO: 71298 - DNA, 147 bp, Oryza sativa
  Clone ID: PAT_MRT4530_71786C.1
atttatgtcaaattatgcaactgagtcaagtgtgcttgttgctatttgaaggtgcaaccttgaagcctgttaggggatgttaccattcggaggaataagcctgttatacttaatataaaactcattgggcttgagcgttgggatttt

SEQ ID NO: 71299 - DNA, 435 bp, Oryza sativa
  Clone ID: PAT_MRT4530_71787C.1
atggcagcagctgcctcagaaagaagctgccgtgatgaagccgctgagatcggtggcgagctagacgctgacgacgaagccgtggatgaagaggagttcgtcggggaccgcgccaatagcgcggtgttgttcacgacggtcagcaggggaagcgacggtgacgatgcggcggtgacggagttaagcctctggatcgtgtcaccccaatcggaggtcatgaaacccgagccgcaaccgctccctgccgcaaattattattctaatgcggcgcggtgtccattggcaaattaccatgtctatgaagtgttttcccccaaaactgaaatacttgccgtgtggatgccagggataactgtttcagctgcaggatatatgtacgatgtcttctacagtaaattgaatagcgatagcaatgtctcgactactagatcttaa

SEQ ID NO: 71300 - DNA, 881 bp, Oryza sativa
  Clone ID: PAT_MRT4530_71788C.1
accggcctgcaggaattcggcacgaggcaacgtccgtgcaagtagtgctccattattctagcaaagaaggcaagcagaattcatccgcttaaggatcagaaccagatcgatcagttcgatatatcgatcgacaatggttgttgcatcagcagcatcgccgtgcgagtccagtgcgttgttcgcgacgttcgaccacgacggcgacggcaggatctccgcggcggagctgcggctgtgcatgaagacgacgctcggggaggaggtgtcggacgaggaggcggggcagctggtggcgtcggtggacgcggacggcgacgggctgctgtgcgaggcggagttcgtgcggctggtgcaggcggcggaggtggaggaggaagacgagcggcggggcaccggcctccgggaggcgttcggcatgtacgagatggaaggggaagggtgcatcacgccgacgagcctcaggcggatgctgcgccggctgggctccgaccaggacatcgacgactgccgcgccatgatctgcaggttcgatctcaacggcgacggcgtcctcagcttcgacgagttcaagatcatgatgaacgcctaaaccagctgctatctgctgatccctccgctagctccatcagagcgcgcgcatccatcgatctgcagtacaagtagtgttcttgcagcgtgtcgtgtatatacacataggtgctgtaaatcatgctcagttcacttgattggtttaggtgtttatacatcattcatttcatttgttaataatgggatttatacatagtaaattcatttcatttgttgatggatctgtaaatgcttcatggatttattaaggaagatgatttgtaaatttgaatataaaaaaaaaaaaaaaaaaa

SEQ ID NO: 71301 - DNA, 698 bp, Oryza sativa
  Clone ID: PAT_MRT4530_71789C.1
ccggccgggaccgacctcacttccacgcccaccgtcgtcgactcgtcgtcgcgcgaattccgcgggaacaacgcgccgccgtccgccgtccgccggccgccgtctccagccacagatcgcccctccaccctggcaggaaacatgatcgtctgcgtcgccgtcgtcggccatcagaacaaccctctgtacctgcagagcttcacggaggcggacgacgccctcaagctccaccacgtcgtgcactgctccctcgacgtcatcgacgagcgagtgaacaatcctaaaaggaatgcgcctgcacttaacgagacatttttgggtcttctatatccgaccgagaattacaaagtgtatggctatttgactaacacgaaggtcaaatttatcatggtcacaactgatcttgatgtcaaagatgcagatgccagaaattttttcaggaagttccatgctgcatatgtagacgctgtttcgaacccctttcacgttccagggaagaagattgcgtcaagaagctttggtgcaagagtaagcacaattgtgaaatccttcggttcagggacaactgcctgagttccacttgttccaaatccccccttcaatcaagcattgtaccgttcccctttgttgacaattcatttctgaatctccatattgtcccctgtatgcatgctgaacaagatgataatttggcaatg

SEQ ID NO: 71302 - DNA, 505 bp, Oryza sativa
  Clone ID: PAT_MRT4530_7178C.1
acgaaaaaacggcgagcgggcaagagtggcaaaaaaaatgaaaaagaaagaggaaatcgagagcacggccgacgatccgaagactggagaggcggagacgagacaaggtcacggatccggagaggcggcgaccctcggtggtagatccggcgaggcgttcatcagagacggcgacggagagggatggagagatggaggcgtggtcgcgtggaggtggaggcgtggatcgacggaggcggaagcggagacggagcggtcaaggcggaggcggaggcgtgcgtggatcggcggaggcggctagggccgtgcctaccgttatacaggcctgggccgtgccggcccagcgtgctgctgcgggagcctaggcacggcccggctgtcgggctaggccggcacgggcacgaacactgacgggccgggccgtgcttgggccgggccaaacgcccgtgccttgggccgggccgtcgggctgcggtccatatggccatctatatgaggtttcaat

SEQ ID NO: 71303 - DNA, 228 bp, Oryza sativa
  Clone ID: PAT_MRT4530_71790C.1
atggcgtgtggacttggcaccggcaagtccccgccgcggcggccgcggcggtggcggtggcggcggcgctctaggggcgaggagacctccgctcccgagcgatacgagggggaggagagtgacgcggccagcgtggtggtcgagcggagccgatatatattgggccgctgttcattttgcctccttcaactcatgtccgacgtcctgctgctcctgtcgctccactga

SEQ ID NO: 71304 - DNA, 1314 bp, Oryza sativa
  Clone ID: PAT_MRT4530_71791C.1
atgggtgtggtgacaaggggcaagaagaggaggctggatgatgaatccagcaacccacaactggcgcctcgaggaggagaagacctgataagccgcctcccggacgatatcctcaccggcatcatcaccctcctccctaccaaggacggcgcctgcacacagatgctctcgcggcagtggcgccctctctggcaatctgcgcctctcaatcttgaggccagggtcaatggctgcacgttgggaaaggatgtggccaccatctacagcacgctgctaacccacagtggtccggagtttgaactgttctatgatagcgttggcgttcaaaatcctccggttccaccgtcggtactccgtctatcttctactctccgtgttctcaggattctttcaacgtgtgacacacttcagtttcccatggagactgcttgcacgctcgatttcccacacctcaaggagctcaccttatcccaagtcaacattgcagatagcattctccatggtattctttcacgatgcattgtcttggagagcttggtgctggatgcgaacaggggttgtagtcgtctccgtatcagctccttgacccttcaaagccttggtgtgtcagatacttatttctctgtagagggaatgctggaggaagtcattatcgaggatgccccgctcctggaaaggcttacaccaccagttatatggcatgaaggctttgttattcgggttattcaggcaccaaaactgaagacattgggttatctaagccagaaaatttccacacttcagcttggaaacatggttttccagaaactggtgcctgttagtctgtccaatgtgatgcgcgctatgaaaattttagcccttcacaccgctcctgatctggatgttgttattgacttcctaaaattctttccgtgcgtggagaagctatacatcgtggcattaaatcagggaaacttcaagaatgtacggcgatatgtttcacttgagtgccttgatctacatctcaagatggtggaatttattaactatcatggaaacttatcagatttgaacttcatcaagttcttcgtgttaaatgctcaagtgctagaatgtataaagtttgtagcctgtcgtgacaaatgtgatgcaaaatggattaaaacacaacatcagaggctacaactttattccagagcttcacgaggcgttacacttgattttcaagctgattatggggtggatagtttggtacacgtgaagcacatcagtgatttgattacagatgatccctttgatagatcgttctgtagatgccgtgatgaggaaatatga

SEQ ID NO: 71305 - DNA, 567 bp, Oryza sativa
  Clone ID: PAT_MRT4530_71792C.1
atgatgatgatgatgatgttgataccgacgaggaagagtccgagtcggaagatgattcaggggaggaattccatgccgagccttccaagaaagctgtctacaacaaggaggggatcctggagaagctcgaggacattgcgtggccggagaatgtggactggaggcacaagctcactatcgaacatgaccagggggagaaagtcgatgtgaacgacgatcttgctcgtgagcttgcgttctacacgcaggctttggatggtacgaggcaggcctttgagaagttgcagtctatgaaggtccggtttctcaggccggctgattactatgctgagatggttaagaccgacgctcacatgcacaagatcaaggggaggctcttgtctgagaagaagaagattgaggaggctgaggagaggaagaaggcgagagaggccaagaagagggcgaaggaggtgcaggcacagaaagaaaaggagagggccaagcagaagaaagaacagattgagtccgtcaagaagtggaggaagcagaggcagcaagggggctttgccaagggaaatgatgatg

SEQ ID NO: 71306 - DNA, 791 bp, Oryza sativa
  Clone ID: PAT_MRT4530_71793C.1
gtttttggttttttgggcgatactttttttttgtgctgttcttttcttatattatatcatcaataaatatacagtgggataacattcacataacacggcagaggcaacaaggaatcagtacttccgagaagtttcgtctccgtggtgcctcagggactcaaagaggtctccacccgtggcagacacaagaaacatatacaactcgaaagtatttattctgtgtcgcagcaaacctcaaatacacaccagttaccattcattcgatctggagcaactcccttccatatgcatcacagagactacgtactggagctgatcctcattatggatagtgcatatatcctgtgagtgtgctcttcaaattagaaccgtgcatatcacttgtcatccaattgtttttgtagaaagtcgagaaccgagagacgccgctgctcaagactggcctctccagattccagcttcaaattctcaaggcatttaattgcttcctcaaaaccctcaactgccatgctttcgttcccaagatttctatcgacatccgcaactttggcaagagaagttgctacatcaatgacctgggaagccacagctgagtgttcttttgctgcacttctgcgaacatccaacgaacgcgcataatagcttcttgctgagtggaggtccccatcataatagcgaagatctccaattttatttagtgaaactgagagagtatggaccaactccagatcttttttgggcaatttcgagaggaacccacgcgtccgcggacgcgtgggcggacgcgtggg

SEQ ID NO: 71307 - DNA, 208 bp, Oryza sativa
  Clone ID: PAT_MRT4530_71794C.1
cacgacttagtagatcaaactcgtcttcggctcagaagctatacacttcttaaaagggggaataatagcaaggctgagtacaaccaccgtactcagcaagccacaccaatgatgcagacgtgcaaggggaacgcaaggatgatttgtggctatttgcataaaggcagttgtaaaacattttgttgagcaaaacagtaaaactgttgaa

SEQ ID NO: 71308 - DNA, 744 bp, Oryza sativa
  Clone ID: PAT_MRT4530_71795C.1
gcatgtgatctcttaatcgggcatggccatcaatgaagcggtcgcaaggccttgatgctcatcatcgggctcgatcctttggatgtcagcaccacccaatggccagtccttaaagcgcaatatgcatgccttgcagaacttgtgggagcacggggtgcatttgctgctttgatgtagcagagcgtggcagaccatgcagctgagtgggccaagcttgaaggtgttggagtcatagccaaaggggcactttggtggcaccacacgaggatcggtgttagcattgccagttttttcattgtcgtcgtcgtcgtcgtcggtgtgattgatggtggttttgttgtctgatgatgattttacggggcatgtggcgccagcggaggcgagtttggcaaaggggcatagagagctcataatggggttggtcgtatctatcgtaggtggattatttacgtacgtaggaggagaagagaaggaaggggcgggcgtcggcgagaacctgggcgccgagagggagaggagagattctgtgtccgcgagcggatgagaggggatcgatttgattgattcctgcgccgctgctgcctcgggagatgccgagagggagagggagagggaggaggaaggcggagacgacgagaccgaggaggcacggccacgtgaagggggccggtggcagcaggcggatgcgggccggcacccacgcgtccgcggacgcgtgggcggacgcgtgggcggacgcgtggg

SEQ ID NO: 71309 - DNA, 484 bp, Oryza sativa
  Clone ID: PAT_MRT4530_71796C.1
ctttcccacccaccccagcgtcgccccacccccagcgccgccgcacgcccacctcccctacctctgccggcccgcatccgcctgctgccaccggcccccttcacgtggccgtgcctcctcggtctcgtcgtctccgccttcctcctccctctccctctccctctcggcatctcccgaggcagcagcggcgcaggggcgggtcaacggctcccagcgcagaggctgctcagtggctccctggcgcagcggctgcccggcggcgccgcggctcgggattcggctccgagctcgggacctccacagcggcgaggataaggtaaataataatccacctaagaccaaccgattatgagctctctatgcccgtttgccaaactcgcctctgctggcgccacatgccccgtaaaatcagacaacaaaaccacctcatgtcctgtcacagccaacaatcacaccgacgacgacgataatgaaaaaactggca

SEQ ID NO: 71310 - DNA, 1862 bp, Oryza sativa
  Clone ID: PAT_MRT4530_71797C.1
gcccaggtatttttttttttttttttttttgatagggcgatacaaaacatctgtgctgttcttttcttatattatatcatcaataaatatacagtgggataacattcacataacacggcagaggcaacaaggaaccagtacttccgagaagtttcgtctccgtggtgcctcagggcttaagaggtggccatcttgactcaaagaggtctccgcccgtggcagacacaagaaacatatacaacttgaaagtatttattctgtgtcgcagcaaacctcaaatacacaccagttaccattcattctggagcaactcccttccatatgcatcacagagactactggagctgatcctcgttatggatagtacatatatcctgtgagtgtgctcttcaaagaaccgtgcatatcacttgtcatccagttgtttttgtagaaagtcgagaaccgagagacgccgctgctcaagactggcctctccagattccagcttcaaattctcaaggcatttaattgcttcctcaaaaccctcaactgccatgctttcgttcccaagatttctatcgacatccgcaactttggcaagagaagttgctacatcaatgacctgggaagccacagctgagtgttcttttactgcacttctgcgaacgtccaacgaacgcgcataatagcttcttgctgagtggaggtccccatcataatagcaaagatctccaattttatttagtgaaactgagagagtatggaccaactccagatcctttttgggcaatttcgagaggaattcagcactttcttcatagtaagtgattgctgaaggagcatctcccaaggtccgacagcagtccccaagcattcctaacacagctccaagttgagaacacagttcttggttgtcttctttagatttcaactcttccctgatgtcttctgcacacatactgagccttgactttgcactttcaatgttctgtgcgcgaaaagccctcatcgcttgctggaccagaaaagctcctctctccatggagacatgctcgtaaatgaccttggtcttgtcacttgcggcttcaccatcgcctgcagcatgtgatctcttgattcgggcatggccatcaatgaagcggtcgacaaggccttgaagctcatcatcaggctcgatcccttggatgtcagcaccacacaatggacagtccttaaagcgcaatatgcatgccttgcagaacttgtgcgagcacggggtgcatttgctgctttgatgtagcagagcgtggcagaccacgcagctgagtgggccaagcttgaaggtgttgttggagtcatagccaaaggggcactttgctggcaccacacgaggatcggtgttagcattgccagttttttcattatcgtcgtcgtcggtgtgattgttggctgtgacaggacatgaggtggttttgttgtctgattttacggggcatgtggcgccagcagaggcgagtttggcaaacgggcatagagagctcataatcggttggtcttaggtggattattatttaccttctcctccccggggggaggggcgcaggctcgggcccgcggccccggccgccgcgccgccgggcggccgcggcgccaggctgcctctgagcggcctctgcgctgggagccgttgacccgcccctgcgccgctgctgcctcgggagatgccgagagggagagggagagggaggaggaaggcggagacgacgagaccgaggaggcacggccacgtgaagggggccggtggcagcaggcggatgcgcgccggcagaggtaggcctcgtgcccgtgccccgccgctgggggtggggcgacgctggggcctcgtgctcggcacgcgtcgc

SEQ ID NO: 71311 - DNA, 147 bp, Oryza sativa
  Clone ID: PAT_MRT4530_71798C.1
gccagcagacaaggtagtagtacaggcttctgtacgtacgtaacacacggagttaccaacatggctggggcctcagccaaggacgtcgtgaagatgctctacgtgctcgccacgtacggaaaagccgccggccacaactacagcaac

SEQ ID NO: 71312 - DNA, 349 bp, Oryza sativa
  Clone ID: PAT_MRT4530_71799C.1
acgccgcctccgtgtgcgcccgcgcccgccgccgccgtcggcgctaggatttcgcgtggaagagccgaacaggagcctggtagacacgacggacatggcctggagactgactcacagcacttatcaattccttaaggggtacaaagcgggtaaaacagcaattggctttcaaatacgacaccaccgaggcaccgccgtgccccatgaacgccatggtatcaccggcatgcgcgcgtggcgcattctacttggcctcgatgtctcgagcgatggtgcagctgcctacaggtcgatcggcttcgtcatcatgccgctcgccgtgccagctgaccacgtggggacagggtga

SEQ ID NO: 71313 - DNA, 257 bp, Oryza sativa
  Clone ID: PAT_MRT4530_7179C.1
taggcgggccctgggccaattcccctgtctgtccgactttgcaactggcatcgcacagatgcaccggtcttagagagctcatcggccccgctttgtcgagatgggaatggaggggagggccactcaatctgaagccctgcccggcccgcgcctcgggccctggggccgtcaacatcagcagccgaaaccgggccatgggcgcccttgtcctccccgtccagatagccagaccttgcgttgagagctagcgtctggca

SEQ ID NO: 71314 - DNA, 771 bp, Oryza sativa
  Clone ID: PAT_MRT4530_717C.1
atggtggagaatcatgtgtcaaaagaggattcaaagaattataaattgaggatgggctttgtggatggccatatttgtgcaatttgtgatgatggtggtaatttgatacgctgtgagggtgcctgtcgaaggtatttccaccgaaccatttccaatgatgcagattttaactgtgaaactctcaacatgagtcaagaacaagtggaatcatcaaagttcatatgcaagaactgtgtgtataagcaacaccaatgctttggttgtggagagttgggatcctctgacatgtcatcgggttcagctgaggtatatcagtgcagtaagagcagatgcagacgcttttaccatcctaagtgtcttgctgaatttgactctagtaagaacccaccagtttttgaatgccccctgcatgaatgctttgcatgcaagaacaaaggggaaaaatataacgaggaaacatgcaagaacaaggggcaggagagtatcaagaaaaaacaaggggcggaaaacaacaagaaaatgcacctggcattatgcaggcgatgtccaatagcataccatcgcaagtgcttgcccaggtgtgatatgtatttggcactatttgctagtgatagtgcccttctaaaaggatattttgttgacacggtgttctcttttttaggaatatttcctctgttcccaaaggttgtcttccaaggaaatggaaaactaataagggccaagttttcttctattgcctgtaagctttttgcacttcatcctttttgttag

SEQ ID NO: 71315 - DNA, 843 bp, Oryza sativa
  Clone ID: PAT_MRT4530_71800C.1
ccggccgccatcaccaattcatagcttccaacattttcatttcattcgtaatcaggttttccacagggagatggcaatgaaggtgtatgggctgccaatgtcgaccaatgtagcccgcgtactggtgtgtttggaggaagctggggaacaatatgaagttgttccgattgatttctcaattgctgagcacaagagcccagagcatacttcacgtaatccatttggtcaagtcccagctcttcaggatggtgatttaattctttttgagtcacgtgcaatttcgaagtacgtgcttcgtaagaacaactctgaactcctgaaggagcacaacctttctgacgctgccaaggttgatgtgtggctggaagctgagtcacaccatttcgatgagcccatgtccgtggtcatctaccaatgcctcatcctccctgtgtatttcggtggacaaaccgatgcgaaggttgtggaagagaatctggagaagctcaagaagacatttcaggtgtatgaagagcgtctgtgcaagttcaggtacttagctggagacttcctgagccttgcggatctgagccatttcccaactgcgtactacctgctggccacccctcatgctgctatgctcgatgagttccctcttgtgaaggcttggatcgatggcatgttggccaggccgtctgtcaagaaggtcatagagatgatgaaggcaactgcctagaaaaaaaataaatcgtgttgcttgttgtgatgatccttgtgatctctctaaaatgatgttgtctgagaggaagtgattgaataaaaacatggagcaggaattatgtttgggcggtttgcttcataagt

SEQ ID NO: 71316 - DNA, 483 bp, Oryza sativa
  Clone ID: PAT_MRT4530_71801C.1
atcctttctttaatttcggaaccatgggacctggctgcaccattgaagatgcttggatatgtcgttagatgattaattgcctccacgcggagcaaacaaattcacagattcccggatgtttgctcgctcttcttcagtaactggggctccttgaactttgacaagacttctgtccaagagcatttgagttcattttctgtgctgaagcttgacctatggtcaccaaacaggataataaagtgacggttcgttccggggttggtggatggcccgctcgcgccgccggccccgcgggccatgtgccttgcggcgctgccaggccctggtggcgtatacctgggtctttcctctgtaggggttgtgcggtgatcgctaccgtctctgcctgccctgggggtgttgcctcggctacatcttctgctgagaggtttcgggcaggtaaagaacacgtactgcattcaatgaactcaagtctgacactat

SEQ ID NO: 71317 - DNA, 1014 bp, Oryza sativa
  Clone ID: PAT_MRT4530_71802C.1
atgccgaagcccaaccatcgtgcccgctccgccgctgccggcggcggcgggggcggcgggggcccgatagacgcggattggaagtacttcctcgacaatgtccgcgaggaaggccactcctacgccgtccgcgtccctgccgacggcgccaacccttcctactacctccaatacgagaagcccctcaccaacggcgccgcctccacctcctcccggggcggggctgcacgcaagcgctgccggatggaggaggaggaggaggaggagagctcgtccggcgaacccgaacccgcacccgaccccgacattgaagaggactaccgcgtgttccttcagaacgtgcgcctcgttgggcatggcggcttcgtgctggagcatgagggcaatgtgatcaggtacgatgcttcgggcgcggcgctcagctcggatgagtcttccgatgagtccgtgatgggtgctccggagcccgatccgcgtcgacgaaaggcgaaaattgtggaggaggatcaggaggaggaggaggatgtgaagaatgaggttgccgttccgtctagaaagaaagattttaccatggtaaaagaggatcaggagaagaaggggaagagagtggtcgaccttcctgctaggggggaagatggtgccatggtggcggaagaggatcggaagaagaagctcagaaaagagttcaactttcattcctttcattctaaggggaaagatgatacaacaccagtgaaaaatctgaaggataagaagaaagaggttaaaaatccaaaggataagaaggtgatcaaggtggaagaggaagatgggcagttgcagattgtgccggctgtggagaaactagcgactacaactagactgacaaacttaagcaatggccacaaaaccgcccctcgtatcgcttcgtttgagtgttactggagtacttttgttggtgctcatggaagaagtgggtctgagacctgggatggctcagcaggagggaaaaacaaaatctgcctatctggttag

SEQ ID NO: 71318 - DNA, 782 bp, Oryza sativa
  Clone ID: PAT_MRT4530_71803C.1
atggcgagcaacggcggcgaggagaagagccgggtggcggcggggtacggcggggggagggtacgggtacggcgggtacgaggggcgggacgacaggaagtggtggccgtggctcgtgcccaccgtgattgtcgcctgcatcgcggtgttcatcgtcgagatgtacgtcaacaactgccccaagcacggcagcgcgctcggcgtttgcagaaaatgggagctcttgactggaacaaagttgttcatcagcaccaaggatggcgtctcattagctgtatctggctccatgctggcctaatccatttggttgtgaacatgctgagtttactgtttattggaatccgccttgaacagcaatttgggttcgttcgcattggtgccatatacctgctatctggttttggcgggagtgtgttgtctgcgcttttccttcgtaataactacatctctgttggagcctctggagctttatttggactgcttggatcaatgctttctgagcttattatgaactggactatttattccaacaaggcagcagccataataactcttctatttataatcgcaatcaacttggctattgggatactacctcatgccgataactttgctcatatcggtggatttgtgacgggcttccttttgggatttgttttgttggcaaggccacagtttggttggatggaacgacatgagttgccccaaactaatcagcctcccaaatacaaagcataccaatatgttttgtgggttgtggcattcgttttgctgcttgtcgg

SEQ ID NO: 71319 - DNA, 1227 bp, Oryza sativa
  Clone ID: PAT_MRT4530_71804C.1
atggccaaggcgatgcttagcttgctggtgcacctccacgccgcgctcctgttcgtcccggagcccgccggcgccggcgccgtgtacagcgtcgtgcgctacggcgcccgcggcgacggcgcgtccgactcgacgcggccgttcctccgcgcgtgggccgacgcgtgccgctcgccgcgcccggccacggtgtacgtgccgccggggaggtacctgcttgggcgcgccacgttcgtcggcccgtgcagcagccgcgccgtcgcgttctccatcgccggcacggtggtcgcgcccgccgggtacgcctgggacggcgccacggccgggcagtggatcacgttcgagtccgtcgtcggcctcaccgtctccggcggcaccctcgacggccgcggcgacgccctctgggcctgcaagaagcagcagccgcgcggccactgccccaccggcgcatcgtcgctgacgatctcgaacgcgaggaacgtggtggtggagggggtgaggtcggtgagcagcgagctgttccacgtggtggtgctgcagagccgcggggtgacggtgcggcgggtgacggtggaggcgccggcggacagcccgaacacggacgggatacacatccacaagtcgacgaacgtggcggtgtacgacgccgccatccgcaccggcgacgactgcgtctccgtcggccccggcaactccaacctctggatcgagcgcgtcgcgtgcggccccggccacggcatcagcattgggagcctggggaagcagcaggggatggcggtggaggcggtgcagaacgtgacggtgaagacgacgtggttcaccggcacgaccaacggcctgcggatcaaaacatggggtaactccaagcggggcttcgtcaggggcgtcacgttctcggactccaccatggccggcgtcggcaaccccatcatcatcgaccagcactactgccccgacggcggctgcggcggcgccgcgcgcgggagcagctccgggatcaagatcagcgaggtggagtacgccgacgtgcggggctcgtcggcgacgcccgtggccgtcagcttcgactgcagccggagcaacccgtgcagcgggatcaggctccgggacgtgaggctcacgtaccaggggaagagcggccgcctgcaggccgccggggcggtgtcctcctgccgcaacgcgcagggcacggcctctggcctcgtcgtgccgccgagctgcctctga

SEQ ID NO: 71320 - DNA, 1576 bp, Oryza sativa
  Clone ID: PAT_MRT4530_71805C.1
cccgggcgccccttcccctcccccccccccccccccggggcggcgcggtgtgcgcgcccgggcccgaccgctctgctctctctctctctctttctctctcgacgcctcgtcggggccaggaggcggagacagcaacggctcaccgcccggtgtcgcggaggaccccacgcgccagcgagacaggccctccacccaccgcggggcccacgccggtcgctgtctcctctcccttcctcctccgccgcatcatttcttcttcccctcgcttcgaagccaaacccgagctccggggaaaccactagtagccacttgagcttcttcttcgccactgaggggaaggggaagagggatcggaggagatggcgagcaacggcggcgaggagaagagccgggtggcggcggggtacggcgggggagggtacgggtacggcgggtacgaggggcgggacgacaggaagtggtggccgtggctcgtgcccaccgtgattgtcgcctgcatcgcggtgttcatcgtcgagatgtacgtcaacaactgccccaagcacggcagcgcgctcggcggctgcgtcgccggcttcctccgccgcttctccttccagccgctccgcgagaacccgctcctcggcccgtcttccgccactttgcagaaaatgggagctcttgactggaacaaagttgttcatcagcaccaaggatggcgtctcattagctgtatctggctccatgctggcctaatccatttggttgtgaacatgctgagtttactgtttattggaatccgccttgaacagcaatttgggttcgttcgcattggtgccatatacctgctatctggttttggcgggagtgtgttgtctgcgcttttccttcgtaataactacatctctgttggagcctctggagctttatttggactgcttggatcaatgctttctgagcttattatgaactggactatttattccaacaaggcagcagccataataactcttctatttataatcgcaatcaacttggctattgggatactacctcatgccgataactttgctcatatcggtggatttgtgacgggcttccttttgggatttgttttgttggcaaggccacagtttggttggatggaacgacatgagttgccccaaactaatcagcctcccaaatacaaagcataccaatatgttttgtgggttgtggcattcgttttgctgcttgtcgggtttgtggtttcactagtgatgctcttcaagggtaagaatggaaatgacggatgccactggtgccactacctgaactgcgtacccacatcgaagtggaagtgcaatacctaaggagtttagttttctgttgaattttcggcaaaaaaaaaaaaccgtagtattcagaggaccattttatgcttgtgtgtttgtagatatatgaacaaatttgtttatcatgtttgttctttactgtatcgcgatttgttcttcctgtaaatttgttccgtcggccactgaagtttatataggttgagcattctagttatttttatgctttcccgttaaaaaaaaaaaaaaaaaaaaaaaaaaaaaaa

SEQ ID NO: 71321 - DNA, 172 bp, Oryza sativa
  Clone ID: PAT_MRT4530_71806C.1
gtgagcataagcaacacatgggtatgaacgcattactcactgatgctaattgaagacatggccatgtcggacaagggcgggcctgctactgtgctgacaagagccagagcgtgaagaaaggtactcagatatggcgtcgtcataggggaagccgacaagagccactgcgagg

SEQ ID NO: 71322 - DNA, 1068 bp, Oryza sativa
  Clone ID: PAT_MRT4530_71807C.1
ctgcaggaattcggcacgaggggggaggagggggaggactgcagggggctcaggccctggcggcggaggctgctcgggtccatggcgctctcctggccctcggccatccgcctcgccgtcgccgccgtgctcctcgccgcggtcggcgtcgcgcttttcacgctccccgttgacaagattttgaaggactttctggtttgggtcaaggataacttgggtccatggggtcctctggtattggctcttgcttacgtccctttgacggtattggctgttccagcatccatacttacacttggaggaggttatctgtttggcctgcctgttgggtttgttgctgattccattggagcaacaattggtgcaactgctgcatttttgcttggcagaacgataggaaggccatatgttctctccaaatgcaaagattatcccaagtttcaagcggtagctattgctatcgaaaggtctggcttcaagattgtgttgttattaaggcttgttcctttacttccgttcaacatgttgaactacctgttgtccgttactcctgttggcattggagagtacatgctggcttcttggctggggatgatgcctatcactcttgcattggtatatgttggaacaacactaaaggatctatcagatgtgactcatggctggagtgagatctcaacaactcgatggattctcataatatctggcttcatcttgtctgttgttttgattgtatgtgttacaagaattgcaaaatcttctttggagaaggcattggctgagaatggagatgcaggaattccacagcttcctgtggtggcctctccctcggatttgcaacaaccccttgtgatcagaattgacacgtcaaatgaagatcatgagaagtgaatctgttgtttacaactttacatgtacattctttggctgttcaatctgtatcactttacactgtagtttttgccagatccattttgccagtaaaagaaaagaaaaaggaaaggaaaaattgtattgttaggtaacactacataatttcttaatccacgagataacatccacgagtcc

SEQ ID NO: 71323 - DNA, 1862 bp, Oryza sativa
  Clone ID: PAT_MRT4530_71808C.1
atgcactcgcaggcttccgccgcggccgagaaggcggtggtggcgccgtacgggtcatgggagtcgccgatcagcgccgccgccgtctccgccgccgggaggaccgtcgaggggctcgccgtcgccggcgacggccgactcctctgggtcgagacgcgccccgaggagggaggacgagcggtcctagtgaaggaagcggcggagccgggcggcgatgccgtggatgtgacgccggaggggttcgcggtgaggtccctggcgcaggagtacggcggcggggcgttcgcggtgcaaggggatgtggtggtcttctccaactacagcgaccagcgcctttacaagcagaccattggagataactcagcacaacctctgaccccagattacactggatcagtgctccgttacgcggatggtgtctttgatcctcacttctgtcgttatgtaactataatggaaggaagttccaatttaaactcagatcaccgaaaggatagctcaaatcccgtgacaacaattgctgctgtaacaataagtgacagagatgctaatgaaccaactgtgctggtcagtggcaacgatttttatgcttttccacgcattgatccaattaaaaggcgtatggcatggattgaatggagtaacccaaacatgtcatgggataaagcgcaattatgggttggatatttctctgagaaagggttttttcatgttttcccatactcaagtgttggtttactgcagaatggaaggtcatgtgctggagtgctagaccatgattcagggtctttttcagaactggacattcccttctcttctgtaactaacatagtttctggggatgggttcttctatgttgagggtgcatctgctactcttccagtgtcgattgctaaggtgacactggatgaaaagagaaaaacagcaactaatttctctatagtctggtcctcttcagaggatgttatgcaatatgcgtcctactttagtttgcctgaatttatggagtttccaactgtagtccccggccagaaggcttatgcttatttctatgccccgcacaatcatattttccaagggtcgtcagatgagaaacctccgttattggtcagaacccatggtggacctacagatgaagcacgtggagttctggatcttggtgttcagtactggacaagccgaggatgggcatttgttgatgttaactatgggggaagcacaggctatgggagaaaatttcgggagaggcttttagggcagtggggcgtcgttgatgtaaatgattgctgcagttgtgctacatttttgattgctgacttagcttcgttgagggcaggcatgcacaagtttgaggcatactacattgacaaccttgttgggaatagaaaggcttactttgagagatcaccgataaacttcgttgatagattttcatgtccaattatattgtttcaaggattggaagacacggttgtgtcaccagttcaggcaacgacgatatataaggccataaaggacaaaggccttcctgttgctttggtcgagtatgaaggggaacaacatggtttccgcaaggccgagaacatcaagtttaccttggagcagcagatggtgttcttcgctagattagtggggcacttcaaggtggctgatggcatcactccaatcaagatcgacaattttgatgaaccctccttgtaaaattatcactgatgcactttagtcctcgtgtcccatgatcaatatgtatatggctaggaagtgcacttacagatagagttacatatcgataaatcaaatgtaatctgttaacccagaacagagggaacgaaaatcggctaagagtgacttagcagcgggtg

SEQ ID NO: 71324 - DNA, 360 bp, Oryza sativa
  Clone ID: PAT_MRT4530_71809C.1
ctgaagcattgcacgtaatcatcggggtttgcgaggtaaatctcgtgatggagatacgcccgtactactaaaatcctcattagtgaggtacaaccagcataatttgtgctatcctcacacagattaagcagcatgcgtggtgagaaatgtttctacgtcgcggtagcaggacaggtccctccagtttgtcgattggaagtattcgcctctgggtcacagatgttgggcgatgagtggggatcacataataaaaagtggtgctgcatctgatgggcgtgggcggcgtcgttacgtgctgctgcatccgcaccgagtcacgctctgcctggtagcaatcggacacatgttcggtcctactac

SEQ ID NO: 71325 - DNA, 306 bp, Oryza sativa
  Clone ID: PAT_MRT4530_7180C.1
atggaggcgtggtcgcgtggaggtggaggcgtggatcgacggaggcggaagcggagacggagcggtcaaggcggaggcggaggcgtgcgtggatcggcggaggcggctagggttagggttagggttgtgagggaggcggactggcggaggcgagaggacgcggcggcctttatatatgaggcgcgggcgtgcggcggcggctcccgatgggcctcgtcaggccgtgcctaccgttatacaggcctgggccgtgccggcccagcgtgctgctgcgggagcctaggcacggcccggctgtcgggctag

SEQ ID NO: 71326 - DNA, 190 bp, Oryza sativa
  Clone ID: PAT_MRT4530_71810C.1
acttcggcacgagcacaagttagcttatcaccatcagaacttgtccaccagtgccccagcagtagaagcgcatcttatcacaattggtggtaaatttagtggaatggatgaacatccacgctaatggttgctgaaagctgaaatgacaatttgcataacatttcagtatttcttctcaagttctccaatt

SEQ ID NO: 71327 - DNA, 351 bp, Oryza sativa
  Clone ID: PAT_MRT4530_71811C.1
atggcgctgagcgaccaaacgcagtatgccatggtcatcttcctcccggacgcgcgcgatgggctgcgcggcctcgtggagaagatcgcgtcgcggccggggttccagcacgagcaccagctgccggcgagagagaaatttctgaaattaccaaaaggtggggctccggctgccgttctcaccggtgctagcttcccggccgacctgtccggcatggtggaggaaggtcgacgacggccaccaccatgttttggtatggtcgccgcgccggctgcgcaggaagacaaccgcgccacctccgacggcggtggacttcgtcgccgatcatccgtttgcatacgtcatatatag

SEQ ID NO: 71328 - DNA, 121 bp, Oryza sativa
  Clone ID: PAT_MRT4530_71812C.1
gcacaggtaactgtccatgtgaccattcacacagtacattggtgctctttatgccctggagagagtagcagtgtgtagactcttatgagtgccaattcttttatgtttgtcgttcgcaatt

SEQ ID NO: 71329 - DNA, 2502 bp, Oryza sativa
  Clone ID: PAT_MRT4530_71813C.1
atggaggcggcggcgccagccatgctggcgccctcctccctggggcggcatcgtggcgccctcctcctgccacgtcggttcgcgtgcgccacgaacacgctaaagagaacaccctcacgtgcccctgagctggagcacggagaagaggccatcagcagttcagcaccatacgtggccgcccccaaaaccgacggctcatggagaaagacattttgctggaagctcatggagaaagacattttgctggaagcaagcagcatcttcaggctttcaccagtcccggattaccgtaatcgtgagccactgtcattgatagtaggcacaataaaggtcaagcacatgaaatgcttccatgaaccggagctaccgtccacaatggcggcgtctgagatgccgagctcgttcgatttttaccatgagtggtacgcttccacggtgaagtcgctcgacgaggaggaagccgagctgatggccgaggcggacggcgtgctggccgtgatcccggagacggtgttgcagctgcacaccaccaggagcccggacttcctcggcattggcccggaggtcagcaacaggatatggtccgacagcctcgccgaccacgacgtcgtcgtcggcgtgctcgacaccggcatatggccggagagccccagcttcagcgacaagggcctcggccccgtgccggccaagtggaaaggcctctgccagaccggccgcggcttcaccacggcgaactgcaaccgcaagatcgtcggggcgcgcatcttctacaacggctacgaggcctcgtcggggcccatcaacgagacgaccgagctcaagtccccgcgcgaccaggacgggcacggcacgcacaccgccgccaccgccgcgggctcgcccgtgcaggacgccaacctgtacggctacgccggcggcgtcgcccgtggcatggcgccccgcgcccgcgtcgcggcctacaaggtgtgctgggcgggagggtgcttcagctccgacatcctggcggccgtcgatcgcgccgtgtcggacggcgtcgacgtgctctccatctccctcgggggtggcgcctcccggtactacctcgacagcttgtccatagcgtcgttcggggccatgcagatgggcgtgttcgtcgcctgctcggccggcaacgccgggcctgacccgataagcctcaccaacctgtcgccgtggataaccacggtgggcgcgagcaccatggaccgtgacttcccggccacggtgacgctcggcaacggcgcgaacatcaccggcgtctcgctttacaaaggcctgcgaaatctgtcgccgcaggagcagtatccggtggtctacttgggcggcaattccagcatgccggacccccgttctctgtgcctcgaggggacgctgcagccgcacgacgtctccgggaagatagtgatctgtgaccgcggcatcagtcctcgggtgcagaagggtcaggttgtcaaggaagccggcggcatcggcatgatacttgccaacaccgcggcaaacggcgaggagctggtcgccgacagccacctgctgccggccgtggcagtcggcgaggcggaaggcattgccgccaagagctacagcaagagcgccccaaaaccgaccgcgacgctcagcttcggcggaaccaaactcggcatccggccgtcgccggtggtcgccgcgttctcgtcccggggaccaaacatcctgactctggagatcctcaagccggacgtcgtcgcgcccggcgtgaacatcttggccgcatggagcggcgacgccagcccgtcgagcttgtccagcgacagccgtcgcgtcgggttcaacatcctgtcggggacgtccatgtcgtgcccgcacgtcgccggcgtggccgcgctgatcaaggcgagccacccggactggagcccagcacagatcaagtccgcgctgatgaccaccgcgtacgtgcacgacaacacgtaccggccgatgaaggacgcggcgaccggcaaggcgtcgacgccgttcgagcacggagcggggcacatacacccggtgcgagctctcacccctggcctggtctacgacattggccaggccgactacctggagttcctctgcacgcagcacatgacgccgatgcagctcaggaccttcaccaagaactccaacatgacatgcaggcacaccttcagttccgccagcgacctcaactatccggccatctcagtcgtcttcgccgaccagccatccaaggcgctgacggtgcgccgcactgtcacgaacgttggtcctccatcttcgacgtaccatgtcaaggtcaccaagttcaagggcgccgatgtcatcgtcgaaccgaacaccctgcacttcgtaagcacaaaccagaagcttagctataaggttacagtgacaaccaaggccgcccagaaggcaccggagttcggagccctgtcctggagcgacggcgtccacattgtcaggagccctgtcgtcctaacatggctgccaccacagtga

SEQ ID NO: 71330 - DNA, 294 bp, Oryza sativa
  Clone ID: PAT_MRT4530_71814C.1
atggaagtgaagaaaccagtcggcagcagatgtagacagcttgcgttgaaggtgatgacgcctaattgcggtggcggcgacgtggccagccgtgaagacgatagcaccagttggcgtcatacgaggtggccggtcggagaagatgtagacgccctacaaccgcgacataataaaccagccgtgcaggcggagacaccagtcgacggtggcgaagcccccgactcactagtcaacggcgaaccagttgatgtagtgaggcagaggaaaaggaaaatatcatataaagaaaattaa

SEQ ID NO: 71331 - DNA, 2399 bp, Oryza sativa
  Clone ID: PAT_MRT4530_71815C.1
tagtggatccccgggctgcaggatctgtgaccgcggcatcagtcctcgggtgcagaagggtcaggttgtcaaggaagccggcggcatcggcatgagagttgccaacaccgcggcaaacggcgaggagctggtcgccgacagccacctgctgccggccgtggcagtcggcgaggcggaaggcattgcctgccaagagctacagcaagagcgccccaaaacctgaccgcgactgctcagcttcgtgcgtgaacggggactcgtgcatcctggccgtcgccggtgtgtcgccgcgttctcgtcccggggaccaaacatcctgactctggagatcctcaagccggacgtcgtcgcgcccggcgtgaacatcttggccgcattgagcggcgacgccagcccgtcgagcttgtccagcgacagccgtcgcgtcgggttcaacatcctgtcggggacgtccatgtcgtgcccgcacgtcgccggcgtggccgcgctgatcaaggcgagccacccggactggagcccagcacagatcaagtccgcgctgatgaccaccgcgtacgtgcacgacaacacgtaccggccgatgaaggacgcggcgaccggcaaggcgtcgacgccgttcgagcacggagcggggcacatacacccggtgcgagctctcacccctggcctggtctacgacattggccaggccgactacctggagttcctctgcacgcagcacatgacgccgatgcagctcaggaccttcaccaagaactccaacatgacatgcaggcacaccttcagttccgccagcgacctcaactatccggccatctcagtcgtcttcgccgaccagccatccaaggcgctgacggtgcgccgcactgtcacgaacgttggtcctccatcttcgacgtaccatgtcaaggtcaccaagttcaagggcgccgatgtcgtcgtcgaaccgaacaccctgcacttcgtaagcacaaaccagaagcttagctataaggttacagtgacaaccaaggccgcccagaaggcaccggagttcggagccctgtcctggagcgacggcgtccacattgtcaggagccctgtcgtcctaacatggctgccaccacagtgagcccctttggtgttgttgcattagacaaatcatgaagcagaaacatctgtgtcctggcttcagatatagcaagtctgatataggtcgcgtatcagcagcacagcagagttcacttagtgaagaaaagctgcactccaaaacaagctttattcctcactgtatccatgcttattccaattgttcagtagttggttgattgtttctacattacttcgtgtacaacacattggagcaaacagtagaatggaaacctcactagtaacacaaattagcttgactcccaaatggtgacaccatcacaggtgcacagcttcttgtagttctcgccaaccccagcgcttcttgcaatcacggcagctgcaatgccaggatctgatctgtcctcagtggcatacaacgcaatagagcggccaatcaagtcaacaactttcagtttctcttttgaagctgaaaattgggcttcacccttctctccagcttctagtgttcccaggtcaccaagaggcttattggatctataatccgatgggttatagactttgccagtactttctgcacctcttgtcaaatccccaaattcatttattgaccatccgtgtttaccaggtgatagaccactaaaagtggcttcaactatagccaattccatattaacttgagccagacgaacaacaccaaatataacaggccctttgaactcagctacagcagcagatactaaaaaatcatttgggttcccttgcccaattagacgagcatctcggcctgtttggtgcagagtatccagcattgtgttcactgggagagatccaagaaccctaacaacttgattattaaggtccacctcaatgtttttaattccttcaagagtttggaacttgtttttcactgctgtcacacaaccatcacatttcatatccaccatgaattccgtcatgagctccggaagcgcggcgcccttatcggcggcggcagagagatcggccgtggcggcggcggcggccatcggaggcacggcgttcggcttgcgggcggagccggaggccggggcagcggcgtacgcggaggagagggaggggagcgaggcgggcgaggggagccggagtctggaggaagaggaggagttggtggagagtgcgacggctgcgacggcggctgctgcgggcacagcggaggcggcggtcaaggcccggaggaagcccaccatttgtgccccccgcgttgttttatgcctcgtcgattctcctaccccgcctccgtgtgcagggaatttccacttggattgtgc

SEQ ID NO: 71332 - DNA, 253 bp, Oryza sativa
  Clone ID: PAT_MRT4530_71816C.1
atggagggccgcacccagaggcgagcatgcctcgaccatagcccacgggtggcatgcccaaaggtggatgtgtcctcaattctagggcaaatatcaagcgagagcgctgagagcgagagcgggccggcgcggagggccagcgcggcggggcggagggcagtgcggaggcggcgggcagcggcgcagcagtgggctagcgcggcggtggccggcgggcgcggagaggaggcggcagcggccggctggcgcctct

SEQ ID NO: 71333 - DNA, 730 bp, Oryza sativa
  Clone ID: PAT_MRT4530_71817C.1
acttctcgctttccagtttccactccacgagcaggtaccacagtccacactccacgcagctcactggaagcatgttaagctggagagtggagtgtacataagcagcagagcttgatctggccccaaatccaagctttgctcccaaaagctcctttgcatctatctattaaattattctccctttctcttctccatggatttttgcaaggcgagatggaaggttccggcgctgtgcctggtgactgttcttctccaagcaagcctctctgcttgcgcgccaactcccaagacttacatcgtgcagatggcggcgtctgagatgccgagctcgttcgatttttaccatgagtggtacgcttccacggtgaagtcggtgagctcttcgcagctggaagatgaagaggatgatgcttccacgaggattatctacaactacgagacggcattccatggcttcgcggctcagctcgacgaggaggaagccgagctgatggccgaggcggacggcgtgctggccgtgatcccggagacggtgttgcagctgcacaccaccaggagcccggacttcctcggcattggcccggaggtcagcaacaggatatggtccgacagcctcgccgaccacgaagtcgtcgtcggcgtgctcgacaccggcatatggccggagagccccagcttcagcgacaagggcctcggccccgtgccggccaagtggaaaggcctctgccag

SEQ ID NO: 71334 - DNA, 286 bp, Oryza sativa
  Clone ID: PAT_MRT4530_71818C.1
tcttataaagccgaccatcacaaccgcagggggggtgttgttaaataaattcgctgttcacccgctaccgcacaacggcgcaggctgggccacataaaagtgcccaacctaaaagatgatagtggccatgaagcagaagaccgatatgaatgaggagcttgctaaacagacaaaaacaacacagggcacagaatgaacagcgtgatacttacggcgaaaagcgcaaggaacaaggacctgggactaatctgatagctacactggtagacgcaaacacagacaccag

SEQ ID NO: 71335 - DNA, 407 bp, Oryza sativa
  Clone ID: PAT_MRT4530_71819C.1
aaactctccctaataaactaaggcccaaagaaaaaagctaaacaaaaaccacaaagctggccgagccccccccaccaggacgggggccccaaaaagggaggggcgaacaacacagggccggccaaaaaacccaaaaaacaggggaaatcccggggaaacctatagaggaccacggggggatttgggggggccacccaggcccctggggaaaaataaactcaagggggggaagacacactaaaggggggggggaagcccaaaaccagctctggaggcaccaagccgagccgcggggccccacccaggagggggaacccgcggaacaacggcggccccaggggccacgggggcccccgggggaacccaacctccggggggaaaccccggggtggcaaaaaaaaggggga

SEQ ID NO: 71336 - DNA, 1917 bp, Oryza sativa
  Clone ID: PAT_MRT4530_7181C.1
atggacgtttggaatgagtgggcgccccagatcctggttgtcttgagctttactctgcagctcttgctgctcctccttgctggaatccgtcagcaccggggagcctcatgtttgctgacggccgtgctgaagggcgtgctgtggctggcgtaccagctggctgattccactgcgatatacgccattggccacctctccctctgcgacccaccaccagagcatcagctggtgccgttctgggcaccattctacacctcggtggaccagacaacatcaccgcctattcccttgaggacaccaagctctggctccgacacttggtttctctcgttgtgcagcggcagccataattcgctccggctagccgctgtcttgatgttcaccgtaggtgttatcaagtatggggaaaggacatgggtgcttaggtgtggcaacatcgacaccatccggagttcactcaggaaggagccacgtaccaagtgctatttttatcttgaggatgagcctaggcagaggagctttaagagggaggccgatgaagaggaattcctcgtgcgtcatgctcatgccctatttcacatttgcaagtttgcggttgtggatgactctccgacggatgacaaggttggagatacccgtgaggctaatatatttaatgtccttgatgacaaagagaagtatgcactgatgggaattgagctatccctcctgtatgatgtattgtataccaagttacgtgtgatccatacctgcattggctattccatccgagtggtctcccctcttgccacggccggttcgttgctcatctttcagttcggcgacaaagatggtcaacacatagcagatattgctattacgtatgttttgctaactggtgctgtattcctagaggtgatatctgtgcacacagtgttgtgtaaaggaagatggcattgctttcgtcgcaaaatcgtttctctttgccaccatttcaaggtcatgggagtcaatagatacttcataccttcaaggcggaggttcggatccatggggcagtataacatgtttcacttgtgcactcgtcgtggcacgtcctacactcccattcttggctggttggtcaagttgttcggacaggatgacctgtgggaaagatatcattactcgggggatgttgaaattccagagaaggttaaagagatggcgttcaaacatattaatcggataaccgagaagggtgatgtgaataccatgggtgttatcaggaaaaactggggtcaacgaacaatggaaagattcagatgggagccgagcgacacatacatgggcgctgagtttcaggagggtatcattatctggcacattgccactgaactttttctctccagattcaatagagttaacgaccagaatgatgcagagcccacaatgcaggcgatcaaggcgctgtccaattatatgatgtttctcctagtcgcccgcccagatatgcttcctggccttgctcaaaataggctctaccaacgaagctggaaatttttgtatgaggaaatatggcctaaagttattgacgaccctacttatgatcatccttgttggattatccgaactatgttcaaggaactattcagcctgcagcgcgatgaacccaactctgattcttggcgcccgcaaggagagaagcttgctagcaaactactggaagtgtggagaaattatgtgaatgaagaagagggggtaatcttgaaacctgaggcttctcgtgtcatatatgctgtttctttggccgacaaactgaaggaagactcccaactgctcctagaaatgtggatagattttctagtctatgcggccaaccgatgcagcagggaatctcacgctaagaagcttaatgatggagatgtaatctgtaacgaagaaggtcgttatcgatga

SEQ ID NO: 71337 - DNA, 1143 bp, Oryza sativa
  Clone ID: PAT_MRT4530_71820C.1
atgtcggcatccttccccgaggcgggggcgagtacacggtcgcggccctggttgctagacgacgccgggggcaggtggaccaccaagacggtgtggatggacgacccgcggaggcctccccctgtggagatccccatcaacgcaaggcggctcaaccaccacatcaccaccaccaccatcacgctcggcggcgagctggccggtgccatgggctgggtcgatctctggaccggcatcctaatctacgatctcctccatgacgacaaggaccaagaccggccaacgcttcggcacatgccgctgccgctgccgatgcacgccatcaccggcaaccacgggatgggcgacaagctagccttaggctgcccacgctctctccgtggcattgcctctgtcacgaggcgcggcaaggcctgcctcaagctcgccggcgtgcatgtcaccggagagcgcctcccctacaacgacgctgaaacccagctgccggcgttcgccgtcgacgactggactgtcacgacatggagcaatgacaagatgaagggctactttgaggactggcaggaggatttcacgattcgcggttccgaggtcaggattagcaacgccatgcgctcggatctgctgagatctgggttgctgtaccgtaaaccgtcacgaggggatggcgatgaggctacggtggaggagctggctttgcacaatctctgggtgtctcatcccacccccagcctagatggtgaagaagatgtcatctacctgctggccaagccaaagtgcttccaccccaaggcgtgggttcttgctctcgacacgaggagcagcacgctgctaggcgtggttgagtttggcactgaaaccgcaccatctgcagttatggttcctccattgctgaaaatagataaagagaatatctactactccctccgtttcacaatggtgtacggcggcgcgcgcacccacttccccgcctgtctctcccagcagctcaccgccgatctctccgacggcagcgcgcgcgcaccccacttccgccctgcctttcctgcggcgcagcagctcgcgtccccgctccctccgacggcggcgggctcggccgctgcacggaggagaaagtgcggcgggtggggtttagcggtggcttag

SEQ ID NO: 71338 - DNA, 590 bp, Oryza sativa
  Clone ID: PAT_MRT4530_71821C.1
gaccgaaatttcccggccacgcgaccgccctcgcgtccgctggaaattctatcccgagtgaaaatttcaatggttttcaagaattcaaataataattcaaatctgatgaaatttgaccgaaatctagtgaaaaccagtcacggagaagagcacacaggaacaatgtttcgagcggttataaagggagccatccgctgaacaaactggccaaaagcgaagcagtccccaccccgaccgcgtgcacctgctctgttctcccacgcgcgcctcgcctggtctcctctcgagatctcgccatggacgccatcgactccgtggtggatcccctccgcgagtacgtcaaggacagcgttcgtctcttcaagcgctttcacaagttccaccgaaaggagttctcaaggtggcgttgcggaccggaacgggttcgtcgacatgggattcgtcggctttttcgtgaaacctatattttcatccccattaacaacatcatacgtcgggtcccggctagggctggcatgctcaaaggaaaagactcatgcatggggggataataggtgggaggtacctccattcaagggaggaaaaaccag

SEQ ID NO: 71339 - DNA, 508 bp, Oryza sativa
  unsure (1)..(508): unsure at all n locations
  Clone ID: PAT_MRT4530_71822C.1
gtgtttttttcagatagtttgcattgtaagccgaggggggttgtcatagatccatagggcttgtctagctttatggcacaatatgtgcacggggtgtaggcagctaccaagactaggttctaaaagactggggctatggttcaaaagaagcaatataattgagaactgatagctggataataattaaatactacataaactttcttaccacattgcatgatgcttaagggtttaaatgagcttatctttctataagaagtaaagtgggtcagcattatctgatagagaacattatcaaaacagcgcgatgcaatttttttaggacactgcaaattgacaactgatgttctcaaaatataactgcacaccgaacattaatgttgcattttgcattccatagatgtcaccctaatngntgtcttatgatgtcgtagaacaggaactgcagtggagatagttatgctggtcacgacatttctcatggtcccaataagctggtaggagggaa

SEQ ID NO: 71340 - DNA, 345 bp, Oryza sativa
  Clone ID: PAT_MRT4530_71823C.1
atggctgaggccgcagtcgctgacactcaagcttcaggcaacgtcaacagccaaaatggccagcccagcgctgggtgctcaagcaccacggcgaaggccacgccgctgctcgctaggcgcgccgctgatggcggcgctcgtcggggccgcggctacggctgccgcagcggaggtagcgccgatgcggacggcgccgctcctcggggccacggcggaggcgggatggttggaggcggcgctcgtcagggatgcgacggaggcgggctggccagaggcggcgccgatgctgtgaatgaccgcggcgcgacgcgtgatggagatggatcggaggcggaggcggcgtga

SEQ ID NO: 71341 - DNA, 477 bp, Oryza sativa
  Clone ID: PAT_MRT4530_71824C.1
atggtgaggacgcccggtggaagtggtgaaggggtggaggagcgaagcggcgaggttgagctgatcgacgcgggcagcggcgggtcccccccaaagcagcgtcggcaaccgagatccaacagtggcggcagggagaagggcgcgtcgactactcagagcgacttccgccgcgccgagctcgccgccgttgtcgccaaggaggacaccgccctccgtgctgccatccccgtccgccagcgcatcaccgtatgcgtctggcgcctcgccatgggagagccactcagcaataggacgcagtgctcccctcggcgcgggaatggggacaagagggatggcaaaaatgaggaggggatcccgccggccatcaccaccgttggcggtagtgagcttcccgcccctcagccacgcctcacccacggcccgcagccacgcagctctgccgatggcagtgacgaggagagggatgaagagtggtga

SEQ ID NO: 71342 - DNA, 345 bp, Oryza sativa
  Clone ID: PAT_MRT4530_71825C.1
agctctccctgtgccacgccaacacgacccattcaattcctcatattagcatctcggggctggggaatttaacgtatgcatacttatatcactaaccaagcctaccattggtcactgtcccatctatacattctttatatctatgctgcgatattacttcttttcgcatattacgtttcaaactcctctcactgctctacgatttctcttttgctcactctccccttccttttatctaatctcctcaatttccatctttctacctctccctctttcatctcacttccccttcttcttcttcctttctctcttccttcctccctatccccttcctactcttctttt

SEQ ID NO: 71343 - DNA, 372 bp, Oryza sativa
  Clone ID: PAT_MRT4530_71826C.1
atggccgccgaccgagcttcaccgctggcccaccgacgtgactgtcacattgtgacaggtgctcatttctctaccatgccagattatctggatggtgctactactgtagaggtggggaacataaatgcatttagtgtagggataggactaggaggaatcggagaacttgggagcagaatgcccactgaggcatggttggagttgtcccagccaactacatgtgagtctctactgtctgtctctactggccgtactcaagctccatacatggtccaactagctgggctggcacggtggagtgcatttgttcccttcaccgccgtaatctccatgatctgtgtggccatgcatggagaaattgtccagcaataa

SEQ ID NO: 71344 - DNA, 157 bp, Oryza sativa
  unsure (1)..(157): unsure at all n locations
  Clone ID: PAT_MRT4530_71827C.1
cacatcaaaaatctnttatagggggcggggataccaaaagaggantcatnttattcacatttatcaacttaactcccttaaanataatataaacggcatatactttaaaaaatcaatggggatctcataacatcactaagcatcattcactaatcat

SEQ ID NO: 71345 - DNA, 189 bp, Oryza sativa
  unsure (1)..(189): unsure at all n locations
  Clone ID: PAT_MRT4530_71828C.1
cggacgcgtggggggcagcctcggcgaccagtcgcccccatcgacgcatagagttcatcgtcggcgcgaacgtcctcgtcggcggcgcgttcgacggcgccgagcatgaacccggcctggtcagtcggaccggccctcagcagctggtcctgagagtcccagtgggtgtactgggatgncccactcatc

SEQ ID NO: 71346 - DNA, 552 bp, Oryza sativa
  unsure (1)..(552): unsure at all n locations
  Clone ID: PAT_MRT4530_71829C.1
gntgnnnnntctnggtgnngattcngccgagaaaaanggtngntgctgcatccaaanctttatcctaccgacaanacattattgaagaaaaaatccgtcngacatangccttacaggtnnnttatnttgctantataatatctctcnccnttcagantgnngaatcanattctcccnggncggngctctanttttcncccnatacacattttnaancnanncccacncatctgttttncntccnaactanagtttctgangtnatntgtggggnnnntcaagtgagggaccnncctgcncnctanagtatcnccccattggttagtaaatngncccccgtgtttncatgtatgtaaantnattttgggtnccncatcnttncnaccgccccccaaanaaaaatnggtgggttcngtccctcnactcnntcctctcnaaagaaatgaaatggnngttctntntccccatnnaaaanggannnnntttctcttccnccannanttcgnncnacnnncctnattgtgggtnaaaaaaaaacaaattcntccccng

SEQ ID NO: 71347 - DNA, 2515 bp, Oryza sativa
  Clone ID: PAT_MRT4530_7182C.1
atggcccagctgttgcaccatcaggactccgcgttttatgggaaggaactccatgggcgccgatggagcattcttcagttctttggcttccgtcgccgcctgcgatccactaagatgatctctgacaagaaacagagtcagggaaaaggcagtggtggaagtagacgccgaggttcatatgttccactgaaagatgaagacactagtgtcatggacgatgacaaacacactgagacaacaaagaaaaacaagtcttcaaaaaagagttctggtaagggaagtttgggctccttgattctaaaaaagctgtatggaaaggaaggccataaagaaaagatgcttcctgttgcaccgaagctactccgtaccctttcaatacattacctggaaagcaatgagtatgttcttgatggtgaatctgcttccaatggtgatggttcttcacaaagtattatgccaaattccacagatacaaatatccaaaatgctacattcaacacccaggatggttgcgataatgatacaagttcttcgcttctaaagagaggtgacattcatgtgaaacaaaggagccaccgtagcatttcaatggatggagttcttcataaggtcccttatggacataaggcatctgaagatgtaattaaagaaggactttcccggtcagcctccgccacatatgacagggatggtttgaaatcttatactgtaactgctgcaaaaagacctgtaaaccaaggttttcggcgttcacgttccctcactgaatcattggagaaatattctcacttgctggattctatttcaagcaaccagtcgaagaggacgctgacaagttcaaaatctactagggatcattctttggatgcgcctgctgtgatgactgggttgcagagtttggttatgactgctgaaaatctcgtgatcccagaacatgccttggcaccatatgttccagagagaattattgtggatggagatgtggatgctgctatggatgagatctctggtcataaggatgctgatggctctgaaaatactgtgttaatcgaagagtacatcgttgacaaaaagtgtggtgtttctgtgtcaactgaagctaatatatgtactccccctttactttcagaagtgattgatatttcacaggggcatgtagcaacttgtgatgacgatcagaagaaattgatgtcccagaagaacatggaacaacttgtgacgatgaccatactaatttgtcaacagaagcagtcaagagaaggtactttttgtgttcctcgtcccagtcaagaaattgaagctgagataaatctaagctgtgaacaagaaactgatagtccaatgtctgttcttgacatgaccttcccagatgatcctgctagtccagtgaaatatacaatcctggatgattcgtcgttgaagccaagagtcctccatttaagtgataccgatgattcagctgatatggatctcaataccagcacttccatggaactttcaactgctggcctgggtcacaaaaatgttcaagaaagtgactctgatgaactaagctctctccaagcagatccaaagaatgaagatgggttgatctatgtgaagaatatattcatgaaatcaagcttccgcaatgaagtactatttgatgaatggtgctcacagaacattacagttctccaagaagaggattgccaacactacgaggctgctgccgctgcatttgatttcactgagatgtcagctgatcagctacttctgtctgacttgacaaatgaagtgttgctcgacatctacaagaaatattctgtttccaagtccttgctctcccggttttcgtcttttgatagaccgaaacctgtgggaaaccatgccctcaaggaattgtggtctaaagtaagctgccatctggatgaacagccacagtccagcatagaaattgacacaattttgtcgaatgatctatccaagaacgatcactgggtgaattttcagagagatgctgatcacttggggaacatgttggcagactttgtgtttgacaggcttctgacagagttcactcttcagcttgcaaagttttgagcctagctagtttttttattttgcccctaaaaattttgttggtttagctgttctatatggtggaatgctattatcctcatgtatatattaacattctttctgttctctccttgaagagaacaaggtttggaggggtggttgtttacttgttagggcttaggaattcaattcatgtgctgaaaggttttgaaatttatatattgagtggggttgaaggagcattgtttttgcaccagtttttggaatgcgtaatcttgtagaagtaatgctggaaaaaaaataccagtcaacaaatggtgaggagcaggaattcatgtatctatctgaaagtttcctagacttctatcatgtcaaaactctgattctgcctaaaattccatgacagaagtgtaataataataatattataggtcagaaaaaaaaaaaaaaaaaa

SEQ ID NO: 71348 - DNA, 146 bp, Oryza sativa
  Clone ID: PAT_MRT4530_71831C.1
tgtcaatggagtattgaaaagtacctacagtcccatttagcactctaaatgtttctggaacatttcatagcatgtttgacaaaatgcatgagagaatgtgagtcagaagcagagtttgaggaaacatgggccatgatgcttaacga

SEQ ID NO: 71349 - DNA, 1001 bp, Oryza sativa
  unsure (1)..(1001): unsure at all n locations
  Clone ID: PAT_MRT4530_71832C.1
tagagagagatatggctagctaatccatgaganaggtctagatagagagagggaganatgatcagttcttcagaagaggctactactagctatctagcttcatgtttaactcttcttggtttgtgtttttgtgtgcttgttggagttgttaggaggaagagaggggtgagaggtgagctatgtgtgctcacttctctctctgtcagccatttgatctctctttctctctttctccctcatgtgttatactgttctctcatatctatcttctttgagatctctatgggttttggaggtctgacagaagagagtgagcacacacggtgctttcttagcatgcaagagccatgctgggagctgtgcgtgctcactctctatctgtcagccgttcaccatgcccaatatgattaatctccttctctcagttgacagtaatttctttgccagatctcctgttaaattttctncctagctagctattatgcacatgcttattatgatgagcctgccaatatcatctccacggcaaaacacaaactagctatgatttgattcattatatttcttttcgctgttnaattaattatatgcaggcatacactagctagtttccagctagtacaaagacgagacgaggtcgttctgacgattttcatagncgtcagaagaaggtgtgcattggttnaatttttgttcttggctgtcagactagatcatctctgaatgatcaagagccggatcaaataattattgtgagcaccgaaatcgatcatgcgtactctctctgtgaagtatttctgagaaataatatgagtgtagctagtatatatactcttgaagggtgtctaattaattggggtctctagctagctccttctctgaatctgtccatgaattgaatctactatgtatgtgctggtgcttactgttatttcatgtactacatataattgataaatcaatttaggctttcagtttctttaaaaaaaaaaaaaaaaaaa

SEQ ID NO: 71350 - DNA, 1108 bp, Oryza sativa
  Clone ID: PAT_MRT4530_71833C.1
cacggccgtattttacccaacggctctctttgcatttaaccacctgttgcttgctatttatacactgcagatgctccagagaaaatcccgctcttagcaagagtcctaactgtgctttgctttgcttgttgtttgacatgatactatagcatccactttgttcatctttttcgtttaactaatttcttctcttttttttgtcctttttctttacaattataagctgcttcgatctcgatctgttttggtcgattgagatcagcaagcaagcaaccatctttttatttttattttatttttctttcatacatctccacctattttttgctggttggagttcttctatttctcttttatcttttcatagtttcgatttgcacttcagcttttctgatctactcaccatcatcatcagcttgcggctgctcaggtcagatcagcttgtttcattcgcatctatagcttctttttttccgctcaaactgttcagatttgcaagcgagatcggtgccaatggagaacgcctttaaatcgttgagctcttcggcaaaatcgccatcgttcatggcttccaacaagcactatcacggcgtcgtcaaccaccagcctccgttcccacaaccgccggcgacgccaccgcagcctccgctcctgccgctgccggcgcgcccccatgccccgccgccgcagcagcacgccgcctggccggcgcgcgcagcgttccaagaaaccaagccacgccaccgccaccgccgccgccgccgccgcggcgctgggccccaagaagacggcgccggtgcccatccctgtacaggcggcgccgtcgaagaagagggcggcggcggcgagccagcaagaggcggcggaatggacgacgacgacggactcgctgtactcggtgtcgccgccgccgagctgcgttccgatgccgacgtccctgctggtcggtttttttgccgggaggaaggcggcgaccgcgtgcgccgtggaggtggccggcggtggcggcgtggtcgttcgagcgaccgacgagctccggcggctactccggctcttgcggccccacacgtgcccctgcttgcggcatcttgccttcgttgtttgctgt

SEQ ID NO: 71351 - DNA, 257 bp, Oryza sativa
  Clone ID: PAT_MRT4530_71834C.1
cgcacgcgtggtaacactctcaatcccacattttctttagtaagcatacatatgcatagcagggatgaatcaaatcaagaggcatacaaagaccatataacaaaacttcaaaccaattcaaaacgccacatttatctcagaacatttggcgccaacaccacagtcgctagccctatatggcaacagtcgatcattcatcattatttgtggaagcttactgtgctgtaacatcacaatgccaatcctttactgtgatc

SEQ ID NO: 71352 - DNA, 675 bp, Oryza sativa
  Clone ID: PAT_MRT4530_71835C.1
ccggccgggttatttgatgactgggacgccatcgtcaattcaattcacaggcttcaccattggccgaaacccaatatcccaaaggcgttgtaaatgtcggcactcgcaagtctcctcttgctcttgcccaaacccaaatcgtcgtcgacgctttgaagcaacgattccccgatcatgatttccctatccacagcatgacgaccaccggcgatcgcgaccagaacacagccctttacaactttggcggcaagggcttgtggacttctcagctcgaggagagactcgtcaacagggaactcgacatcgtcgtccattcgctcaaggatatgccgactgttctccccgaaggttgcgtcctcggatgtgtcacgtcccgcgaggacccgagagatacactggtgatcaagaaggaattgcaggacaagcacggttggaagacccttgctgatctgccggctggaagtatcatcggtacaagcagtgtacgccgcattgcgcagctggttcgacgctacccgacactcaagttcaaggaccaccgaggcaacattcatactcgactacgaaagctggaggaggacccccacctgacgggaattatcttggcagcggcaggtctgcagcgaatggatcttggtcaccatatcacacattcctcgagtccgaaaacggagg

SEQ ID NO: 71353 - DNA, 468 bp, Oryza sativa
  Clone ID: PAT_MRT4530_71836C.1
atggcggcagcagcggcggcgtgcggcgacagcagcggcgcggcggtggacgccaaggaggactgtgaaagtgaaaaggaggcccataaattgaagcgtatgttagaggaccacagaacgtcgttgtacccaggccccaagcaacctggtaacgacatcgatgtgtacctaacaccactggtcgaagatctgaaactgttgtggaagaaagaaagtgtccccgtgtgggacgaggacaaacatgaggagtttaacctacgagcgctgctgttcgtaaccatcaacgattggcctatacttagcaacgtatccgggcagtctaataagggtgggaaaacagtgtttgctatggtgaaagatcttaaagtagtgtttggaaaggggcctggcagccagcctattgatagcgaagatggtcacgcggcgatgtggaaaaagaagctctcgtttcgcgaaactgtgcagtaa

SEQ ID NO: 71354 - DNA, 512 bp, Oryza sativa
  unsure (1)..(512): unsure at all n locations
  Clone ID: PAT_MRT4530_71837C.1
agcgccccaagcaacctggtaacgacatcgatgtgtacctaacaccactggtcgaagatctgaaactgttgtggaagaaagaaagtgtcnccgtgtgggacgaggacaaacatgaggagtttaacctacgagcgctgctgttcgtaacaatcaacgattggcctacacctagcaacctatcggggcagtctaataagtggtccaagacttgcactcactgtatagatgaaacagaaagtacgtatcttaagcactgtaggaaggttgcgtacatgggtcatcgtcgattccttgctgcaaaccaccctgtacggaagaaaggcaatcactttgaacataaggcggaccaccgtacgaagcctaaacatcgcagtgggaaaacagtgtttgctatggtgaaagatcttaaagtagtgtttggaaaggggcctggcagccagcctattgatagcgaagatggtcacgcggcgatgtggaaaaagaagctctcgtttcgcgaaactgtgcagtaa

SEQ ID NO: 71355 - DNA, 1860 bp, Oryza sativa
  Clone ID: PAT_MRT4530_71838C.1
atggcggcggtggtggacttcctggacctgcgggcggcggcgccgttcgtggtggccgcgctggcgttctacttcctggtcgagcagctgtcctaccaccgcaagaagggcccgctgcctggcccgccgctcgtcgtgccgttcgtcggcagcgtcgcgcatatgatccgcgacccgaccgggttctgggacgcgcaggcggcgcgcgccaggaagtccggcgcggggctcgccgccgacttcctgatcggccggttcgtcgttttcatccgcgactccgagctgtcccaccgggtcttcgccaacgttcgccccgacgcgttccacctcatcggccacccgttcggcaagaagctcttcggcgaccacaacctcatctacatgttcggcgaggaccacaaggacctccgccgccggatcgcgcccaacttcacgccgcgcgcgctctccacctacgccgccatccagcagcgcgtcatcctctcccacctccggcggtggctcgaccggagcgccgccaacggcggcaaggccgagccgattcgggtgccctgccgcgacatgaatctcgagacctcgcagacggtgttcgcggggccgtacctcaccaaggaggcgagggagaagttcgagagggactacaatttcttcaatgtcggcctcatggccctccccgttgacctgccggggttcgcattccggagcgcgaggctgggcgtggcgcggctggtgcgcacgctcggcgagtgcgcgcgggcgagcaaggcgcggatgcgcgccggcggcgaaccagagtgcctcgtcgacttctggatgcaggagacggtgcgggagatcgacgaggccaaggcagcggggaagccgcctccggcgcacaccgacgacgaggagctcgggggcttcctgttcgacttcctcttcgcggcgcaggacgcgtccacctcctccctctgctgggccgtgtccgcgctggactcccacccggacgtgctcgcaggcgtgcgcgccgaggtggcctccctctggtccccggagtccggcgagcccatcaccgccgagaagatcgcggagatgaagtacactcaggccgtagctcgcgaggtggtccggcaccggccaccggcgacgctggtgccgcacatcgccggcgaggagttccagctgacggagtggtacacgatccccaagggcaccatcgtgttcccgtcggtgtacgagtcgtcgttccaggggttccccgagccggacacgttcgacccggagcgcttcttctcggaggcacggagggaggacgtggtgtacaagcgcaacttcctcgcgttcggcgccgggccgcaccagtgcgtcgggcagcggtacgcgctcaaccacctcgtcctattcatggcgctcttcgtctccgtcgtggacttccggcgagaccggacggagggctgcgacgagccggtgtacatgccgaccatcgtgccgagggacagctgcaccgtgtacctcaagcagcgatgcgccaagttcccatctttctgagctggtttcccttgtcctcttgctctgctcctcttcccgtgcatcgcataattcttcttcttctccatttttcttttcaatctggtggatcgtgtcgcagctgtgatgcattgttgatttgtaggttttgatgtttggtccattcaattatttttgttggtaattgggttcagttggggtttggactcagctttgggtcccagccggctaggggatgatacgaacactacatctggggttgttggccacatgtgtgggtcttctggtttggttggttggcatgtctcaggaaattggtggtatttggaatggatttgctcgattgttttggcc

SEQ ID NO: 71356 - DNA, 179 bp, Oryza sativa
  unsure (1)..(179): unsure at all n locations
  Clone ID: PAT_MRT4530_71839C.1
agtgcnnnagtgcngagtgcgnngcattcatgtaggcttgaatgtagcgtagttgggttgagtgtgatgaggtgtgtggtcggagtcgtgtgtgtttgagtcgagagtgtcaacagaggcgtacnatactcttcccactcatcacaaactcatatcccatccaacaactctccatatca

SEQ ID NO: 71357 - DNA, 561 bp, Oryza sativa
  Clone ID: PAT_MRT4530_7183C.1
atggctactatagatataaccgctgctcacaccaagataaagttgactaagttctggaatccaattcagccacctgctaccgtgctgaatttaaatggccgccaaatctgtatacgagctatgttttcggtccgaataagggtgacaacttcttgtaacgtgacgagcaaagcctccatttgctctattgcaattgttgagaggcgagatggtggttggactgccacacgtgcatgcgccgagctgagccaaggcgagtcgaggcaaaagcataaccgttgggcatcaatggtgaagttactccggtacactcatgtcaacttcttggccacacagaagacagattctctatcatttccggtgctcttctttgccgagtttgacaacgagaagaccgagggtgaaccacctgtcttttgttgcaaggtggatatgcaactaccttgtgcagataatttggaaagcatgtgtgttaaaaacattggtaatgttgagtacaataccaccaaacatctaatgactttcaaatttactcccaacaaagtagtatttacaagctaa

SEQ ID NO: 71358 - DNA, 426 bp, Oryza sativa
  Clone ID: PAT_MRT4530_71840C.1
atggccctccttaggtgtcaaagcggagcaaaactagaaattgcctcggatttcctcaacgatgccttcaagaaggatgtgacgctagctacgtcaccatcgccagcccaagagtggactagattttcatccggagaatccaaacaaggcaaaacgggaaagcgcaataagacgtctccaagaagagaacggcgcccacaggtgtcgccgtcccggatttcgccatggtctctaccgatctaccaatgtgaaggcattcccactgtcaacattgcgtccgctcacaggcatgttagtcatcacaacaagctgaggtggtcttctttcttgcaccgaagccgtcaacaccctccaagagttgaaatcaccaccatcgtcaatagcgccagtgagcaacacacgagcattttttctagtcaaaaataa

SEQ ID NO: 71359 - DNA, 351 bp, Oryza sativa
  Clone ID: PAT_MRT4530_71841C.1
atggggaggggcaccgcttggaagatgacggggaggggcgccgcacgaaagacgacagggaggggcaccggggcaaggccgcccgacggcggcacactcaccctcgggcgatgccgggagggatcagtttttgtccctccgacgtcggcgcccggctgtccgatcaaaatcctaagatcatatggccggtattggccagaccgaattcgccccaagtggaggtacgcgcggggaggcttccccggcccaggctcaggttgtggccgggtgaggtggggtgcgcccgcaggtgcccaaaagttgctgtgggccaaccggccaggcaggaaaaagtctgatttaggtccctaa

SEQ ID NO: 71360 - DNA, 209 bp, Oryza sativa
  Clone ID: PAT_MRT4530_71842C.1
accatgccattccctggtgatcaccggaggggtttctttgtgtgaatatgtgcatgtggtacatatttctttactcctatcccaaggcatacaccggaaatggatagctgagaggagccggaaggttgccattggtggctgaagatacctacgggatggagaagagccacgtgaggaattaattgactgccaccactgcaggcgttctt

SEQ ID NO: 71361 - DNA, 2817 bp, Oryza sativa
  Clone ID: PAT_MRT4530_71843C.1
atggcgtactgcgaagccggtggccccgtcgggagatcaccgccgtcggggagcggcggcggcgggaggaggaagactctcgcggaggtgatggccacgaggacgccgcggccggcgtcgatccgcccggaggcgacgcgggccgccgaggccgccgcgcgcgaggtgctgctgcgggtggcgcccacggaggaggcggagcggcgccggcaggacgtcgtcggctacctcaggcggctcctcggcacggcgctcggctgcgaggtcattgcatttgggtcagttccactgaagagctatctcccagatggtgatgttgatataaccgtacttgggaacaccgctctggacggcgcttgcattagcgatgttcacagtatactcgagtcagaggagcaggatagtggtgcagaacttgaaataaagggtttacatttcatcgatgctgaggtaaagctaattaaatgtgttattgagaatattgttgttgacatctcgttcaaccaaattggtggggtgtccacactctgttttcttgagctggctgaccgtaaagttgggaaaaatcatctgttcaagaggagcattatgctaatcaaggcttggtgttatcatgaaagccgcatactgggagctcatcatggactattatctacttatgccttggaaacacttgttctttacatattcaatatatttcacaaatctctgcatggccccttggaggccttgtataagtttttggaatattttagcaagtttgactgggacaagtattgcataagtttaaatggtcctgttcttttgtcatccttacccagtcctgctggaagcttttatcgcataagaggtgctttatcgtttggtgcgcaaaagcttggtcaaattctcatgttacattctgaccttattcctactgagatctttggattttttgcaaacaccttgaagagacatggaagaggagaaagatcagacgtcggtaataatgattcaatcgaatcgttgcttgatcctgaatatgcacttgggaaagatgcaccagacttcacaaattccgacaggaatcaagatgaaaacaggaatccaaatctgcagacaacttcatatagatattttcatggtgatgctaaagatcatccttggaataaaatctggttaacaaattttgatattcagtattacaacatggtttcaggagctagtttaatgagccactcaacatcttccacagagaatggcaaccacaacattaaacagcgctgtagtagatcacttatggagcaacagatttatgcaagcaaccaaccacatatattgactccatctactcataaaaatactttggacgttatcaactcttgcagagctgagttaaataggagtgacctccatgaagaaaaagtaatactttctcctttctcaccatcaaatttgttggatctatcaggggatctggatttgcacttgagatgccttcagaaaattcagtaccacctggagtccatgtttgatgggttggtgcagctgattcaggaagcatttttgtctgggctgctagatgaggactccttcaagattccaaccagaagcttctcaaatagtactgatgaacggcctacagggctattgccagttgcatctgttgataccgggacaaggaacttatgtccagtttcctactttcctagcacaggagatgtttctcataaatcacacactgaggatcaagtcaatgcagtttgtcagaagaatgtggtgttgtcctcgggaacatgtattatatccaacgggtttgcatcttctccttctcctcctgctgatttagagagttatcctgtttcttggtttcataacacacaggaaattatggctcacggaactggcatgcaaactctcaaaaatgtgtcattgcttcctggaacagatgtactatcaaatgtagtcggacaacttccatttcttgcagctgattcagagaactatagcttttctcggtctcataacacaagagaaaaacgtgtgatgcgtggaactggcacattccttcccagaatgagttattatacatacaaggaacgcatattatctgaaaaaggaagaagggaaagagaaagattaccagatcgaccatggaagattaaaaccaacccaactggctaccttcaccagcacacctctcctgaagtgggatgttctggtgcaagcactgggggtattacgattgaccaaaacagttcacaacaggattactcaagaagttcagttccagctgaaggaggggtttttcagaagagagcattaataaatcatgtaagcgaacaaattcagaccagcctgccatgggatgttcataacaatcaacatgggtatgtttactcggacatgaacatggttgacaaccaaaatcctggtactactagtgaaggccttgtcggacataacagtgaatcaagagagctaccgatacaccatccaccagaagttcaattcagcgaaacaatggcatcatcaccttgtatattgctgcctcattgcatcggcaatggtcaaggaaatttactccaagaatccaatacttgtcagcccttcccaccagcaacagatgtttttcactcaatcaaaacaaaacaagatgaaaatcttgaggttgaatctttcagacctatcccatttagttccccctgtgcaaagttcggagaagcattccctctgcctactagcaaggggcctgctgaaaccgaaagcagaccagatggactctaccagctgagagatgaagctgacttccctccactccagactcgttcttgctga

SEQ ID NO: 71362 - DNA, 1222 bp, Oryza sativa
  Clone ID: PAT_MRT4530_71844C.1
atggagactgctgtgctgagcactcttctgaacatgctagggccgaagctctacaccttcttgcaagagaaccatgagctgcggcggaacctggaacacgacatacggtacatccggaacgagctccggatgatcggcgcggtgatcgatgagcacgaacgcgggcagatgaaccacggtggccctctgcagggggcttggatccatggcgcgcgcgagctggcctacgacatggaggactgcatcgaccgcttcatgcaccgtatgacaagtggccataggctcgccacaatggccgtccgcaccaagtttgccaccgtgatccagaagctccggaagaaatcggaggatctgtctaagctgagagcaaactacacaaccgctggcaacggcaatggtgattgccaagcaagcacctccgggaccatgtcgtcatttgagacgacacatatccccacagctgacaccgtccctgtgggaatggacgggccaagggatgagattcttgagctgatcatggaaacacaaagccagcccaatcagctcaaggtcatctcccttgtcgggtttggcgggttagggaagaccctcctcgccaagcaaatctatgagaacaccaccatttgcacacaattcgaaccacaggcctgggtttccgcagcagggaagagtgcgagggacgtcctcaaggagatactatgccagcttggcttccaatcgcaagcacaggaggacgatgtcagcaagctcatcacaagtctgaaaaaatgcctccactccaagaggaatgaaaaagtcactaccacaagatggaaagtttcccgagtgcccacaaacacgggaaagttcatgttcctgccgaagttcttcattgtaattgatgacatccagagggaatattggaacagtactataaaagatgctttccctgtagatacaggatcaagcagcatagtgctggtgacgacggccatccattccatagcaaatgcctgcagctctggtaatggtcatgtatatatgatgagcactcttgacaaaaaatactcaagaaaactattcttaagagaagcatcatggggtgactacccacctggttcagaaacagtgctgagtactaaatgtgatggtttaccacttgcccttgtatcaacagcccaattcttgaaaagtaaaggtcaacagctaccacaagaatatgcaaagttgtgtggcaatctgg

SEQ ID NO: 71363 - DNA, 1252 bp, Oryza sativa
  Clone ID: PAT_MRT4530_71845C.1
cgtcattcatctcctcctccttatattaggcgcgcaccgcacgcgtgctcatcccgatcgccatggccgtcgacgcgcaccacctgcaccgcctcccaccaccgatccagcctgctgaatccatgttctcgccgaggcagccttgtttcggcgccgccgccggcgaggttgtcgtcggcggcgccggtggcgcggtgatggcggggctttgccaggaggagcagctggtgcaggggtaccgccaggtgtttgttggaggtggtggggtgaggcagccggcggcggcggaggtgatgaggcagtactcgcaggtgtgcgcggcggcggcggacgcggcggagagcggcgtcacgttcggcggcgggcaggaggcggcggcgccgaggaagaggaagcgcgccgaggtgccggtggttcttggcgccgcgggcgacgtggccgtggcggcgcaggctcgccagcagctggtcgacgtcgaccgcctcgtgctccaccatgcggcgaagatgtgggcggagcttgcggagcagagggggaggcacgcgaggcagatggtggccaccgtggaggccgcggcggcgaggcggctgagggccaaggacgaggagatcgagcggatcggtcgcctcaactgggcgctcgaggagcgcctcaagggcatgtacgtcgaggcgcaggtgtggcgcgacctcgcgcagtccaacgaggccaccgccaacgccctccgcggcgagctcgagcacgtcctcgacgcccacgcgcgccgcggcgccgaccacggcgacggcgacgacgccgagtcctgctgctacggcgagaacgacgtgctcgcgcgcgccgccggcgacggcgaggcggcgtcggccgagcggcgctgcaaggggtgcggcgaggcggcggccgtggtgctgctcctgccgtgccggcacctgtgcgcgtgcgcgccgtgcgcggcggcggcggcggcgtgcccggcgtgcgggtgcgccaagaatggcagcgtcagcgtcaacttttcgtgagcgatggcggagggaaaggagtaatagcaattagactagattttttttcttttcttttcttttttttctctctctcctccgttttttttcttttctgttttggtttagctgatggggataatagggcgatatggtctaatgatgtggatatgaggggatgagttttccttttttgtgttggatccatttgatccccaaggaaaaaaaacataggaatttggtaacgttcc

SEQ ID NO: 71364 - DNA, 1174 bp, Oryza sativa
  Clone ID: PAT_MRT4530_71846C.1
atgaccttcaatcactggaaaacaggtttgatgtgcaagctagaatttgaaggacacctgcccaatctctgtgacagtatgggtatgggattaaatcccagcatggataacttcaaaatcaataaactgttaggtaaaggtcgatatggggaagtgtatgaatgcacttattctaatggtcaatatgcagtaaaaacgattgatgtaaccaattattttgaccacactgaaccaagagaagtcagcattatgtcttgccttcaagacgcaaacattgttaccttttaccaggcgtggtgtgaaaacaagaaagaggaaaacaaatttcatggttttggtgtacatgagccgaaatatatttatattcatatggaggcctgtgccaggaccctttatgattttctgtgtggaaataatgaaggaacaattcaggacaggtggtctctttttgagagaatcgtaaaaggtgtaagatgcatccatgctactgggataatccaccgtgacctcaagccatggaatattttccttggaccttgtggcgctgttagaattggtgatttaggacatggttgctggtctaaatcttactgtgatggtcgacgtggttcacctgattgtggaaccatgttgtattcggcaccagagctcaggaatgggctgttggttactgataaggttgatgtgtacagtttaggagtgatatatcttgagatcttcatgcctgctgctgttagtgttaacaacagagttgatgcattgatcgatttgatggaaagacgatacaaaccagaatggacagcttggtccatcgatatggaattcttgaaggacctaactgctttaaacccatgtgaccgtccatctgtgggtacaattttggaatatatcgccgaacacgcaagtgactgttgaaaggtaaagtcagactgtgcaaagaggatgataatttggttagttcgttggtccaaagaaaaatcaggcccagcgtttagtgcttagtattttgcataagcaaacgtactattaactgtatgatcaatcattgtagctacgcagtgcctagctttggtactcgcatgtagatttccattgagatgaactttcataatctgaactagaaatttctgtcaatccccaaagtgtagtgtcctatgatgagctctcacctccc

SEQ ID NO: 71365 - DNA, 184 bp, Oryza sativa
  Clone ID: PAT_MRT4530_71847C.1
tgacgagccgcgttcggccacacgtacgaccataacatgagatggctggcggcgaatttacgacgaggtttcgtaatttgagtgctcgaatttacaatgctgatacttattatggatgctaaaaattaccatgcttgggctgataagcatgggctcatttaagcactgggtggatgggagactg

SEQ ID NO: 71366 - DNA, 270 bp, Oryza sativa
  Clone ID: PAT_MRT4530_71848C.1
atgtcaccggagcaagtgtcgcttcaggcggagcaaatgtcggcggagcaattgtcggcggagcaattgtcaacggagcaaatgtcggcggagcaattgtcggcggagcaaatgtcggcggagcaactgtcgttcgaggagcatttgtcaccggagcaattgtcgcgttttgcggagcaattgtcggcggagcaattgtcggcggagcaaatgtcggcggagcaattgtcggcggagcaattgtcggcggagcaaatgtcggcggagtaa

SEQ ID NO: 71367 - DNA, 1707 bp, Oryza sativa
  Clone ID: PAT_MRT4530_71849C.1
gttttgtgttctgtacgagacaacttgcccttcttctggtcctctcaggtctcagcagaaggacagtaggagataaatggatgacaaggagaacacgttagagcatgcaagagtgatgcccgtggaccttacatacaaaaagttagaagaaattacaaatggtttctctgaggagcacaaagttggcagtggtgggtatggagttgtttacaagggagtactggaaaataacacagagattgctatcaagaagctacatcaaatggtaggactggacgatgtgcaatttaagaaagaatttaataaccttatgagggtccagcataagaatattatagggttagttggatactgctatgaaatacgacacaaacatatcaaggtggatggagattaccatttttctagaatggaagaaagagcactttgcttcgaatatttgcaccgtggaagccttgacaagtatctttctgatgaaacatgtggacttgattggcacacacgttacaaaataatcaaggggatttgtgagggtttagattaccttcacaatggtcgtccagaagatcaaattgttcatttggacttgaaacctgctaatatattactggatgagaacaaaatgccaaaaattgctgatttcggtttgtcaagactctttggttcaacacaaacttttacgacaagaacttttattggaacagttgggtacatgccgccagaatacattgagagacgccatatctcaatgaagtttgatgtattcagtttgggtgttataatcatagagataatggcaggacaatcgggccgttctacaagtgctgaaatgtctccccaacaatttattgatactgtacaagagaaatggaaaaagaggatgcaggaaatttcgagtcatacatcatcacatgaggcagatagcctagaagtcaagacatgcatcgaaatagctgtaaggtgtgtagaacccgaccgaaagaaaaggcctactctgagggagattattgataaactgaacgagttagaaaatgtgaggaaggcacttataggccagagctcagctgggtgtaaatcggagcgccttgtgatcgaccctctggaggtgcgcttcccatttgagaaggacagggatgtatcctgcgtgctgcagctgacgaacaggtccgccgatcgcgtggcgttcgccgtgcaggtggacgagtccaagtaccgcgcggtgccggacaggggcgtcgtgcagccgcggtccaggcggtacatcgtcgcgacgtcgcgagcgcaggcgagcgcgccgaccaacttgcagcgcgacgactcgttcctcctgcggagcaagagggtggagggcagcgccgacgacgactttgcggaagacttcgaaaagctgatgggcaaggcggtggatggggagacgatgaggctgccggttgtctatatcgcactgcctctacctcctagcagttaagcgatttatacgcagctgtctgtcctcatgtatcagagatccgctagctagtccgaataatgtccgatccgtcgacatttgcgtcttaacagcctcgtgatttatatatatgacttttgtgaaactaggaagatagcccacgcatatgtgcgggcatttgtttaatgtgtttatgtgcagttggtttttttattgaaatatcatttaccctctattcaaatttatttgagatttctatg

SEQ ID NO: 71368 - DNA, 773 bp, Oryza sativa
  Clone ID: PAT_MRT4530_7184C.1
aagctttttttttttcaggctatgaaaactttgctgcgaaattcaaacgaatgttccccaacatggccgccccttttttttttttttttttgtcaaatattagcatgctgggtgtataaaatatatactgcactgagcaaatcttaaaaatcactcttttcaagaccttacatagttggacgcacctggacctgctgcaaagaattactagtgggttatatctgctgatttgttttagaacccatacatttacctttccgtagtacctggtaagcttgtgcaacacaaatttgcaaaccttctcatcgaatttgacttgcaaataagcctttcgtgccacctatctaatatgatattaaggataagagcagatggctttgatatagagagaacgccataacaatcagcacacctgcacatcagaagatagtttagtgtgaagtgcagtggaaaatagctcaaacaaaatcaacccgcacagaatcatgtgtaattttaaaatactaggacaaatcaattaagcatccaattgtggcgtacctttactatttcattaacttattaaaatgctgaaggccagaaatgccaatatggaacaatataaacccctcaccagccaccagactaatgagtacccctttagccccagggaaataataggggaatccacaatacgttacaacatcttcaacctttcaagcacatcgattcaggggaattacatcacatatgagcatggcaagaaagcccggacgcgtgggcggacgcgtggg

SEQ ID NO: 71369 - DNA, 169 bp, Oryza sativa
  Clone ID: PAT_MRT4530_71850C.1
taatagtaatgtaacataatagtaatagtatacaacataggttgaagagcatgcataatagtagaatagctagcaccaggctaaatcataatgcacatacacatacgtaataaatataatagtacaaatcgtcaaaaacgatacttatatgtaatactatactcagacc

SEQ ID NO: 71370 - DNA, 351 bp, Oryza sativa
  Clone ID: PAT_MRT4530_71851C.1
atctgttatggaggaaagtacatgaggacaaggggcgcgtttgattaaatatagagggcctctgtccacagcagacagcagtgcatccgatgttacacgggcccaaacatactgaacatccagggcacgcccaggctctaccgcatgataatctctgctttggggaccgaggagcaagcaaacatgcacatgtacaaagagcaggacgcatgaccattcactggcctgatgataccagagccaggacccgttgcttacaccccctccggaggctcaggtgggtcatgctcggtgggagccgagaatattgggagcctgggaaagaatgatatcaagcgcatatggaacact

SEQ ID NO: 71371 - DNA, 750 bp, Oryza sativa
  Clone ID: PAT_MRT4530_71852C.1
gtgttggtttcagaaatcccatgctgcatatcatcagttgcacggcgagtcattgggtccaacatgcttaaagttaaagttggtggatgtgctcttcttgtttgcgcagcgaaagagcattgtcagaagcagatagagattctcagtgactcaagcttgtacattcaactaatccattctctagtcagtatgattcatatgacaaacttgccttctgaaaatgggagtggtgaaaacatatcagacattaaaatttctagacactccaaagaaaataacaacagcgatgaaactgtgtgccgcactgctgtaatctcaggtaacatgattccgctatggctgcttgctgtttttgcacgccatgacagcaaaacaagggctgaaattctagaagctggagcagtcgaaatgcttatggagaagatttctcaaaatgcattcctatatgtgggtgaagaagatagcaccgcgtgggtctgtgccttacttcttgctttgctatttcaagaaagagagataaatcgatctaatgcagcattgcactcaattcctgtgctctcaaacttgttgaggtcagatgaacaagcatacaggtactttgctgcacaagctttggcaagtctggtttgcaacggtagcagaggaactcttcttgctgttgctaattctggggcggccactggacttatttctttgcttggatgtgctgaggttgatatagctgatcttttggaattatcagaggagttc

SEQ ID NO: 71372 - DNA, 168 bp, Oryza sativa
  unsure (1)..(168): unsure at all n locations
  Clone ID: PAT_MRT4530_71853C.1
acgacattcgagctcaccnttcggccgnaccaacaccgaccnccgcaagcncngtcatcgagaccaccatcatggccatcaatcggcaacgtggacatcgacctngaccnacgaacatcacccgaaagcgcaagnnacangacgaagaagtgtcgccgncgtcttccc

SEQ ID NO: 71373 - DNA, 3168 bp, Oryza sativa
  Clone ID: PAT_MRT4530_71854C.1
atgtgtggtgactgctgcggccgcggtgccgggggagccgccgaggcgggggcggccggcgccggcggcgggaggaagcgggggtgcgcggggacggcgctcgccctcgtggcgctggcggccgccgcggcggtcgccgtcctggagggcaccgccggcggtgtctcctacgtgggcgacgggtggctccacgagtgcgccaagtgggacgccgacggacggcggctgctcgtgtccaacttcttcggcgccggcgtgtccgagctccgcgccgaggcgaaagggaaggagaaggaggaggagcgcgtggtcctggcggatcccgacgtcgccgggagggtcgcgctgggtctcaccgtcgacgcgccgagggggcgcctgctcatcgtctacgccgaccggttgccgcggttcgcgtactccgccgtcgccgcgtacgacctcgcctcgtggcgccgcctcttcctcacccgcctcgacggaccagggtactgccactgtgagaggcctgacaccgccctggtcatgggtgtccctcaaggagcgcgcggtggggccaaacctcctcttaaccccacggcgcacttgggagctctaacagtgacagcagcaattacgccacgcgcgctactcaaccacccgaattacgcgaggcgccccagatcttgtagtggctgtgtcatgtgcggtggatgctgccgccgccgcggcggggccggcgccggcggcgggggtcgcgggaccgcgtcgctggccgtcgcggcgctggcggcggccgcggtggtcgcgttcctggaggggacggcgaggggcgtgtcctacgtgggcgacgggtggttccacgacggcgtcaggtgggacgccgagggcgggcggttcctggtcaccaccatgaccgatggccgcgtcgtggaggtgcccggcggcggcggcgcgggtgcgggggaggggaaggtggaggcgcgggtggtcgtggcggaccccggggcggccgggaggtcggcgacggggctcaccttggacgcgccgagacggcgcctgctcgtggtgtacaccgacttggcgccgtggttcgggtacgccgccgtggccgcctacgagctcggctcctggcgccgccttttcctcgtccgcctcgaccggccaggtgattcaacgctcgccgacgacgtggccgtcgacgaggaaggcaacgcgtacgtgacggacgccaagggcaacaagatctggaaggtgagcccggacggcgagccgctgtccgtcatcaagaacgccaccttcttccagaggccagggtggatcaacaacttcgtcggcctgaacggcatcgtctaccaccccaacggctacctcctcgtcatccacacctccggcggcgacctcttcaaggtctgcccgaagacggggagcgtgcacgtcgtcaaggtgaagggctcgctgaagaccggcgacgggctggcgctgctgtccccgacgaggctggtcgccgccggcctggtgagccggctggtcgagagcgacgacgactgggagaccgccgtcgtcaccggccgttcatgtcctgatgctttgaaaagcttgctttctgtggcaccccttaatgatattctgcatgaaggaagtgctgcaaatgatgcagttgagactatgatcaaaattctcaactcacctaaagaagaaactcaggctaaatcagcatctgctcttgctggactgtttcattgtcgcagggacttgcgagaaactcatattgcagtgaagacactttggtcagtcatgaagctgattgatgggcagacagataaaatactaatggcggcctcatcttgccttgctgccatttttctgtcaatcaagcaaaataaggatgttgctgcaattgggcgggatgcattagctccacttgtctcacttgcaaattctacagttctagaatgccggccaattaaccaacctctttcagatactattaaccggtcaggtgctgtccttgctctagctgggcttttggaagctgcgaatggtgaagctgccgcaacatcagaagttgttgatgcgctggtgctattatcaaaactaccaaaggtgtcaagtgggcataccaaagctccatggacagttcttgcagaaaatccccacaccatacttcctcttgtgtcatgtgtagcggatgcagcaccttcattgcaagacaaggccatagaagttttatcgaggctctgttctgatcaacatgatattgtgggtggtttggtttcagaaatcccaggctgcatatcatcagttgcacggcgagtcattgggtccaacatgcttaaagttaaagttggtggatgttctcttcttgtttgtgcagcgaaagagcattgtcagaagcagatagagattctcagtgactcaagcttatacattcaactaatccattctctagtcagtatgattcatatgacaaacttgccttctgaaaatgggagtggtgaaaacatatcagacattaaaatttctagacactccaaagaaaataacaacagcgatgaaactgtgtgccgcactgctgtaatctcaggtaacatgattccgctatggctgcttgctgtttttgcacgccatgacagcaaaacaagggctgaaattctagaagctggagcagtcgaaatgcttatggagaagatttctcaaaatgcattcctatatgtgattgaagtctcaaggattaatatagtccttgtgcacaatcatcacctgtgcatttacacacgtgaagaagatagcactgcatgggtctgtgccttacttcttgctttgctatttcaagaaagggagataaatcgatctaatgcagcattgcactcaattcctgtgctctcaaacttgttcaggtcagatgaacaagcatacagatacaggtactttgctgcacaagctttggcaagtctggtttgcaacggtagcagaggaactcttcttgctgttgctaattctggggcggccactggacttatttctttgcttggatgtgctgaggttgatatagctgatcttttggaattatcagaggagttcatgttggttcctaatcctgatcaaattacactggagagactttttagagttgatgatatcagggttggcgcaacttccagaaaatctattcctcatattcagtga

SEQ ID NO: 71374 - DNA, 687 bp, Oryza sativa
  Clone ID: PAT_MRT4530_71855C.1
atggatccttcggcaatgaatccatccgaggaaggcaaagctctgggcatggatccttcgggccaaggtaaggctttggtgatacaacctgcggtgaatccctccggcgaaggcgaggcgccggtgatggaggagaagaagaagaagaagacgacgacgacgaagaagaagacgaagacgatgcggtttacccaagagcagatcaacaactgcatcgcgtacaaggacgtggagataccattcaacgacaacatgcccagcctcttggaggccctgggcgaggaaaccctcgccaattttccccaggacctcatcgataagctcaaggcgtatgaggatgagagggaagcggagaaggccagcttcatcgagattcagaaccatatccgcggggaacgggatgggatcctcaaccagtactacaccaaaggctacgccgagtacgaggtcgttgtcgacgacgatggagaagaagacagtaaagttcctcctcgaattgttgctccccctggccggagaaggttccggaacggggttaccgtgaagaagaaccagtcgggaggaggagattctccaaatgccaatgcaagtaggatcaacacctcaaacgaggcagtacgctggagacaattttctcagtttagcttgcaaaccgtggtcgtatcaaaaaattcagagaaggcatga

SEQ ID NO: 71375 - DNA, 364 bp, Oryza sativa
  Clone ID: PAT_MRT4530_71856C.1
aaaaccctcgaacatagatccgtctggcaagacagagattctggttgccagatcagagacagttggtacaaaagaatcagacgccaactccaacccaaacgctgaggaagaggcaaggaaaaccagcggcgcggctgataacaagcccccgactggaaatcagtcggctggcgccaacactggatcgaaccaggagcccctggctgaaaaccaatctggtggagaaaaccatgacgaccaaataccaagtttccaagagaaaacatctagcccaccacctgcccaggaggaaaaaaccactgatccagagctcagcggtggccctcatcacttccatgctgacatcatcaccggttatttctaa

SEQ ID NO: 71376 - DNA, 129 bp, Oryza sativa
  Clone ID: PAT_MRT4530_71857C.1
acgcgtacggaccttatcccggagttgctgacttctttgtaactaacaaatgagagggtggctcatataaatctgaataaatacattcactggaacgcacatacattggcactgacagcttcaggaaaa

SEQ ID NO: 71377 - DNA, 833 bp, Oryza sativa
  Clone ID: PAT_MRT4530_71858C.1
tatccggactcaccttatcaacagcgcttaaatcaattaatgtttgagcgtttatatcagcaacaaaaattttcagcattattagcttatgcgaaaaccattgcaccggaaaatgctgataatcaatgtcgtgttttttctgcgcaatatcagcaatttatggcacaacaacagaataaagaagctcagcaaaacagcaaaaaaacgatttggttagccactatgatgcaggatttattggcacaatttgagaaaatgtggttaaaaacagcagaattaccacagcactggcggatattgaacaatattggcgggatcaaggtagaaaaaccgatgaaaatatcagattaaaagcggttgaattagctaagcaaaatgctaaaaaaggctttgaaattttggatcaacatcatcaaaattcggagttaagcgattggttggtagaagtcagcaaattaacggcaaatgtcaaatatttgccaacttttgttgaaatgcaactgcttaccacacccaataaagcgcttatattagctttttttccaaaatttattaaaaccctttcagaaacattagcacaacctaactttgatacttatcaagcatgggcagataaatggcagttaagcacggatgaactgcgggagtggaaaattgcgtttattagtcgtttatttgacaatcaagatccaaactttaatatttggcgggataaacaactatcagaaatacaaacagatagcttgattgaacgccggattagaatggcactctggcaacaacagccattagcacaatggttagcgctcctttcgagtaaagcgcaagaaaaa

SEQ ID NO: 71378 - DNA, 2907 bp, Oryza sativa
  unsure (1)..(2907): unsure at all n locations
  Clone ID: PAT_MRT4530_71859C.1
ccgtattggttaaggtttctatcttctccaccggcttgccttcaccaccgccgttgctaatggcaacaacgtcttcaccgccgacttgcctccgtcaccgccgactggtgtcctcgcctatacggttggttggtcacaccaccgttcatgggcgtccacgtcttcactgaccggttggccttcgcgccgccgactggtgtttccgcctgcacggctggcctattatcccgccgttgttgggtgtatacgtcttcatcgcagaaagcctcgtccgccgccgactggtgtttccgcctacacggttggttggtcacaccaccgttgttgggcgtctacgtcttcaccgaccggcttgtcttcgccggcgccgactggtgtcttcgcctacacggctggcatattatgccaccgttgttgggcatctacaacttcaccgtcggcctgcctccgtcgccgccgactggtgtactcgcctatacggttggttggtcacaccaccgctcatgggcgtccacgtcttcaccgaccggctggccttcgccgccgccgactgatgtttccgcctgcacggctggcctattatgctgccgttgttgggcgtctacgtcttcatcgcaggctgcctcgtccgctgccgactggtgtttccgcctacacggttggttggtcacaccaccattgttgggcgtctacgtcttcaccgaccggcttgtcttcgcctgcgccgactggtgtcttcgcctacacggctggcctattatgccgccgttgttgggcattctacaacttcaccgtcagcctgcctctgtcgccgccgacatgtgtactcgcctatacggttggttggtcacaccaccgctcatgggcgtccacgtcttcaccgaccggctggccttcgccgccgccgactgatgtttccgcctgcacggctggcctattatgctgccgttgttgggcgtctacgtcttcatcgccggccgcctcgtccgccgccgactggtgtttccgcctacacggttggttggtcacaccaccgttgttgggcgtctacgtcttcaccgaccggcttgccttcgccggcgccgactagtgtctttgcctacatggctggcctattatgctgccattgttgggcatctataacttcaccgtcggcctgcctccatcgccggcgactggtatactcgcctatacggttggttggtcacaccaccgctcatgggcgtccacgtcttcaccgaccagcttgcttttgccaccgccgattggtgtctctgcctacacggctggcctattatgccgccattgttgggcgtttacgacttcaccgctggtctgcctccgtcgccgccgactggtgtctccgcctacacggctggcctattatgccgccgttgttgggcgtctatgacttcaccgaccgacttgcctttgcagccgccgactggtgtccccgcctccacggctggcctattatgctgccgttgttgggtgtctacgacctcaccaccggcctgcctccgtcgccgccgattggtgtcttcgcttgcatggttggttggccacaccaccgttgatgggcatttataacatcatcaccggcttgccgtcgtcgccgccgactggtgtcctcgcctatacggttgggtggtcacaccaccattgttgggcgtcgttgtcttcaccgaccggcttcctcgtccgccgccgactcgtgtctccgcctgcacggctggcctattatgccgccgttgttgggcgtctacgtcttcaccgaccggccgcctcgtccgcctccgactggtgttttcgcctatatggttggttggtctattatgctgccgttgttggacgtctacgtcttcaccgaccggccgccttgtccgtcgccgactggtgtctccgcctgcacggctggcctattatgccgctgttgttgggtgtctacgtcttcacctccggcttgccttcgccgccgccgactggtgtctctgcctgcacagctggcctattatgccacctgtgttgttggacgtctacatatttacctggcccgcgtgccttgtttgacccccccatgaagctatccgggttcaccggtggcacacgccgccgcaaccnnnnnnnnnttttcactgaccggctgcctcgtatgacgccaactgatgctatcggcttcacggctggccacgtcgccgccaccgctaataagctgtctacgtctgctgccgactgctacgcgtcttcgttactattgatgggcatcatcattatcaccagcttgccttcgccgccgatgattggtgtctccgtcttgatggctggcctattatgatatcgctgatggatgcctttgttttcaccgtctgtcaccatggtggagcaacttcatcttcattgtcttctgcactagcaaaccgaattgttgctacttcgcaagtttttctacttcaccaaccacgatgtatacaagagcctcgacatctcggcatgcaccactagatttaatgccgtgttattttactacaacaaatggtgttccaatcttcaatatttctactcagacatactcaatgcatatattcactcaagtgatggctactcgatgacaagaagctacagttctcaactaaccaaagagtcgggggctacacaaatacaagactcaaaattcgacaagctttatgtcaagatgaagcaatcaatcaataaacgagtcaactcggggagttattatatttatctttgcttcagagccggcatttaatttcagcgactccaattattacaccggcaattttggcttcttcatgccgccacaatctactccaaaattttcaagtatcaagtttgagattctatctacatatccgagagtttagagttatcaaccaatcagctcagttt

SEQ ID NO: 71379 - DNA, 186 bp, Oryza sativa
  Clone ID: PAT_MRT4530_7185C.1
atggcctggatggagaaagataggcaatgggtagcaggcggtggagacaaggagaggggttacggtgatagaccggggcaggagaggcatgataggggaaaggcatcggaatggaagaagactagtgagagtggctatggtggtggtgttggcgttatgattcgataccctgggacccttcatggg

SEQ ID NO: 71380 - DNA, 1355 bp, Oryza sativa
  unsure (1)..(1355): unsure at all n locations
  Clone ID: PAT_MRT4530_71860C.1
ttgggagagaaaggtgacaaggtggtggaacaagagtcccaagagctgataaatcccattgagatgctgacccaggaagatttagagggaactcagaatgattggctgacaatgggtgaaaaaaacttgttggatgatgagatggagaggtgtcaaattcccactgattctgacatagaaaggttgagggaggaagaaaatagagatgatgaatagagctttcaagaggtgtctcataagaagaaaagtagggggagaaaaactgaacctacaattacatccaggatgagcttaaggaatagggagttggctgatgttcctgtcaccaggagggctagaattctcactcagaagaagaacatggaaggtaatgattcagttgagttaaataaaattgctattgctgctaagatagatttgggtagtacttctactgagattgatactaatttagaatccttgaaatcaaaagagatagcccatgctaaactagctgaactaaactggaaaaaagagatggaaaattgaaaagtaaggaaggtaatgtagaaaaatctgaggaggtgaatcaaaagttaggaaaagaggttgtggctaaaaaagtaagatgccattagaggaggtggctgctgaaaagagccctgagctgataaagagagctactcatgccggagcttatttcctatgttgtgttttgaaaaataagaaagatgactatctctacgaaatcattagtgtgtgtggtcctgtggacaatcacttgaagggtgggtttttagatgagttgaaatggcatattcagggtaatgattacccctttatattaggtggagacttaagttgtatagatttgcttgggaaaaatccaatgctaatgttgactctaggaatatgttgttgttactcttttattgctgatttagatttgagagagacttttaggaatggacctaagtatacttggacnataagcaagagtgccctgctcaggaagtcctagatagagttctaatgaatgatagttgggatattaagttcccctctgctctgctctcttccctccctaagtaggttctgaccatactcctcttcttcttgacactgatgaggaaagggaaagaagctgtagttactttaagttcgagtcagcctggcttgctgaaaatgggtttaaggagatggtttgtcataagatgttagaaagagatagttcctatattttagagttctggactagaaagcaatcagagatgagaaaatttttgacaggttgggtgtcgcgaccgagaaaattgcatttaaggcacttaaaggcctgacaatcaaaaataaacagcagcggactagcgggccta

SEQ ID NO: 71381 - DNA, 563 bp, Oryza sativa
  Clone ID: PAT_MRT4530_71861C.1
atggagttgagggcgcggcggacggcggaggtggcgcggtgcccggcttggagcggcggtgtacgtgtcgcctggttgctgtcgccggcggtgcgggggagtgggaccgaccggagccgccatggcgcgcgtgcttccccatcgccggggaccgggtcggtggcgaggcggccagtgcggcggttggagctgccgccgtcgctccgccctcctcctctcccgcctcgccccggcgacctcctcccgcgtggtcgcgtggtcgttggcgagacggaggtgccggagatcgtcaaggcagcccaggacgcgtgggccaaagttgaggacaagtacgccgtcaccgccatcggcgtcgccgcgctcgtcggcctctggacggccataggcgccatcaaggaggttgtcgccgatggcggcggcggcgactacgacggagacgcacggacgcgctacagccgctgccgccgacggagccgctcctggtcagacgcgctaccgccgctgctgccgacgcgccgacacgctaccgccggtgccgtcgacggagccgacgacttgtctgg

SEQ ID NO: 71382 - DNA, 330 bp, Oryza sativa
  unsure (1)..(330): unsure at all n locations
  Clone ID: PAT_MRT4530_71862C.1
cacagggtgatagagagagagagattcagatccacccgcgtcttctcttctnccctctcgtncacccatccctcgatcgatccggcgatctccgncgncgncgncgncgncgctagcagnagaacctgactaggnaaagaggaggagaggagaggagagggcgcgcggnacagaggaggaagaggcgtggggagagaagatgnnnctgngggactggctctacggcgcgctcgcggcgctggggctggggnagaaggaggnnaagatnctnnnnctcggnctcgacaacgncggnaagaccacnnctttnnacatggggaaggacgagag

SEQ ID NO: 71383 - DNA, 225 bp, Oryza sativa
  unsure (1)..(225): unsure at all n locations
  Clone ID: PAT_MRT4530_71863C.1
ttatttataaanggtttggatttggaatgggttgggttggtgatgtatgagttattgtagntggtgatagaagtaaaatgtntaaangtnntgggggtggttgggggggagagtnnaaagagatgggntatttgnntnaggnnntggtaaattatttggnatttnttggttggggtgatggtantgaaaatgagtttttnannattgatgaaatagnggaaaaat

SEQ ID NO: 71384 - DNA, 651 bp, Oryza sativa
  Clone ID: PAT_MRT4530_71864C.1
aagctatcttattttgatacatcctatccgtgacatcctttacaaatattcggccatagtactgtccacgcattgaagactgtcacgtacacatgcgtgcatggcatggttgtagaactatattaacatgttgctattaaaaattgaagactgactattgaaagtgttatttgggacaactctagatcggaatggttaaaatcctaataaatgcatccaacagacaagattcaccgtttgccttcggctgaacatgattggtttcccttataaataggcctttgatgaggcccatggcaggacctcactagtaagcttatgctgtgtcaaatcgctttcataaaacctggctaatgaagctggcaaagcatgctcaaaataatatactgtacctttttttaatacttaatgacgctgggtgattctggtttcttgaaagattctgcaccttacataggttgcttctgcaactgctgctcctgcttttgctgctgcctggctacagaataccaaactctattacaacttttataagttctacgagtgacaggagttataccatagaagctgctcttagaatcacttgaccttgcttgccttaagcgtgccaatgcaaaatcacaacgactgcttggaggatcatactgccat

SEQ ID NO: 71385 - DNA, 408 bp, Oryza sativa
  Clone ID: PAT_MRT4530_71865C.1
atgggcaaggacactattgttgatttactaacctctataagaaacacagacatgaataaaaaaggaactattcgggtagtatctacaaatattaccgaaaacattgttaaaatacttctacgagagggttttattgaaagtgttcggaaacatcaggaaagtaatagatatttcttggtttcaactttgcgacatcaaaagagaaagactagaaagggaatatatagaactagaacctttttaaagcgtatcagccgacctggcttatgaatttatgccaactatcaaggaattcctaaggttttggctggaatgggaattgctattctttctacttctcgaggtataatgacagatcgagaagctcgactaaacaaaattggaggagaagtcttatgttatatatgg

SEQ ID NO: 71386 - DNA, 306 bp, Oryza sativa
  Clone ID: PAT_MRT4530_71866C.1
gttagaaccatccctagcagctccctcccgctgactatgaaattcttgctgccgaacattgtactggcggcgtagtcatgccggttgctgcagagaacgatcatttcaatgacaacattaacgacaatctctatctcctaatgcagagctgtaaatgcacactcgtctatcagaccgagctgaggacccttacgaactctcaggcgttacttgtgaccatatataagaactatccacgtgttgatcagacagaatcacattactaacctatggtgcctaatgacaccaggcatcatgttcaaggaa

SEQ ID NO: 71387 - DNA, 759 bp, Oryza sativa
  unsure (1)..(759): unsure at all n locations
  Clone ID: PAT_MRT4530_71867C.1
ccccattccaggccgctagggttcaccgctgccgcccgcgacggccgccgcgcgccgggcacacagcgcgctttcgccttcacgggctcccgttgccgtctcgcgtcgtgcccgcccccgcgcggaggcggagctatccaaagttatcgcgtccccctcgcatagatctgatattcgcgactggacccgctcctctcggctcgcaatgctttttggagttttgtttctctcccatcccaccacctcggcctcactgagatctccgactccgattacgccagccgccccctaaacctagccgcagcgcatccacccccgcgcgagactagcagcggcgggagtgcgcggccatggcgacggatcgggagaaggagcgggaagcggagctggagagcgccatgtacaccaactgcctcctcctcggcctcgatctcgccgtcctcggttccccctcgtcccccgccgccggccctcgcgtcggcctcttccgccactccaatccccgcctcggtgaacagctcctctacttcctcctctcttcgctccgcgggcccgcgcagtccgccaaggactttgataaggtgtggccgatcttcgactccgcacaatccagagagtttaggaagatcgtgcaaggaatcatcagcgagctggagcagcagggagctctgccacggagcaactncagggtatcttcactcgccacctgctgtgggccgagatttgttgagctattgtggcaactctctgtgcatgcct

SEQ ID NO: 71388 - DNA, 266 bp, Oryza sativa
  Clone ID: PAT_MRT4530_71868C.1
gggtctttgtgcacctcactccgcctggtccggggcccaaagggcacgctaccctgcgtccgaccaacccaccaccagggtcacccatggtggaccagcgactcgccggcctgcacgccgccgcgccgaatggacttcagctgcacgtcctccgcctggcatggccgacccgcggagcgatccatcaccaccgctctcctccggggggccctcctgggggactacgacaccctgcgcgccggacgttctctgctaccgccccagga

SEQ ID NO: 71389 - DNA, 1613 bp, Oryza sativa
  Clone ID: PAT_MRT4530_71869C.1
ctctctttctcatctctcagactcaatagggagacagagttctagcgacagaaatggctttccgccagagatcaattagtttgccttctaggcctcactctaaggttgaagaggagctgtgcatcctagatgcatgcatctcttcaccctccacgacccttgatacaatgtgtgagggtttgaggaggcttgccaacatctatagctctattgaggagatcatgtgccttcctagcaaccaagctttctcctcccaacgaagaaaattgttggatggagaaatggaatgctcccttgagctattggatctatgcaacgtgatgcatgaggacttcacagagttgaaggccatcattcaagatatgcaagtggccctgagaaaaggagatgatgcagctgttcaatccaagacccaatcatactaccgcttgttgaagaaggcaaagaaacatttcaagactgcaaagaaggttacttatgaaaaggaggattgcaggatggccaggctattgagggaggctagagatatatcaacctctatgctggagtccacactgcatctcctgtcaaagcaaatcgaaatgcccaaacaatcacttgtttccaaggcattcaacaagaagaaagtagttatttgcgaggaggagcaattgcagaatcacaaggaattatccattggccctgaacattcgcttgtctactcaggtctcaacaggatggccgcgaaggattcggctgggaacgcaaggcattgcgaagataccgcagataccgtggcgggggtagcggcgggaagggtggtcgcggcctcaccggcagccggcggcgagcggcgcatctcctcgctcctcttcttcttctccgagagaaacaagtcatcagcttccatcccagccatggcattccacctcagatccgcgagtgcgccttccagccctcgctctgccaaaaccgacgtcgaagaacagctgcagagcctcgaggagatcgtctcctcaccctctgcaacaattgaaacaatgtgcaatggtttcaggagacttacagatgtgtacagctgcatggatgagatgatgtgcttgcccagcttcaggcttcagcagaggagagctgtggagcaagagctggagcggtctctcgccttgcttgacctctgcaacgccatgcaagagagcttctctgagctcaaggcgagcacccaggagatgcagttggccatcaagaggggtgatgatgcagcagttcagtccaaggttcaggcttacacccgcctgaccaagaaggcgcagaaacagttcaagaagatcaacaagaagtctgcttcagaagaccaggagggttgcagggtggtcaagctgctggctgatgccagagagatcgctctctcggtgcttgaatcaactttgcacctcctgtcaaagcagattgcgatgccaagtcaaagcaagtggtctcttgtctccaaggcattccagaagacaagggttacatgccaggaggagcaattacaggcgttggagttggacatcgttgatcttgagagcggagttgagactttgttcaggagattgatccagagcagagtttctcttttgaatgctcttagcttgtag

SEQ ID NO: 71390 - DNA, 2289 bp, Oryza sativa
  Clone ID: PAT_MRT4530_7186C.1
atggcctcctccctcacgccccgtagcccttacccgaagaaggagaacttgggcaacgcgcggcgggggatgggggtcaagcctggcccgcgccgcaatgtcctctcggcaatcaacaacggcggtggcacgaacagcgacacggcgtcggtggacggcggcgagggcggggctgggccggcggcgcctgtgatcgagttcaccgggagggaggatgtggagcggctgctcgccgagaagatgaaggggaagagcaagaccgactacaaggggagaactgagcagatgagtgagtacatcaagaagctgagagcttgcatccgctggtacattgagttggaggacggctacttggtcgagcaggagaagctccgtagtacgatggatgcagagaatgcccagcacgccgagttggaggcccagcttagcagtgatctggaagagctgaaagctgcacacctgaacttgacgcggcagtgcgattcgttggaggaaagcttcaacaaggagaaggccgacaggatgcttgctgtggagtcctacgagaaggagaggcagcaaagggaatcggctgaggcgtcccgcgacttgctgtcggtggacctggaaagagtcagccatgaagcaaaacggtttagtgagcaactgaaaatggtccaagacacgaacaaaagactgcaggagtacaacaccagcttgcagcaatacaacagtaatcttcaagctgatgcctctaagagtggggacatcatctcaaaactgcaaaaagagaagagtgccatgatggaaacaatggcttctctgaaagatttaaacaattcaatgaagaaccatttggattcttctaggacttctcaacaagaggccattagaatgaaagaacaacttatgaaagaagtggattgccttagaattgagctacaccaaattagagaagaccgtgatcagtctgtttctcaagtaaataccttgagtgctgagcttgctaattacaaggaactagcaggcaagtctacaaaagactgtgaaagcttgagtgtaaaagtgtcagcctttgagcttgctgatgttactgcaattgaggcgatgacaggatatgaagaacaaaaggtgataataaaagatctggaagaacgtttggcatccgcagaatttcaaattgttgaagctgacaagctacgaaagaaactgcacaatacaatattggagcttaaaggaaacatcagagtgttttgtagggtccgaccacttttgcaagacaacgattctagtggtgcagaagaagcccttatttcatatccaacatcagttgaatctgccgggcgtggtattgatttgatgaaccaaggtcagagattttccttctcatatgacaaagttttcgatcacggtgcttcacaagaagatgtgtttgtggaaatgtcacaactagttcaaagtgcacttgatgggtacaaggtttgcatatttgcttatggtcaaacagggtctggtaaaacttatacaatgatgggtccaccagggcgtgatcagaaaggcatcatacctcgttctttggagcaaatttttaagacaagtcagtctcttgaatctcaaggatggaagtacagtatgcaggcatcaatgttggaaatatacaatgagacaattcgtgatttgttagcacctggtcggtctaataactttgatctgtctaccagtaaacaatacaccataaagcatgatccacaagggaacacaaccgtcactgaccttactgttgctgatgtttttagtagcgccgacgtaacttctcttctagcgaaagcatcccaaagcaggtctgtgggtaggacccaaatgaatgaacaatcttcccggagccattttgttttcacactgaagatatctggatcaaatgagaacactgggcaacaagtccaaggtgtccttaacttgattgatttagctggcagtgaacgccttgctaaaagtggctccacgggtgatcgtttgaaggaaactcaggcaatcaataaaagcttgtcagctcttagcgatgttatctttgcaattgcgaaaggagacgatcatgtgcccttcaggaactcaaaacttacataccttttgcaggtgagtgacttgtgcaaatggatgccttgccttggaggtgattccaaaacgctgatgtttgtcaacatttctccggaggcatcatccgttggggagacgatttgttcattgaggttcgcttcaaggcattggggatatcatttggctgaagctgatgaggccgcttgcttcttgtaa

SEQ ID NO: 71391 - DNA, 911 bp, Oryza sativa
  Clone ID: PAT_MRT4530_71870C.1
tttgcttgcagagtttctttgtgtgagattattgaccttctttgataccactagcctagtagaggcaagtgattggctgtatgcaattaagaagttggatctaccagctgcatggactcttctaaatggtcggatcatttccgcatcaacaaggctgatggacaaccaattgcttgggctaagttctctaaaggattcaagaaggcccatagaccaccatgaatagatatattgaagaagtgtgagttctgtgcactcaatcaaagggagcataccgtgacaaagtttcttaccaagttcaatcgtcgtgcacgttatgctctaagaacctgcttatactgatgaggaaagacaagagaagttcctagagggactaaataatgagttttcaattaaattgatctctggtgagactatgctgttgaatatgctgattttcatatgttagtggacaaagcaattcggtaggaagataagcaaaacaggatggacaatcacaaagaggagaatggttgctttcaaggaagcacgaggtagcaaccagaggctgcgtgtcaagctacttcatattgatggatcatcttctctatcttacaacatattataacaccaccattcataataacaatagtgggggcaacgatgtcaaaaatgttattgaaggtcctcaaccgacgttgatttagcaggatcagtctcaagagagtgataataatggagagaagcagttgttgtgctttaactgttttgagccaggttattttgcaagacagtgtccgaagctgaagcgccaatgatcacaagtgcatgtcaacaacatcataatcataggagccaatgcagcgccagttatgtcttaaagtcatcctggttcgacgtgttaataagtagtgaaggttttttcgaggagc

SEQ ID NO: 71392 - DNA, 1138 bp, Oryza sativa
  Clone ID: PAT_MRT4530_71871C.1
gctaccaagtaccaatccagcaattgcgtccaaacatcaacacagcaacagaataacaaggccaccttcaaaacataaaccaacacactaacatggtaattctccggtactcaaaaaagaattccaaacaaggcagcatgttcatgcaaaattgcaccaattactcgagaaatctgaaagtagctggggtggattgatcgaacatagtgcaagaggttcttgggctattataactcaggaatgaacgattttaaaacatctcaagctctaaaccaacttaggcggtggtagcagcagccttggcagcagaagaaagcttggacctcctctttgccaagctctcgctccggcgttccctctgctccttgagcctctgggcaagaagcttctggtactcagcagcctccgacttcttcttggcgatcctcttcttcttgtcagcgattctggcacgcttcctctggagggtgaggggagtcacaagacgctggatcttaggagccttgctcaccttcttgccattcttggtagtgaatgtcctgcggtaggtgttgacatatttgcggacatcatcatccttggaaaggttgaagagcttcctgatcttggaggccctcttgggtcccctcatcctgggcttctcagtgtcagtaaggccaggcaggtcattctcacccttcttgacaatcaccaagttaataacagataggtcctggctgacgatgcaaccacggacagacttcctcctgcgctcaccatcacgcctgccatacccacggaagcaaggtgtgcccctgtgaagaagaaggcggacacgtccagcagtgagcactccctgcttcatagggaaaccctgcttgtcacaaccccccatgatcttgaagacatagcccttgaattcctcgcccagagcatcgccactgacctcctgagagatcctcttgtcaaaaaatgcacgcagcttctggtcgtcatcgatctcgagcttcttctggcacccggtggtcgggttcgcgatgttgaacttcatggttgcgaagcggcgcgagctcgcgggcggcgagcggcgagtgcgcgggggagcggcggcggcggcggcgcgagggctagggtttttgaacgagagcccggccggccg

SEQ ID NO: 71393 - DNA, 347 bp, Oryza sativa
  Clone ID: PAT_MRT4530_71872C.1
cggaatctggtcgaccatgcgtccgcccacgcgtacgggatattgagcactcaccaacccagaggaagcgtgccagaatcgctgacaagaagaagaggatcgccaagaagaagtcggaggctgctgagtaccagaagcttcttgcccagaggctcaaggagcagagggaacgccggagcgagagcttggcaaagaggaggtccaagctttcttctgctgccaaggctgctgctaccaccgcctaagttggtttagagcttgagatgttttaaaatcgttcattcctgagttataatagcccaagaacctcttgcactatgttcgatcaatccaccccagctactttc

SEQ ID NO: 71394 - DNA, 457 bp, Oryza sativa
  Clone ID: PAT_MRT4530_71873C.1
ctagccctcgcgccgccgccgccgccgctcccccgcgcactcgccgctcgccgcccgcgagctcgcgccgcttcgcaaccatgaagttcaacatcgcgaacccgaccaccgggtgccagaagaagctcgagatcgatgacgaccagaagcttagactggattcattggattgcgtgcctctgcacagaccaactgtggaatggtgatcgttcctgtgtgaatcaggcgtgcattttttgacaagaggatctctcaggaggtcagtggcgatgctctgggcgaggaattcaagggctatgtcttcaagatcatggggggttgtgacaagcagggtttccctatgaagcagggagtgctcactgctggacgtgtccgccttcttcttcacaggggtaaaaaggctctatttctattattgactttcggatattcatgcccttgctctgaccatattatg

SEQ ID NO: 71395 - DNA, 306 bp, Oryza sativa
  Clone ID: PAT_MRT4530_71874C.1
atggcggttcaatctgcagagcgcggcgtggaggctccacctctgacgctgtcgatattcgagttcaacagtaaggtgatgcaggacgagctgcagaagctggcgctcaaggtgaaccaccacgaggagaacatcaggtttctcaagtcggagctcaatgccgtcgaggactcgtgcgctgacctgggcagtgagatcctaatgccctgtgacaccttgcttttgtatatacttttaatttacggattcgtggttatattcgtgtactctagtaatgctatatatcggtaccatgatgcagaataa

SEQ ID NO: 71396 - DNA, 2244 bp, Oryza sativa
  Clone ID: PAT_MRT4530_71875C.1
accagatgaaaccaggtttctgaacaagctgagctaggaatcctgcagctgggtggcagtagccgtgtccatggcgcgcgcggcggcgacgtcgacgtcgacggccggtgtcggtgtcgggcatggtggtgaccctgacgacgagcggcgtgcggacgcggtggtagccgtcggaccagacgatctcgccgaagtcgtaccggccgcgcgacagcttcgccggcgcgacggtcacgtagtaggaggccgtgtcgcggtacggggagaaggacagcgccggcggccacacggcggcgcgcgcgccgtgcgggctgacgacggcggcgcggtacacggcgtccctccggggccccatgttcgtcaccgtccgcttcacggtcaccgtcgcgttgagccgcgggagcacgatggccgggtagttgaggtcgtactccggcggcgccgcgccgccgccctcgccgccgcagctcgtgtcgagcgacggcgaggggagcaccatctggcgtatctggtacctggtgtagccgaggccgcagaggaagaggacgtggtcgcgcacgccggcgtcgtagacgaggcccgggtccagcgcgcgcagcgggtcgacgtggccggcgccgacgtcgaacgcgtccgccgccttcagcgtcccgccggccagcatcacgtcggacgtgtcgtcgtacatgtatgccgtggtcatcagcgccgacttgatggctgccggcgaccacgtcgggtgcacggccctgacgacggcgacgatgccggagacgtgcgggcacgacatggacgtgcccgagtcgaagttccacgtcacggagcgcttgtccagcgggatcaccgtcggcgacgacatgggtggccacgccgccaggatgttcacgccgggagcggtgacatcaggcttaaggatgtgaggggagatggagctggggcccctggaggagaagtaggcgacggccggcgccggcgacttgccgacgagcgtcgtgctcggggagaagcgcgcggtcggcgggcggctgctgccgcggatgtagtcgaggatccgggtgccctggcggaggtcgacgtggacggtggggaggaagttgtcctgcgtcgacctgcgggagatggtctcggcgaagatcaggccggcgccgccggcggcgtacaccgccagcgccgcgacgccgctggacgccgtcgtggtggagaagcacagaacgatcctgccggacgccgccgcccggctcccacgagggagacattgttgccgagcgtgatcaccgtcgggaacctcctgtcgatggtgctggcggcgacggtgatcacccacggcgacacgttctgcaccatggcggcgtcgggcccgtcgttcccggccgagaacaccgccggcacgccgagctgcatcgcgtggaacgccccgatctcggtgctcgtcatgaacagcggcatgagcggcggcgtcgagccgagggacgccgagatcacgtggacgccgtcgcgcagcgcgtcgtcgaacgccgccaggatgtcggcgtcgctgcaccggcccgtcaggtccttgaaccagcacaccttgtacacggcgagccgcgaccacggcgcgcccccgcgcgccacgccgcggcccaggccgccgacgtagctggcgtcgggcgacacggcgcccaccgccgtcgacgccgtgtgcgtgccgtgcccgacgcggtcccgcggcgaccggtactcggcgccgccgctggtgttgagcggaccgacctcgctctcgaagccggcgaggtagtagcgcgcgccgatgagcttccggttgcacgccgtggccgggtcgaacttctcgccctccacacacgtgccgcgccatgacgacgggatgtcgcctaggtggccatcatccctgaagctctgggattcaggccacacacctgaaaaaacacataggtatatgaaactgtcaggaaatttacctgtatcaagaataccgacaattatatcgtctccgtatttcaattgcattccggctgattgttcattctgaatatgcaggctgaggcccatgaagtcccagcttcttgttgtatggatctcgagcatcctactcctgaatattgatatgacctcttctgcttcagataatttggcagcttgcgttgaattgagcattgcagcaaaaccagagaatccatagctgtagctatacagaatagcatctcttgcttcatccgacctacaaaagttgagctcacaagtgac

SEQ ID NO: 71397 - DNA, 1369 bp, Oryza sativa
  Clone ID: PAT_MRT4530_71876C.1
taataatgatgttttcctctgttcctgtttcccttctggcacgaaaccaaaactgtctactatcagctaaaagaaagctcgcggctcgcgacgccgcttctcacgctggcagctcgagccgcaggccgatgcgactcgactccgcgctcaagccgctaaggtcgcagcgcgcctccgccgacgaaggcctcctcgaggcgcgcacgacgagcggctggaacccgagcgtgagctccagcccgacctcctcctcctccccctcttcgtgctccaccggcacggggctctgctcggcctggctcacgtgtgagccggtctcgacctcggtatcctccgatcccgcccgcggcggcgtcacgtcggcgatggccatgtcgttgttgtcaccgtcgtccacatggtcgtcgtcgtcgtggtcatggctgccagccgactcctcgtggacctcgtggctcagcgcagggtggtggtggtcgtcgtcatggtcaccgacgacgaccaccgcctccggctccgtctcgtgcgtcgggctgctgctgctgggggacgcggcgcgcttggcggcggctgctccggcaagcttggcgccgtgcttggagttggagctggaggaggcgcgcttgaagcgggtgcggccgccgcgcgcgacgcggagcaggttggcggcggcgtcggcctcggcgtccttggagacgtggcggatgtcgtaggccctgagcggcggggtggcctgggcggcggcggcggcctcagaggagacctgcacgacggggtcgcccttgaggacggcctcgacggcggcctggcacgcctgccactggcccgaccagagcaggccgacggagccgtagatcgggttgacgatgcggccgcaggcctcgtagaggagcgagcggaagacggcggggcggaggtggtcaggcccggcagcgagcaggttgagaagcccggcgcggccgtagaacttggcgaggaagacggtggcgttggcctgcgcctcgggggtcttgatccactgcaggcacggacggatggtgcacccttcgctgcatcccttgcgcagcacccggcaaccgttgcaactcatccgcatcttcgaaatgcttctgcaaacccttatcaactgggcgccggacttgttggagatccgaggtggtactattcttccttcttcttctccaagcctgtgcgaggactcgactcgatactgccttgcttgttggagatgagttgagatggagatgtttgcctactgcccctgtttccgctgcctctgtgggcgcgcgcgcccaataccgtgggcgggtttccggatcccgcctcccgccaggtccccccactctcctccccctctcagtttcctagtcat

SEQ ID NO: 71398 - DNA, 241 bp, Oryza sativa
  unsure (1)..(241): unsure at all n locations
  Clone ID: PAT_MRT4530_71877C.1
ggcccacccaggncaggcccacctcgccgtggatcnccngagtagggggttgccggccggagcgnnntganccaccatgatggtcggcggcgggngcgagtangngacggcgctgcgaggacgacgagcggcggacggatctgcggcgggcggggcngctngntcgggggcaccatgtctgccgtagtgtgtnggaagaggtcctcctncatcttcggcgacgagctcatcccttcctccc

SEQ ID NO: 71399 - DNA, 456 bp, Oryza sativa
  Clone ID: PAT_MRT4530_71878C.1
ttttggtataagtttcatgaaggatgtttatgttctttatccatttggggaatctgatggttcttattggctcatgaaaatatcgaatggttgaagttttgttgatgacgtggatgcgttaactttgcaagaaaggattcatctttcatttatttagatgtatctgcatccatcatacatgctccaagtgaatgcattttttttacatcatgccaatcgcatgttgcatttgccacaagacataaatcgtcgtggacagcagaatccaatgttcatgggctttatggagtagcttttcttgtcttcaactaaacaatcctgattgattgatgattggactggatcctcataagggaagtagcggtgctataggaatggtatgtgtttgatgcctataaaatctatccacagaatatttgggttctcctttttgttagttacacattggaatgacct

SEQ ID NO: 71400 - DNA, 867 bp, Oryza sativa
  Clone ID: PAT_MRT4530_71879C.1
cttggcgccatctgttcccgcctcatctcccctctatttaaccaccattgccgcctccgccgcttcccccaaatccactcacctcctccaccgttcgtccccttctcgcgccaccaccgcctgccgccgagagctctctcagccgtcgccatggccaccgctaccaacggcaacgcctccgccgccgccgccgccgctgactccgccgtccaggagcccccgcacaagatcgccaaggttgctcccttgctcaaggtcaagaagctctccgagaacgccgtcctgccgtcccgcggctccgccctcgccgccggctacgacctgtcgagcgcggcggaggtcgtcgtgccggcgagggggaaggcgatggtgccgacggacctcagcatcgccatcccggagggcacctacgcgcgcgtcgcgccgaggtctgggctggcgttgaagcactcgatcgacgtaggcgccggggtgatcgacgccgactaccgtggcccggtaggggtcatcctcttcaaccactccgacaccgacttcgccgtgaagcccggcgaccggatcgcgcagatgatcatcgaggtgatcgtgacgccggaggtcgccgaggtggaggacctcgacgccaccgtcaggggagagggagggttcggatccaccggcgtctgaatgaatgaagcatcgtcgtcgttagctccaggaagttgggggagttcatttggtctgtgatggatggatgggtgatgtcgtgatgaaacacttgtatcctcttaatgcctcggatgcttttgtggtgtcgaatggaatcatctagcctaatgaatctaatgaaattcgtatgcttttgcggtgttgaaaaaaaaaaaaaaa

SEQ ID NO: 71401 - DNA, 2686 bp, Oryza sativa
  Clone ID: PAT_MRT4530_7187C.1
atggcctcctccctcacgccccgtagcccttacccgaagaaggagaacttgggcaacgcgcggcgggggatgggggtcaagcctggcccgcgccgcaatgtcctctcggcaatcaacaatggcggtggcacgaacagcgacacggcgtcggtggacggcggcgagggcggggctgggccggcggcgcctgtgatcgagttcaccgggagggaggatgtggagcggctgctcgccgagaagatgaaggggaagagcaagaccgactacaaggggagaactgagcagatgagtgagtacatcaagaagctgagagcttgcatccgctggtacattgagttggaggacggctacttggtcgagcaggagaagctccgtagtacgatggatgcagagaatgcccagcacgccaagttggaggcccagcttagcagtgatctggaagagctgaaagctgcacacctgaacttgacgcggcagtgcgattcgttggaggaaagcttcaacaaggagaaggccgacaggatgcttgctgtggagtcctacgagaaggagaggcagcaaagggaatcggctgaggcgtccctcgacttgctgtcggtggacctggaaagagtcagccatgaagcaaaacggtttagtgagcaactgaaaatggtccaagacacgaacaaaagactgcaggagtacaacaccagcttgcagcaatacaacagtaatcttcaagctgatgcctctaagagtggggacatcatctcaaaactgcaaaaagagaagagtgccatgatggaaacaatggcttctctgaaagatttaaacaattcaatgaagaaccatttggattcttctaggacttctcaacaagaggccattagaatgaaagaacaacttatgaaagaagtggattgccttagaattgagctacaccaaattagagaagaccgtgatcagtctgtttctcaagtaaataccttgagtgctgagcttgctaattacaaggaactagcaggcaagtctacaaaagactgtgaaagcttgagtgtaaaagtgtcagcctttgaggaaacatgtagtatgcaacaagaacagattcaaactttgcagaaacaacttgcagttgcaacaaataaactgaagcttgctgatgttactgcaattgaggcgatgacaggatatgaagaacaaaaggtgataataaaagatctggaagaacgtttggcatccgcagaatttcaaattgttgaagctgacaagctacgaaagaaactgcacaatacaatattggagcttaaaggaaacatcagagtgttttgtagggtccgaccacttttgcaagacaacgattctagtggtgcagaagaagcccttatttcatatccaacatcagttgaatctgccgggcgtggtattgatttgatgaaccaaggtcagagattttccttctcatatgacaaagttttcgatcacggtgcttcacaagaagatgtgtttgtggaaatgtcacaactagttcaaagtgcacttgatgggtacaaggtttgcatatttgcttatggtcaaacagggtctggtaaaacttatacaatgatgggtccaccagggcgtgatcagaaaggcatcatacctcgttctttggagcaaatttttaagacaagtcagtctcttgaatctcaaggatggaagtacagtatgcaggcatcaatgttggaaatatacaatgagacaattcgtgatttgttagcacctggtcggtctaataactttgatctgtctaccagtaaacaatacaccataaagcatgatccacaagggaacacaaccgtcactgaccttactgttgctgatgtttttagtagcgccgacgtaacttctcttctagcgaaagcatcccaaagcaggtctgtgggtaggacccaaatgaatgaacaatcttcccggagccattttgttttcacactgaagatatctggatcaaatgagaacactgggcaacaagtccaaggtgtccttaacttgattgatttagctggcagtgaacgccttgctaaaagtggctccacgggtgatcgtttgaaggaaactcaggcaatcaataaaagcttgtcagctcttagcgatgttatctttgcaattgcgaaaggagacgatcatgtgcccttcaggaactcaaaacttacataccttttgcagccttgccttggaggtgattccaaaacgctgatgtttgtcaacatttctccggaggcatcatccgttggggagacgatttgttcactgaggttcgcttcaagggtaaatgcttgcgagatcggaataccaagacggcacacacaagcccggtccttcgattccaggctgagctatggctgaagttgctgtggccatcatgatgtgatgataatcgatcagcattggggatatcatttggctgaagctgatgaggccgcttgcttcttgtaacttgtacagtaggaaggagagtggcactgcgctagtgcgctgtgagcagaagagaacacgcatgcatcatgtgttttctttctgttgtagctgatttgagcaatattaactgcattgcaatgtattttctggagtaactttgtatgcaaccgtgggttccaaaatggtgtactacttttgcccggcagaacttcgctgctggctcctgcatcaaaatgatggttatgcc

SEQ ID NO: 71402 - DNA, 912 bp, Oryza sativa
  Clone ID: PAT_MRT4530_71880C.1
atgacccacaactccagcagcagcagctcatgggatttggacatgagcctcggcagccaccaccatcccctcctcttcgaccagccgccgccgccgccgcccccgccgccgccgccgccattacccttccacctccaccaccaccctctagatccctctccttcttcttctttggttcctcctcctccccatcatcaccaccatgcccatcacctccatcatcctctcgacctggaccagcggcgtggtcaccatgactatggcggcggtgaccaggggggcgacgaggagctgaggcttcagcaggaggcggcggcaggtggtggtggtggtggccaggacggcggcggcggtggggatcaggacgccgacgaggagctcggcgccatgaaggagatgatgtaccggatcgccgcgatgcagccggtggacatcgacccggcgaccatcaagaagccccgccgccgcaacgtccgcatcagcgacgacccgcagagcgtcgccgcccgccaccgccgggagcggatcagcgagcgcatccgcatcctgcagcgcctcgtcccgggggggaccaagatggacaccgcctccatgctcgacgaggccatccgctacatcaagttcctcaagcgccaggtccaggagctccagcaccagccgggaccgccgccgccgccgtatcccgccggagctgcaccggccgccgggcccagcacctcggccgtgggcccaccgggccggccattcttgccgctgggtggaggagggcccatgatcgactgggtcggcctgaccaggccggtggacatccatgggccgacctcgtcgtcgtcctcgtcgtcgatgggcggcgccttgggtttcgggttcggctgcggcggcggcgggcagagcagccatgggatgcactga

SEQ ID NO: 71403 - DNA, 1428 bp, Oryza sativa
  unsure (1)..(1428): unsure at all n locations
  Clone ID: PAT_MRT4530_71881C.1
ttatgtcttgaactgctctatcaatcccagtaggctgtatgtttcagcatctggcatcgctcctctcaaaatcatcgctcttaacaaatctggctcataaacttttgcctttacatgagctttaagaagggtattatacacaaatgaattcctacagtactttgattcattcagttcgtcaaaaactctctttgcatttaccaagtcgccattttctgcaaagctttcaagtatcatatgagttgtctccaaccatggtgttgaacttttcaccttcttggtgacaacttctttctttgctatatccatcgtcttcagagcttctttaacaatacctgctttcaagcagcctaacgtcaagtggcggtatgtgatagcattcggctgacaaccatttgctctcatttctttaaacacagccgatgctttatccacaagaccatgcctacaatatactgataaaatggaattgaactgttctgtcagcttcggctttcttgttgattcaaactttccccatatctcttctgcctgatcgatggagccaacctttccaaatgcttcaattgctagtataaagcttttgggtcgaatatgagggagaccttgcataagatcccatgtcatctttagctcctttgccttcccatggtatccgtacaagataagcagaatttccaatgtagaccaattagttcccgtcatagaattctcaattgcttcatcgatgttgtgttcattggcctttatcttcagtaggatgttgtaggttgacgtgtgaggggtcacacgatcgcctttcatctgagcgaggatcttggaaatagttttctgacgccctggagaagaatggaggatgatcaaccggttgtatacatatggtgaaatcggcaacgacagttccctcatcttcctcttgtaaccatatgcaagcttaatcaagcccaaatccaaacaagccataacaaggttgttgtacagcagctcattctggtattcttgaggtatgcgaaggaagaggctttcagcttcagaaatgccatgaactttagctgtgaactccaggagatatgagtaatctagctcactaagcttgtagggcctctctctcatgatccgggccctcaccgacgccgaccggttcacccgctgggccagcgacccctcccgctccgccttgtntgccgcaagaccgggaggaggaggagggagagctataccggcgcctcctgagctcgcaaagaaaggtgcaacggggaccgcgaccgcggcggaagggatccgcggccgccccccgcggaacaacgcgcgcaccatgggttgggtgcggtgcgggaattcttcgaacagctgccggtgtttttgggcggcgttggcttgcccatcgcgctcttttaccccgcggggctggggattaaccccccccat

SEQ ID NO: 71404 - DNA, 287 bp, Oryza sativa
  Clone ID: PAT_MRT4530_71882C.1
gcacgaggtcccctccgcgtcaggatcgaacatcgcctcccctcccaccggcaaatcaccgcgccctccacccggatcctcgcctccgcgtcgctggtctgcgcctgcgagaggaatagaatccgcctgcgaggaggaacgcctcgccggtcgggtctcctccggcgccactgatccagggctcctcaaccctacaagccgtcgatcctgcctacgaacaaggtaagagtgcttctcgatcccgttcctgtacatgaggaagcgacgcgcagcgcgtgggagggcag

SEQ ID NO: 71405 - DNA, 525 bp, Oryza sativa
  Clone ID: PAT_MRT4530_71883C.1
atggcggccatgaagaagccgtcatcggctccaaatttgcacgttgacgatgaatgcatgattggcgtcggcaacgacgacaaggccgtgcttgtcattggcagagaaacaatctgcacgggcgatgatcaccaggaacagccgaacaggtttgccattggtgacagccacgaggataaatgtatgccaatgatcgatgaaagacgaggatacttctggtttgtggacgagatcacatcaccggcgtcgatggcagtcatgaagacgccctggcggtgcgggtctgagacggtcaaggccggcgagcatgacactgtagctcttggtatgaggatgatcccgacgtgccgaagcgaaagcgtcgtggatggatggcacgacgacctcggccggctgaagcgaagggatcatggctggactcggttacgacgtgcgggcaccaagcaatggtgctccagcgttctcctcgggcggctcgacaattgtaacgtgaggaagatcatagcactggcgaggatgacttag

SEQ ID NO: 71406 - DNA, 2850 bp, Oryza sativa
  Clone ID: PAT_MRT4530_71884C.1
atgtgctcccgcgtggcggcggcctccacctcccacgcctcgcactgcgccgacctcctcacccgcctgctccgccgcggccgcctccgggaggcgcgcgccgtcgcctcccgcctcgccctcgccgacgcccccgaccccgccgtctccgacgcgctcgtcgcctgccactcccgcctcggtgacatctcctccgcgctctcccacttccaccgcctcgtccagtcgggcgccgccccctcgcccgcctccaccgccgcgctcctccgcgccatgtgctccgcctccatgtccacagaggccatggacgttctcgtgctctcgatgggcaacccctcgccgttgcccgtctcggacttcgccctcctcatcccgggcctgtgctccgagggggccgtcgacaaggcccgcttcctgttcgacgcaatgcttcgctccgggctcacaccccccgtccgcgtctacaggtcgcttgccttcgcatactgcaaggccaggcgctccctcgatgccagcgacatgtgccagctgatgctcatcaaagggatgtatctcgatagggagctcagcacggcgctcatccgggtgttttgccgggaggggcggctggagcctgcgctggatgtgttccgtaggatgaagggggatgagcatgttcagttggatgcgtacgcttacacgacgatgatatggggattgtttgagcatgggcgtgtcgatcatggcctccagatgtaccatgagatgattgacaggggcattcagcctgacgcagcaacctacaatgtgatgatcaggtggtattgtaagagcaagtgggttggtgctgccatggatatctacaaggtgatgataaggacgggtgttgcacctgacttgaggtgctacactattctgatggcatcgctctgcaaggatgggaagttgggtgaggccgagaatctgtttgataagatgctggagagtggccttttccctgaccatgttatgtttatttcgatagcgaggttcttccccaaaggctgggtggttttatttgtgcggaaagcattgaaggctgttgccaagttggattgtggcgccaagctgctggagctttcttcgcttgccggtgggtgctcgaacatgagtttacagaaggaggctgaccatcttctcgatgaaatagtgacaagcaatgtgctccctgttaatatcgttctcaatttgatgataattgccatgtgctcggaggggaggctagatgtgtcctactatctactggggaagctggtggcttatggctgtgagccctctgtcttaacatacaatatcgtgataaaatgcctgtgtgagcaaaatcgtatggatgatgctagggcactcattactattatgcagagcaggggtgtcagacctgatatgtccacaaattcaatcatggtaacagcatactgtaagattggtgaaatagaaagtgcacttcatctgtttggtgaaatggccaaggatgggatagagccttctattgcagtatatgattctattatagtgtgcttgtgtagaatgaggcgccttaaagaagcggaggctacactccgccaaatgattcgagaaggattagcaccagatgagattatttacacatcacttattaatggatattccttgacgaggcaaacaaggaatgtgtgccgtattttcgatgaaatgctaaagagaggtttgcaacctggtccccatgcttatggttcacttataaatggcctggtaaagggaaacaaaatcagaaaggctcttggttatttggaaaggatgctggaggagggcatcgcaccacaaacagtcatctatacaatgcttataaatcagttttttaggaaaggagatgtaagattaggtttagatcttgttgttttgatgatgaaaaccaatgttgcacctgatctcatcacctatggtgctttagtcactggcatttgccgaaatatagctcgccgaggcatgagaccgtctctggctaaaaaactgaaggaagcaaggtatatgttatttagaatgctgcctcaaatcattgatacaagaaatggaaaacagaaggacaatcagatatgtacagaggaaatgattcaggttgctcagggtataattcaggatcttgaagaaaatggtatggtgcctgatttacatatttacaatgggatgattaatggcctttgtagagccaataagatggatgatgcttacagcctcttatctgtgatggaccaaactggtattcttcccaatcatgtgacgtatactatactcatgaataatcaaataagattaggagacatcaaccatgctatccaactatttaactcattgaacagtgacggatgtgtctttgataagataacatacaacacttttattaaggggctttctcttgctggacgaatgaaagaagcactttcgtttttattgatgatgcacaaaagaggctttgttcctagtaaggcttcctatgacaaactaatggagcttcttcttgctgaaaatgcaattgatattgtcctacagttatttgaagatatgcttttccagggttatactccacgatatgccaactacacttctttgctattggtacttgcaaaagatggacgatggagtgaggctgacaggatttttacaatgatgctgaagaaaaggaagatgtttataaattggtgggagatcacaaagacagaactcaggatgcttcaggaaactccaacctcacagtacttggtatctaactggtcttttggttcacttgctacaggacaaagggaatatgtggcactgcatgcgttctgccatctcattgttcagctgtttgaataa

SEQ ID NO: 71407 - DNA, 197 bp, Oryza sativa
  unsure (1)..(197): unsure at all n locations
  Clone ID: PAT_MRT4530_71885C.1
cggatcgngngncgcngtangtcnncctcgtaagcccactcccaatatanatagatctctctttaaatagtacgtagtcaggttataagatatttnnactttggntaaagtcaaactgttttaaatttttanctaaatttatagncaaatatattantatttatantactaaattngtttcatcaaataaataatta

SEQ ID NO: 71408 - DNA, 391 bp, Oryza sativa
  unsure (1)..(391): unsure at all n locations
  Clone ID: PAT_MRT4530_71886C.1
actagcaatatttgtcctcttttgtctcatagcagcaatagtcctgtatnttacaccactccaagttcttgcgagcattggcagggttctatgtcatgaggcacccgaggttcagatataggttgccttcaacgccagtgaatttcttcagacgactgccagcaaggaccgacagcatgctataaaatagctgccatctggtggccttatcattgtgataaattggatggagtactccnatgccgattactgtagtctggcttcgttttgttgttattgtaactgtgtgttcttagtacttgagagcctgtatatcgtattagcttctgaatgcagggnnataatgtgtttaaggcttcttgtgaaaaaaaaaaaaaaaaaaaaaaaaaaa

SEQ ID NO: 71409 - DNA, 515 bp, Oryza sativa
  Clone ID: PAT_MRT4530_71887C.1
taagcaacagcccacgcgattcatctcactcagtaattaagctaattaaaatcttggaccatgtcggacaagtgcggcaactgcgactgcgctgacaagagccagaagaaaggtaccagctatggcgtcgtcatagttgaagccgagaagagccacttgaaggaggtcgccgccggcgaggtcatgggtggcctctccatggaccaggccttcgtgcaggcccccgagcaccgcgccaagccgtccgtcgccgaggccgacggcatcccggtcatcgacctctcccctctcttcgccgccgatggggtggacgtggacgcgctcgcggccgaggtcgggagggcgagccaggactggggcttcttcgtggtggtgcgccacggcgtgccggaggaggtggtggcgagggcggcggaggcgcagagggcgttcttcgcgcttccgccggcgcggagggcggacgtggcgcggagcgaggcggcgcagatggggtactacgcgtccgaccacaccca

SEQ ID NO: 71410 - DNA, 132 bp, Oryza sativa
  Clone ID: PAT_MRT4530_71888C.1
atgatggtgcgcatgatagccgcacaaccgctaccacagggagggccccaagctcacccccacctaaagctggcaaaatgggtcatgctctatcgggctgagccaggcacgttgctacagtacccgccctaa

SEQ ID NO: 71411 - DNA, 1338 bp, Oryza sativa
  Clone ID: PAT_MRT4530_71889C.1
tttttttttttttggggggttgtctatattcattcgtaaaagttaagtgaaggaagtatctcacaaaccctcttctacaatgtcacattaccatcaccggcagatagagaagccacatcatacgattgtttacatgatatactgtcacagacattattaacttatgacgcaaaggctatatggttgtccacgcatcatcatctgaaaatttactgaacatgatctagccggcgcgttaattcttcctgaaatgcgtgatctggacgttctccacgtccagcttcttgaagttgctgttcttcctggtgctgaagaattcgccccagttgtaggggttgtacctggccgggctctcgtcgctcacgacctcctccagtggctccaccatggtgtggcccgccgggttgaagaagaaagggatggagaacctctccttctccacgttcaccgccacccggtgctccgcgctctcgtacctgtcattgctccacacctggatgatgtcgccgacgttgatgatgaaggagtgagggacgggcctgacgcgcacccactcgccgtcggatcggcggcggacgtcgaggccgccgacatcgtcctggtagagcacggtgagcgcgccggcgtccttgtggcggccgacgccgagggcgaggtcggggctcgggcagggagggtagtggttgagccggatgaaggtggtctggtcgtccttgaagaagccatggaggcggtcgggtctcaggccgaggctcctggcgatcagctccagcagcttgaacgccagctcctccaccgcttcgccgtactcctccattgcctccctgaatcccggcaggtcgtcgggccacttgttgtcgaacaccaggtcgccgtcggccacggcggtcgtcggcggcggcggcgtctggcgcgggacgaggtcgaacacctccttccagtccctgacgttcttggtgtgctcggacgcgtagtaccccatcggcgccgcctcgctccgcgccacggccgccctccgctccggcggcagcgcgaagaacgtcctctgcgcctccgccgcgcgcgccaccgcctccgcgggcacaccgtggcgcaccaccacgaagaagccccagtcccggctcgccctcccgacctccgccgcgagcgcgtccaccccgtcggcgtcgccatcgccggcggcgaggagaggggagaggtcgatgaccgggatgccgtcggcctcggcgacggacgccttggggcggtgctcgggggcctgcacgaacgcctggtccatggagaggccgcccatggtcgatcagtagctggtggcgagaagctgtagcccgcgtgctc

SEQ ID NO: 71412 - DNA, 255 bp, Oryza sativa
  Clone ID: PAT_MRT4530_7188C.1
atgtgtgccaacggaaagttgcagacgttctccggtccggcggttttggctctgcgcgccaacaagttgttcgctctcgcgcgcgcggcgacaagtgcaccaccggccgggcccgtgccaatcgccttcgcctacggcaccaactacaccgccgcgcgcacctcgcgcatgcgtgtacccctgcaggggctccacctccatcggacaccgatcgagaccgacgagacgcgccggcccggccgcgtgttccgcgtg

SEQ ID NO: 71413 - DNA, 471 bp, Oryza sativa
  Clone ID: PAT_MRT4530_71890C.1
ggaccagtgcgacgcggtgtcgccgtgcgggcccaacggcgtgtgcgacaccaacaacatgccggtctgctcctgcctccgcggcttcaccccgaggacccccgccgcgtgggcgctgcgggacggccgcgacgggtgcgtgcggtccacgccgctggactgccgcaacggcaccgacggcttcgtcacggtgcgccacgccaaggtgcccgacacggagcggagcgcggtggactggagcctgacgctggaccagtgccggcaggcgtgcctccgcaactgctcctgcaccgagtacgccagcgccaacgtcagcgggcggcgccggcggtggccgccgcgcccggcgccggctcgggctgcgtcatgtggaccacggggctcaccgacctgcgcgtgtaccccgacttcggccaggacctcttcgtccgcctcgccgccgtggatctcggtacgtacgaacgaacgccg

SEQ ID NO: 71414 - DNA, 594 bp, Oryza sativa
  Clone ID: PAT_MRT4530_71891C.1
atgggggtggtgaggaaggcgaacctcgctatggcgacatcaacaaccgtgggcagcggcggcggtggcggtggtggctctgcgcctgactgcgcggcaacggcggcaagcccctggggcgcggcgccgtggcagagaggttgctgtgtttgggctgcagagaaccccttgaccacccgtccaacgacgcggcgattccagcgcggtgccaggtgttcgtgcccccacgacggcgatggctgcttcgccggtgccggcaccgtcaccgatgtggcctccagagagttctggcggcaaggcgaagctctcaccatggtcggcggcgccgcttgcgaaccacccctctaccctcggtcgtggctgagcagcgtcgctgtggaggacgacgagagacggccggattcgaggagacgaggaatttggggattggagttggacgaagacatcgcgcagcacagccgtgtggcaccgctcgctcccgcagcccgggagagcggcagcgtgccgccctccaccacgctgccgctctcctgggctgctggagcgagcggtgccacacggatgtgctacgcgaccgccggtcccacagaatga

SEQ ID NO: 71415 - DNA, 1593 bp, Oryza sativa
  Clone ID: PAT_MRT4530_71892C.1
atgagccggaggagcggcgtggcgacgagccgccggaccaggcgggccgccgagcaggaggtgcagccgccgccgctgtttgccgcgaacccgatcttcctgtgcgaggacgacggctcggcggggcggctgatcaaaccgggcggcggcgtacgcggctacgggccgggctcgctgcacgcgctcgtgcgaggccgcggccgcggccgcgacgtggcggcggacgacgacgacgacgacggtggcaacaagatgctgccgttgccgctgccaccgtgcagggcccaccgcgaggggcgtggtgggacccgggttcccacggcgtggcacgttgggcccacgatcgtggtgggcccgcatggcgcggtggtgaggatccgtgcgccgccgccgcctcagcagcatgacccgttcctggccgcctacgtggcgtgcaccaagggccgcgccggcgccggcaacaagaagaagaagaagaaagccaaggcggccgcgcgcggcgggtgcggcatgtggaacgggtgggcgtcgggcgcgaggtacgcacgggtgatgtcgtgcaggcacggcggtgccgtaaccgtgctgcagggcgccactcctcttcccgccgtcgccggctatgccgagtcgccggcgcaccccacgctggacctgtcccgcctgccggcggtgctgccggggaggagacggggtgaagaggttcgaatccaaggagacgaattctggcacatgacaagagtcttgcgccttggcataaatgacagggttgaactatttgatggcgcgggtggtttggttgaaggatctatacaaaaagttgacaaaggcggttcagatgtgaagttgcttgaggatgctagactcattgctcctgatggcattcaatggcatgtttatgctgcatttgggacattgaaaggtggacgtgcagattggcttgtagagaaatgtactgagcttggagcttgtagtgttacacctcttcttacagagcgatgccatacaatagcagaaaatagagttgacagattgcaaaggcttgtgttagctgcagttaaacaatgccagagaatacatggaatgttgctgaatcccccaattcagatagctgaccttcagcctgttgtatcacagtcaaagctcgctttcgtagcttcagcagaatcacctcctcttttaagcactttgccgaagtcctgcaatgaagaaagtgggcttttgattgttggaccagaaggagatttcacggaagaggaggtaaacgttttgaaagcatcaggcgctgttcctgtaggtcttggtccatgcagactacgagttgagacagccacaatttcactgctatctgcgctcatgctgtggtcagatgctcatcgccaggaaacactgaaatgcagttgggcttatcaaggagcaaaatcaaagagaatcgttccactggatctaagtgagcatctctgtaacagcatgacaattatggactggtcagtgatttgtgcaaatgaggaagggaaaaagtcacagcacgcacacagtgagaggattcgttcccacaacctccatttcaccgaaatactacatccgtcctaa

SEQ ID NO: 71416 - DNA, 2292 bp, Oryza sativa
  Clone ID: PAT_MRT4530_71893C.1
atggggaagagccgcggcagcatcgctttcttcggcacctacaggccaccggtgcccctggatatcttctcctgccccgctaatccgccgccgcagtctgccaaggacgagctgctcctcaccgacggggagtcatacaaccagaacgggcagcccatcccagcagcggcgctcaaagagctcctgacgttcttgggcaagaagaacccgaagctggcgtcggagtgcggcgccaccccggaggacgcggagaaaggccgcgtcaccggcctggtgttcgtctccgagagggacaggggcctggagacgctgcacgtggctttgcgcttcgtcgccggcggcaagcaggtcaaggtgctgagcctgggcaacatctacggtgccgacaccttcggcggagtgcgcatggaggacagcggctgcgtcgctggcggcttcaaagttgggcgtaccaccgtcggccactccctggtgtacgtgtccaccaaggcgccggtgaaagcacggcgcaccccgtggaccgtggtgtacagaaccgacctcgccgacggcaagaccgagcgcctgacgccgctgggccagtacgatctgagcccggcggtgtcgccgtccgggaagatggtggcggtggccaacttccagcagaacaggtggaacggcgagatcgagaacctcaagacggacattgtggtcatgaacgtggacaaacgagcgcagggccgcagcgaccgcaaggtgctcatcaaggacggcggctggccgacgtggggcagcgacaacgtgatcttcttccaccgaggcttcgacaccacgccgccctccaacaccgccaggtggggcgtcttccggttcgacatcgccgctggcaaggaggaacgcgtgacggatgagagcatcgatgccatgactccggcggccatcagcgagacccaggtggccgtggcgaccgtccgcgagaagtccaagcaggtcctcatgaaggtggagcgcgtggtgacgcagtacaggcacatcgagatcttcgacacggcctccaagacgtcggtgcccatcacccagaagacgaggcctgaaggggaccactacaaccccttcgtgctcgacggaggaacacgcgtgggctaccaccgctgtcgaaccgacaagctactcaaggtccaaaaccaaaagagtactccgacgacaagcatccagaggaggttcgacaagggtgaccggcgtgttcccgtccgtctccaagaacggcaagaagctggcgttcgtggacaacagttcaaggccgtgtggctcgccgacggcaggggcctccgcgtggtgtacaaggtgagggccaccaagagcgtcttctccacgtcgtggaaccagaacgacgacctggacacgctctacgtctgcgaggggccggccttctcgatcgacaagccggtgcagatcatgaggatccccaacgtgtcccgggaggactacgagaacatggagacgttcccgctcaccgacgaggagtacaactgcgcgttcccgtccaccaacgctgagggcaccaagctcgtgttccggtcaagcaggaacagggtggccggaggggagaggcagcacaagaacctctacatcatagacgcggagaagggggaggccgccggtgtggtcccgctcaccgacggcccctggaccgacacccactgcagctggtcgccgcgggagggctgcgactggatcgtcttctcctccaccggcaggcccgagaaagacatagtcaagggcaaggacgagccggagaaggaccacggcttggacccaggctacttcgccgtgtacctggtgaacgccaaagacatcaagaagggcgaggtgccggtgcccgtgcgggtgatccacagcgcgcccactatcgccgggcacatcaaccaccccgtgttcagcccggacatgaagagcatcgtcttcgccgccgacctcgccgcggtctccgccgaccccatctccatgccccacttcacgcactcggtcaggccctacggagacatcttctccgtcaacctgcgtgacaccacggacatggccaagaacagggacatccaggagttccaccgcatcacgcacagccgctacgagtactccacgccgacatggaccggcattgccgacgacgaggaggaccccaacgccaagtggaagatgctggagagcctgcccaacttcacgccgtggtgcccgtacgcgcgcggcgaagccggcgagaaagagggttggcacatgaccggacacctcaccatccaaaagcggtgctgctga

SEQ ID NO: 71417 - DNA, 2334 bp, Oryza sativa
  Clone ID: PAT_MRT4530_71894C.1
atggggaagagccgcggcagcatcgctttcttcggcacctacaggccaccggtgcccctggatatcttctcctgccccgctaatccgccgccgcagtctgccaaggacgagctgctcctcaccgacggggagtcatacaaccagaacgggcagcccatcccagcagcggcgctcaaagagctcctgacgttcttgggcaagaagaacccgaagctggcgtcggagtgcggcgccaccccggaggacgcggagaaaggccgcgtcaccggcctggtgttcgtctccgagagggacaggggcctggagacgctgcacgtggctttgcgcttcgtcgccggcggcaagcaggtcaaggtgctgagcctgggcaacatctacggtgccgacaccttcggcggagtgcgcatggaggacagcggctgcgtcgctggcggcttcaaagttgggcgtaccaccgtcggccactccctggtgtacgtgtccaccaaggcgccggtgaaagcacggcgcaccccgtggaccgtggtgtacagaaccgacctcgccgacggcaagaccgagcgcctgacgccgctgggccagtacgatctgagcccggcggtgtcgccgtccgggaagatggtggcggtggccaacttccagcagaacaggtggaacggcgagatcgagaacctcaagacggacattgtggtcatgaacgtggacaaacgagcgcagggccgcagcgaccgcaaggtgctcatcaaggacggcggctggccgacgtggggcagcgacaacgtgatcttcttccaccgaggcttcgacaccacgccgccctccaacaccgccaggtggggcgtcttccggttcgacatcgccgctggcaaggaggaacgcgtgacggatgagagcatcgatgccatgactccggcggccatcagcgagacccaggtggccgtggcgaccgtccgcgagaagtccaagcaggtcctcatgaaggtggagcgcgtggtgacgcagtacaggcacatcgagatcttcgacacggcctccaagacgtcggtgcccatcacccagaagacgaggcctgaaggggaccactacaaccccttcgtgctcgacggaggaacacgcgtgggctaccaccgctgtcgaaccgacaagctactcaaggtccaaaaccaaaagagtactccgacgacaagcatccagaggaggttcgacaaggtgcagcccccggagtcgcacgccgacgtggggctcttcagggtgaccggcgtgttcccgtccgtctccaagaacggcaagaagctggcgttcgtggacaacgagttcaaggccgtgtggctcgccgacggcaggggcctccgcgtggtgtacaaggtgagggccaccaagagcgtcttctccacgtcgtggaaccagaacgacgacctggacacgctctacgtctgcgaggggccggccttctcgatcgacaagccggtgcagatcatgaggatccccaacgtgtcccgggaggactacgagaacatggagacgttcccgctcaccgacgaggagtacaactgcgcgttcccgtccaccaacgctgagggcaccaagctcgtgttccggtcaagcaggaacagggtggccggaggggagaggcagcacaagaacctctacatcatagacgcggagaagggggaggccgccggtgtggtcccgctcaccgacggcccctggaccgacacccactgcagctggtcgccgcgggagggctgcgactggatcgtcttctcctccaccggcaggcccgagaaagacatagtcaagggcaaggacgagccggagaaggaccacggcttggacccaggctacttcgccgtgtacctggtgaacgccaaagacatcaagaagggcgaggtgccggtgcccgtgcgggtgatccacagcgcgcccactatcgccgggcacatcaaccaccccgtgttcagcccggacatgaagagcatcgtcttcgccgccgacctcgccgcggtctccgccgaccccatctccatgccccacttcacgcactcggtcaggccctacggagacatcttctccgtcaacctgcgtgacaccacggacatggccaagaacagggacatccaggagttccaccgcatcacgcacagccgctacgagtactccacgccgacatggaccggcattgccgacgacgaggaggaccccaacgccaagtggaagatgctggagagcctgcccaacttcacgccgtggtgcccgtacgcgcgcggcgaagccggcgagaaagagggttggcacatgaccggacacctcaccatccaaaagcggtgctgctga

SEQ ID NO: 71418 - DNA, 217 bp, Oryza sativa
  Clone ID: PAT_MRT4530_71895C.1
atttggcatgcattctgtctgtacatgaacccaatatgggtgccagttaatctggacccaccccatccgtaacctgtaagtgtggcgtgcgtttgcctcgcctttttttttcgaaaatgcttgggggagtctgagtgagcacccttggcttgttcgattatgtattgattattgatctacccgtgtagatatgggagtggtgaatatggctaatgag

SEQ ID NO: 71419 - DNA, 640 bp, Oryza sativa
  Clone ID: PAT_MRT4530_71896C.1
gataactcgactaccgagcaacgggctaaagcggcggctaggtttaagcgtcacacggcggtgaacggcatgggagcggttaccggcgaaccacggcacaataacgcaaatggagggcaccgggaggtagagaaggtgacggcgattcttaccaacacttatgcgacgacggacagcgaaggagatgaccggcgatgagctccgaagggcggcgaggttctggtcaacgaaggcgacgactttccggcgatcttcggtggatgacagatgacggacgggcttctcctcgcagctgcgaatccaacaaaggtggcggtgaagcttggcgatgacgggaggagcagcagggcctcgccggagatcaaaacgcgacggtgaacttcgggttgacggcgacgatggagctccggtggattttggcgcaaaataaccagcggccggggtagaactcgactttgcggagccgagggaggtggcggcgcaaagcggcgacgaccgaggcggcagcgcatggcggctggagcggctaccggcgacggagagagtaggcgctcgcggggagaaggtttccgccgacggcggagagagggaagaggtggcggcccaaaaaggagaggtagggggctctatatatagccat

SEQ ID NO: 71420 - DNA, 639 bp, Oryza sativa
  Clone ID: PAT_MRT4530_71897C.1
cgcagatttgccagattgcagagcataatccggacgtgctgttcttgcaggtgaactatgaggagcacaagtctatgtgctacagcctccatgttcatgttcttcctttcttcaggttctacaggggagctcagggccggctctgcagcttcagctgtactaacgcaactgtaagatcttgatctggtcttgtgctttcaattgctcgtgttgcttaatattcgtattgtaaggaaactattccccattagccttgtggtataattggatcctagttcatgtttaatcttctatagtgtttcgggagtactatgtatttactactagtaaaatttagtatgggaagtttctcttaaactcacaatgatgcctcttttgaaacgttcttccaaaatttaccaattaatcgaccagattctcctgcatctaaacattactgctagctcggtgatattggaaaaaaaggagaagaaattttgttgctaaattagaacatgacttgatggagatcacgtgtgttacctctttactgatgtatacttctgcttttaaccggggtttctgtaccaagaacttggtcacatgtgtatactttgaatatgtggtgtgcagtgtcgtaaggtgtttgatgatgtactt

SEQ ID NO: 71421 - DNA, 288 bp, Oryza sativa
  Clone ID: PAT_MRT4530_71898C.1
gtattcatgataaattaattttataaccatcattttaaatacacacgtcaaggcaatgactatatctcgttttttgaaaaagtatatgttaagaatacgttatagaatataagtaaatgcccaaggacaacaaatttatatcattaccagagggatcaacaccataatttaagccaaatattttacctcccgaaatctttagatcatagctctttgccaaacttgctgctttgcatttcatggcagttagcccataaacgaaataaaggcagtatggaatcgtgtaca

SEQ ID NO: 71422 - DNA, 266 bp, Oryza sativa
  Clone ID: PAT_MRT4530_71899C.1
atggaccatgttggaaacctttgcagcaccgatcgtcgattcctcccatattggaaaacaaagaatccaaagggaaaggaaccaggaacagctaagcacgcttcagtatgtgcatcgacgccaccgagctctctcgccacctccaccaccatcctctccatcgccggcgccggcagccgaataggcacctcgacgccctcctcgccgtccccgctcctcctcccggcgacgtggaacgtcgccagcgtcgccgtcgccggcccgcc

SEQ ID NO: 71423 - DNA, 339 bp, Oryza sativa
  Clone ID: PAT_MRT4530_7189C.1
gcatgcctccactcttcaagatgtggcactccagtttctcccgaggggacttgggagagctcactcggagactggacacgttggaactgcaagtgggagaaattcaacacaacctcaagggacacatagctcagacacaagaatggcagcagaatgctgacacttagttcgccaatatcaacaatctgatgcagcaacagcagactaacttgcaggcttactaccgcttccagggtttcaatccctatcaagggccctgagcaaaaagcaagcttgagggagatgtctctcccccactaagtgaactctgttttatatctcttatgtattggttcataa

SEQ ID NO: 71424 - DNA, 2333 bp, Oryza sativa
  Clone ID: PAT_MRT4530_718C.1
atgcttcgtaccttcatcattcttgtgcctctgctcttctccatacattctccggcgtgttctgctgcaacggacacgatttcagccggtgaagcactcccgaaagatgagaagcttgtctctcgcaatggcaggttcgcgctcggcttcttccatccggacaccgacagtaagttcttcccccggcacaccctcaagcactggtacctaggcatatggttcgacaagataccagtgttaactccaatatggatagcaaacagagagaacccaattgtaggccatcacagagtgacaaaactcacaattgccagtgatggcaaccttgccatcttcaaccaagccaccagatcgacggtttggtcgactcatgccagtatcacagccaagaaaaccatggttgtcctccaggataatggaaacctcatcttaagagatgcatccaactcgtccaacgtactatggcagagctttgactaccctactgatgtcatgcttattggtgcaaagtttggcctagataaggtgactggtctgaaccgtgttattgtttccaagaagagtttggctgatccagctgctggcctctattgcctggaattagaccctactggtgctaaccaatacgtcttagagttttgcaactcttccatagtctattggtctactggggaatggaatggccaattcttcaactcaataccagagatgtcaggacgaactctatttgacttcaagttcatcaacaacaaccaagagaagtactttgtgttcaacttgttagaaaaagatctaataactgtttgctttttggacatatctggtcagatgaaacagctcctctggcttgagaacaagcaggaatgggcaacgatctatactctgcctaaagatctatgtgatatctatgctacatgtggacctttcactgtctgcaacagcaatgcactccaagtgtgcgattgcattaagggattctcagtaagatcacctaaggattgggagttagaggatagagctggtggatgcataagaaatacaccattagattgcggcaccaagaaccaaagcagaactgctacaactgacaagttttactccttgcccggtattggattgcccacagaagccaacatcatagaagctgctaggacagctgaccaatgtgcactagcttgccagaataattgttcttgcactgcatattcctatgctactgtaatctggaggtacaaaaggaagcaatttactgctcctactaataatgttcaagggggaaatggaattgtgtctttcaaatacagtgttctgcaacatgcaactaaaaatttctctgagaaattaggagaaggcggctttggtgctgtattcaaagggtttctaggtggctcgacacctattgcagtaaaaaagcttggtggtgaccgtcaaggtgagaagcaattcagggctgagaaccatactacgatcctaaactggagtacccgttaccagatagcccttggagctgctagagggttggcatacctgcatgagagttgcagggattgcatcatacactgtgatattaagccagagaacatacttcttgatggatcatttgtgcctaaaattgcagattttggaatggcaaaatttgttggaagagatttcagtaggaggaactcatgcaaacaagacacaagtgatgatgatcatgctgcatatttccctgtgcaagttgcaaatgaacttctcgagggagatgtcaggagcttgctagataacaaactgcttgatgatgttaacctggatgaggctgaacgaataagcaaggtggcctgctggtgtgtccaagaaaatgagtctaatcggccgaccatgggcgaagtggttcaaattcttgaagggagcatagaaaactttacggttagtaaccagaattctactgaagcaaaatcagaaccatttcggcctcgatctgtcacctttgtgcaaacgacggcgagtcctgctcccacatcttccatgattgtcccttcacaaagcaggtttggacaaggattcgagatcggcttagcctttcctgctcggtgccctctgaagatctttcctcttggtggtgttcggtccgaaaatcagtgcgcaagcaagacagaaagacatttgacgccggggtgatccttgtgacatgcctcatatggaaggaacgtaataatgctagagtgtttgatggaagagcaacctcagcgggccatctttgtgccacaattgtggaagaatgggaagcttggaaagcggccggtctgctgtgcgaaattgaagcaagaagccccatatccatagggatcagc

SEQ ID NO: 71425 - DNA, 366 bp, Oryza sativa
  Clone ID: PAT_MRT4530_71900C.1
atggaggcgatgcagcaacgccggcggggttctaatgctaaagcgattggtcctagtcgaggtcacctacctcgtgtcgttacttgtccgagggcagtgcccggagttgaagaagaagacggaggtgtcgggggacggtatcccggagttgaagaagaaaatggaggtgggtttcctcgggggtcggaaccggagttgaagaagaagaagacggaggtgggttttctcaggagccggcgactggagttgaagaagatggaggttcactgggcttgtgcctacgtcattgctaaaccttgggaagcttaccaaggttacgctttcggagaacctgcttcaggggcttgtgtcgtccttcccgtctag

SEQ ID NO: 71426 - DNA, 403 bp, Oryza sativa
  Clone ID: PAT_MRT4530_71901C.1
cgcgagggccgccctttttttttttttttttttttttttttttttttttgggtcacaaaacatttcattattcattatttgttttgatcactatctcgttgcatgcaacacagcaacggggggatcctactagctatgaggcaagccagctaagcctactactggccggcggtgaaaaagctgcactgttggggcttaacccggcccattgacggcagttgccccgcgtactgccttgccctggttagcctaacgcgggacatccccgggtgttgttgctgttcgccgtagtagccctactacgacgacccctcgccgtagtacccctgatccgacgacgaccccttgacggcgaggacttcgacgacgacgacgaccagccttggtccaggggcatcggcat

SEQ ID NO: 71427 - DNA, 1393 bp, Oryza sativa
  Clone ID: PAT_MRT4530_71902C.1
agataaacccccccgtattcgcaggctcatcgacttctcgtcttcctctcctctctctcgtttcgattcccccgcgagagattcgatccaaccaaacccacccgctaccagcgtcttctccttcgcgagcaagttttttgagagtttgcaatgggaggaagcgaatacgatgatgactgggagttgcctagcgctgacatcactgtagttctttgcggcaaacttggctgtggcaagagcgcaactggcaatagcatcgttggaagagaagcatttgtatcagagtactcccatgctagtgtgaccagtacttgtcaattggccagcaccgcgctaaaggatggccgtaccctcaatgttattgatacgccaggattatttgaaatgaccattacatctgaggatgccggtaaagaaattgttaagtgtatgagtatggccaaggatgggatacatgcagtgctgatggttttttctgccacatctcgttttactcgagaagattccagtaccattgagacaattaaagagtttttcggagagaagattgttgatcacatgatactagtatttacttatggagatttagttggtgaaaataaattgaagagcatgctgaataatgccccagagtatctgcagaaaactgttgagctatgcaaaaacagagttgttctctttgataatatgaccaaggaccgatggctccaagagaagcaacttgaaaatttgcttgatgttgttgactctgtgaatacaaataatggaggaaagccattttcagatcaaatgctcgcttgcattaaggaagcacatgccagagaacaggaggtgcatgatgctattggatatacagaagagcaaatatctgaattgaaaaaggagatccagagaactcgggatgaacagcttgcaaacattaccaacatggtggaggaaaagctgaatatcactgttgacaagctgcaacagcaactcatggaagaacagaatgcaaggctagaagcagagaggttggcagctgaagctaggctccgatcagatgaggagatccgcaagctcaaaaagcgcctcgagaaggcccaacaagaaaatgaggaattccgaaagatggcttctcaacacaagtgttctattctatgagtagctttctcctaggatcaagctgctgccatggttgaatgctccgtgcattgttaatagagttcagaacagtgctctaggctatgtggttgacataaaacttttgctactgggctatctcatatctgtaaatatacaggtatttggatttttaatgtccaaggattttgactatcatccctgctagttcatccttgtgaaaagtgaattttggtgatcgtcttcttctgaaaaaaaaaaaaaaaaaaaa

SEQ ID NO: 71428 - DNA, 591 bp, Oryza sativa
  Clone ID: PAT_MRT4530_71903C.1
ccccggctgcagaattcggcacgagaaatgacagataatttaatgaaaacaaagtgagtcgatgtgaaatgttaacaagtccagatgtcttaatacgtgattatccttgttcatcggatttaaaagaatttatttcgaaaaaaagaaaagaaatatctgatgttgcaatggaattgatgatcgtttattagttgttattggtccatgttcaattcataatattgaagaaggtcttgaatatgcacaaaaattaagtgatgcatcaaaatcatttgaatcaacattaattattataatgagagtttatcttgaaaaacctcgacaattgttggttggaaaggattaatttatgatccatatttagatggatcttcggatataaataaaggtttacaagtctctcgtcaattattattaacaatcaatcaaatgggattaccttgtgcaactgaattattacaaccaatgcttgttcattatatagctgatttaatcaagtggtcagctattggtgcaagaacaactgaatcacaaattcatcgagaatagttagtgggttagaatgtctggtgggtttaaaatggacaactg

SEQ ID NO: 71429 - DNA, 225 bp, Oryza sativa
  Clone ID: PAT_MRT4530_71904C.1
accttgcaaccgaacggttgtcaaggtcaaaacaacaagaaccagacgcggcgaaaaaagctgcggcaggaataacgaacttaactggtcaaaagggcaacccacgaacagtgaaccccgaaggggggcccgaatgcaaaagcccctatgagggcaacaaaaggcgatagaaatggcctggtaaggtagaattccccccggaaaaatttttccgcgaggaaaaag

SEQ ID NO: 71430 - DNA, 258 bp, Oryza sativa
  Clone ID: PAT_MRT4530_71905C.1
atggaccatagaaatttgtttgagatgcatgggctgagccacggaggggaggggacggcggcatggcgcagcgtcggtgactcggcgcggacggcggtggcggcgccggcgcggacagcagggagccggccagctgaggacggcaccgggcgccggcgcggagtcgaggtctcgaggaggctggcggctagcggcgtcgggctcagggtctcgggcgaactggcgctgctgggcgctggctggtggctgagacgctga

SEQ ID NO: 71431 - DNA, 1715 bp, Oryza sativa
  Clone ID: PAT_MRT4530_71906C.1
atggctggttttgccgatgcactgagaccggataaattcaccggtgtgcattttaagagatggcagatcagggtcactctgtggctgacagctatgaaatgcttctgggtgagtactggcaaacctgaaggagttcttactgctgaacagcagaagcaattcgaggaagccactactctctttgtgggatgcattcttagcgttcttggcgatcgtctggtcgaggtgtatatgcatatgaccgacgctaaggagttgtgggatgcactgaatactaaattcggtgctactgatgctagcaatgatctgtatatcatggagcagtttcatgactacaagatggctgacaaccgttctgtagtcgaacaggctcatgagatagaaaccatggctaaggaactcgaactccttaagtgtgtcttacccgacaaatttgtggccgggtgcattattgcaaaactacctccatcttggagaagtttcggtactgcactcaaacacaagagacaggaatactccgttgaggggttgattgcgtctcttgatgttgaggagaaaactcgggaaaaagatgccgcgtctaagggcgatggtgggcagtccagtgccaatgttgtgcacaaggcccagaacaagagcaaggggaaatacaaagctcagcagaccaccaacttcaagaagcagaagaagaacaacaacaatcctaatcaggatgagaggacttgctttgtgtgtggccaagttggtcatctggctagaaagtgtccacagcgcaaggggatgaaggcacctgcagggcagacttctaagtctgctaatgtgaccattggcaacactggagatggaagcgggtatggtaatttacctactgtcgcacggggttccaccgtcctaatggggaatgggtcacatgcttctgttcatggtgttggcacggtagatctgaagtttacttcgggaaagatcgtgcagctgaagaacgtgcagcatgtcccttctatcgacaggaatcttgttagtggctcccgtctgactagagacggatttaagttggtttttgagtctaataaaatagtcgtgtctaaacatggatattttattggtaaaggttatgagtgcggaggcctgttccgcttttccctttctgatttctgcaataagtctgtgaaccatatttatggcactgtggatgatgaggctaatgtttggcattcacactactggaaggaggctgtccgtagtgaaatggattccattatcgctaacgggacttgggaggtgacagagcgaccctatgggtgtaaacctgtggggtgcaagtgggtgttcaagaagaagcttaggcctgacgactactccatcccgctcgccggcgtgcaccggcgatcgggagagcaggtctccggaacctctgccttcgacgtcctgcaccgggagaaggcggcaataaggttagagcatgaagacagagcctctggtatcgtgccagtgaggccattagaggtgaggttcagtgactcgagatgtgtggctcttgctacaagtgacaccgggccattgacagtattgcgaagaatcatttctccaggaagccatgactccggcattgtcattgagatggagcttgaggcaaagcagagcctgaaaatcgggatgctgtgggagcccaaaggcgccatcagttttgctaatgagaattacaatgtgagcaacag

SEQ ID NO: 71432 - DNA, 625 bp, Oryza sativa
  Clone ID: PAT_MRT4530_71907C.1
gtcgctcgtagactactccatcccgctcgccggcgtgcaccagcgatcggagagcaggtctccggaacctctgcctttgacggtgtatttatagacttcaatggatccacatcaagagttgtgacttcagcaagtttggttagaatatctgctgatgaaaacaagattgctgataacctgaagattaaagtgtaccttccaaataaacgaatcgccgtaggcgaattgcagcattgcaatttgagctacaatattgctgtggtcagtgtcaagggtttctgttgtcttcggacagcagaactcgacaaacagatgcaaatcgaacctcatagggaggtagtagctataggacgtatctttgaatcaggcaaattaatggctacaagtgggatattgtctgacgaggaaagcaagcttgactgcagagagcttatgatctccacttgtaaaatcactaaggccggtattggaggaccactgattgattttgatgggaatttcgttggcataaacttctatggaacaaaagaaacacattatctaccacgattaatgatacagagactattgaaggattttgacacaacccaacctacggttcaaaccccaaggataatgagatact

SEQ ID NO: 71433 - DNA, 2790 bp, Oryza sativa
  Clone ID: PAT_MRT4530_71908C.1
atggagggcacggtgctctgctccgccaaccacgcgccgctcacgcccatcagcttcctcgagcgcaccgcgctcgtgtaccccgaccgtctcgctattgtcgcctcggatggcagcgccggcgtggccgtgtcgcgcacctggcgggacactcgggcccgctgcctccgcctcgccgccgccctcaccgggctcctcggcgtccagcgccacgacgtggttgcggtgttcgcgcagaacattcctgctgtttgcgagctccacttcggcgtccccatggccggcgccgtcatctgcacgctcaactcgcgcctcgacgccgccatggcggccgtcctgctgcgccactccgaggccaaggtcgtcttcgtcgaccgcgctctgctcggcgtcgcccagaaagccctcgtgctcgtcgccgaagccggagccaggcgtcccgtcttggttctcatcagcgagctcctcgacgaaaacgaacgatcacctcctgatgccaagatcaaggtcacccgagtcgattacgagtacgagcaccttctgagcgccgccgacgtcggatcgtcgccggacttcgcgatccggtggccggccgacgagaacgagccgatcgccctgaactacaccttcgggacgacgtcgaggcccaagggcgtgatctacagccaccggggcgcgtacctgagcagccttgccgccgtgatcgtgaacgccatggcggagacgccggtgtacctgtggaccgtgccgatgttccactgcaacgggtggtgccaggtgtggggcgtggcagaccatggcggcacgaacgtgtgcgttcgcagggtgaccggggcggacatcttcgacagcgtggcgcggcacggcgtgacgcacatgggcggcgcgccgacggtgctgagcatgatcgtgctgttccggatggaggagcaggggttcctggtgatccactcgtacgggctgacggagacgtacgggccggcgacggtgtgcacgtggaagccggagtgggacgcgctgacggcggaggagcgcgcccggatcaagtcgcggcaggggctccaccacgtcgggctggaggcggcggacgtgaaggacccggcgacgatgcggagcgtgccggcggacgggcggacggtcggggaggtgatgctccgggggaacacggtgatgagcgggtactacaaggacggcggcgcgacggcggaggcgctcgccggcgggtggctccggtcgggcgacctgccggtgcgggagaaggacgggtacatcaagatcctggaccggtccaaggacatcatcatctccggcggggagaacatcagcacggtcgaggtggaggcggcgctgttcgggcacccggcggtggaggaggcggcggtggtggggcggccggacgagtactggggcgagacgccgtgcgcgttcgtgaagctgagaggaggaggaggaggaggaggaggcggcgcggcggtggaggaggagctgatggcgttctgccgcgcgcggctgccgcgatacatggcgccgcggacggtggtggtggtggaggaggagcttccgaagacggcgacggggaaggtgcagaaggtggcgctgcgggagcgggccaaggccatgggcagcctccccgccgccgcctcttcctcctccaggcgcgcacccacagggacagctggtgcaaccaaggtccttaggccatttttcaatcacatggcattgatgctggtgctggcggagttccagcgcaagcacggcactggcagggtttgcctcctactctgtgctgcgccgtcgctcgtagattactccatcccgctcaccggcgtgcatcggcgatcgggagagcaggtctccggaacctctgccttcgacgtccctgcacgccggcgatcgggagagcaggtctccggaacctctgccttcgacgtcctgcacagccggtctttctaccacctcgaagttgaaaatcaacttgatagaaagataaaaagacttaggtctgatcgtggtggagagtttttctcaaacgagtttgacttattctgtgaggaacatgacattatacatgagaggacgcctccctattctcctgagtctaatgggattgctgaaagggagaaccgcacactgactgacttggtgaatgccatgttggacacacttggtgaatgccatcctcacatggtcttctcgttcatcaaatggacgttaaaaacagcttttcttaatggagagctggatgaggagatctatatggatcaacctgatgggtttgtagatgaaggcttcgcagtcaatgaggcagataaatgtgtatactatcgccatggtgggggtgagggagttattctgtgcttgtatgttgatgacatactgatatttgggacaaatcttgagtcccattatgtggagaagatctcgaatcgctttggctacattgatagtaagccttctccaacaccttatgatcctagcttgttgcttcgcaagaacaagagaattgctaggaatcaactggaatactaccaaatcattggctcgctgatgtacctggctagtgcaactaggcctgatatctcctttgctgtgagcaagttgagccggtttacctctaatccaggagatgatcactggcgtgcgcttgagcgagtaatgcgctatctgaaagattactacatcccgctcgccggcgtgcaccggcgatcgggagaccaggtctccggaacatctgccttcgacttcctgcaccaggagaaggcagcaataaggtttttgggaagcgtttag

SEQ ID NO: 71434 - DNA, 141 bp, Oryza sativa
  Clone ID: PAT_MRT4530_71909C.1
atggcggagctagcgctcggtagggcgagggtccttaacaacgccgcgacagactcttggagtgcagccgcgcagggcaactgggctgttcaacttcagcgacgctgcggcagcaagccaacaagcagccgcggcaattaa

SEQ ID NO: 71435 - DNA, 1422 bp, Oryza sativa
  Clone ID: PAT_MRT4530_7190C.1
atgggcaacgtcctcgtcgccgtgccggccgctgctggcgccctcgtcacggtggctctcctcgcgccggaggccgagtcgacgacggtggcgatcgggcgtctacgcgagctgatcaggcccgcgcacctcttcctggccgtcttcctcccggccgccgcggccaccgtgtacctcgtgatgcgcccgcgggcggtgtacctcgtcgactacgcgtgcttccgcacggcgcccaactgccgcgtccctttcgccacgttcctcgagcacgcgaggcaggtgcccacgctcaccgagcgcagcgtgcggttcatgacgcggctgctcgagcggtcggggctcggggaggagacgtgcctgccgccggcgcaccactacatcccgacctacaagtactgcaccctcgaggccgcccgtgccgaggtcgacctcgtcgtcttctccgccgtcgacgagctcttcgccaagaccggcgtcagccccgacgacgtcgacatactcgtcgtcaactgcagcctgttctgccccacgccgtcgttcgtcgacatgatcgtgaacaggtacaagctgcggagcgacatccgcagcatgcacctgtccggcatgggctgcagcgcgagcctcatctccatcggcctcgcgaggaacctcctgcaggtggcgccgcatggcgcgcgcgcgctcgtcgtctccacggagaccatcacgcccaactactacgtcgggaacgagcgcgcgatgctcctgcccaactgcctcttccgcatgggcggcgcggccgcgctgctgtcgacgtccccggcgaaggcgcggttccggctgaagcacgtcgtgcgcacgctcaccggcgcggaggacagcgcgcaccactgcgtgttccaggaggaggacgagcacgggagcatcggaatcaaccttagcaaggatctcatgaccatcgccggcaacgcgctcaaggccaacatcacggccatcgcgccgctcgtcctgccggcgtcggagcagctcaagttcgcgctcgccttcatcgcgcggaaggcgctcagcggcagggtcaagccgtacatcccggacttccgcgcggcgttcgagcacttctgcatccacgccggcgggcgggcggtgatcgacgagctgcagcgcagcctctgcctctcggacgagcaggtgcaggcgtcgcggatggcgctccaccgattcgggaacacgtcgagcagctcggtgtggtacgagctggcctacgtcgaggccaagggacgcatgcgccgcggcgaccgcgtgtggatgatcggcttcggctccggtttcaagtgcaacagcgcggcgtgggagtgcatctcgccggcgcgcgacgacgacgggccgtgggccacgtcgatccacaggtatccggtggacattcccgacgtgctcaagcactag

SEQ ID NO: 71436 - DNA, 1135 bp, Oryza sativa
  Clone ID: PAT_MRT4530_71910C.1
agttgtagccggagccaccgtcggcgcaacactgctcgtcgtgctgctcttcaccacggcaactatcatcgtacgacgacgtcggatcaagaagaggagggaggccgaggatgaggagaatgcgagcacggatagtgacaatggcgagcccatcacggagatcgaggtggggacggggccaaggcgattgccatactatgagctcgtcgaggcgaccaagaacttcgcggcggaggagaagcttgggcaaggcggcttcggctcggtgtaccgaggctacctaagagagcagggcctcgtcgtcgccattaaacgcttcgccaaagattcctccaagcaagggaaggagtacaagtcagagatcaaggtgataagccggttgcgccaccgcaatctcgtgcagctcgtcggctggtgccatggacgcaacgagctcctccttgtctatgagctcgtccccaaccgcagtcttgacgtccatctccatggcaatggcaccttccttacttggccaatgaggatcaagattgttctcgggcttggatcagcactactctacctccaccaagagtgggaacaatgtgtcgtgcaccgtgacatcaagccaagcaacgtcatgttggatgaatccttcaatgccaagctagatgacttcgggctcgcgaggctcatcgaccacaccatcggtataaagacgatgaccgccatgtcaggaacgctgggctaccttgaccctgaatgtgtgatcaccggtagagcgagtgccgagtccgacgtttacagttttggcattgtcctactggaggttttgtatggcaagggagatgttctcatggccgccgacgagcgtctcaatggcgactacgattctgcggagatggagcgtgtcatcactcttgggctctggtgcgcgcaccctgatccaagcgtgcgaccgtctatcagagatgccatgaccatactccaatcgagtggaggccagctgccggtgctaccggccaagatgcccgtgccaacgtacgcgccgccgatggcctcgtttcatgggctctttgcgtcatctacagggatgtcgtcgtcatcagtttctctagaaagatctgtccggccattttctgttccagcattagaataa

SEQ ID NO: 71437 - DNA, 2391 bp, Oryza sativa
  Clone ID: PAT_MRT4530_71911C.1
atggagctctcccgtggtcgccacatccaactgggtgttgcggggccccgctcacccgcgggtcccctgcgggcccgccccctgaaccgccgctcacaccctcatgcgaaggcgcgaacgcgagatcgcggccgctggcaccagcgccgacgcaacacctcagccatctcgtccgaggccgccgcgcccgcgggccgtttgcgcgcgcttccgcttccgtcgcgcgacgcccacgcgaggcgccgaggcgcagccgccgagagccgcggagactactccatcccgctcgccggcgtgcaccggcgatcgggagagcaggtctccggaacctctaccttcaacgtcctgcaccgggagaaggcggcaataagggtcactctgtggctgacagctatgaaatgcttctgggtgagtactggcaaacctgaaggagttcttactgctgaacagcagaagcaattcgaggaagccactactctctttgtgggatgcattcttagcgttcttggcgatcgtctggtcgaggtgtatatgcatatgaccgacgctaagaagttgtgggatgcactgaatactaaattcggtgctactgatgctagcaatgatctgtatatcatggagcagttttatgactacaaaatggctgacaaccgttctgtagtcgaacaggctcatgagatacaaaccatggctaaggaactcgaactccttaagtgtgtcttacccgacaaatttgtggccgggtgcattattgtaaaactacctccatcttggagaagtttcggtactgcactcaaacacaagagacaggaatactccgttgaggggttgatagcgtctcttgatgttgaggagaaagctcgggaaaaagatgccgcgtctaagggcgatggtgggcagtccagtgccaatgttgtgcataaggcccagaacaagagcaaggggaaatacaaagctcagcagaccaccaacttcaagaagcagaagaagaacaacaacaatcctaatcaagatgagaggacttgctttgtgtgtggccaagttggtcatctggttaggaagtgcccacagcgcaaggggatgaaggcacctgcagggcagacttctaagtctgctaatgtgaccattggcaacactggagatggaagcgggtatggtaatttacctactgtcgcacggggttccaccgtcctaatggggaatgggtcacatgcttctgttcatggtgttggcacggtagatctgaagtttacttcgggaaagatcgtgcagctaaagaacgtgcagcatgtcccttctatcgacaggaatcttgttagtggctcccgtctgactagagacggatttaagttggtttttgagtctaataaagtagtcgtgtctaaacatggatattttattggtaaaggttatgagtgcggaggcctgttccgtttttccctttctgatttctgcaataagtctgtgaaccatatttgtggcagtgtggatgatgaggctaatgtttggcattcacactactggaaggaggctgtttgtagtgaaatggattccattatcgctaacgggacttgggaggtgacagagcgaccctatgggtgtaaacctgtggggtgcaagtgggtgttcaagaagaagcttaggcctgacgcctcacatggtcttctcgttcatcaaatggacgttaagacagcttttcttaatggagagctggatgaggagatctatgtggatcaacctgatgggtttgtagttgaaggctttgcagtcaatgaggcagataaatgtgtgtactatcgccatggtgggggtgagggagttattttgtgcttgtatgttgacgacatactgatatttgggacaaaccttgaggtgataaatgagtcccattatgtggagaagatcttgaatcgctttggctacattaatagtaagccttctccaacaccttatgatcctagcttgttgcttcgcaagaacaagagaattgctaggaatcaactggaatactcccaaatcattggctcgttgatgtacctggctagtgcaactaggcctgatatctcctttgctgtgagcaagttgagccgatttacctccaatccgggagatgatcactgcgaagatgttgtcctgcagagcattcttgaaagaactcacctttgtgagcttgactgttggtcgcagtctatgaagattttggactactccatcccgctcgccggcgtgcactggcgatcgggagagcaggtctccggaacctctaccttcgacgtcctgcaccgggagaaggcggcaataaggtttttgggaagcgcttcgcgcgactgctccctgttcgttcgcgacggctcgccttcctcttcgctcgcgtgtttcgtgccttcgtag

SEQ ID NO: 71438 - DNA, 1079 bp, Oryza sativa
  Clone ID: PAT_MRT4530_71912C.1
acaaagccctaatttaaccctaagggaaattgttgctcctcccagagctccgccgccaggccccgccccatctcgatccgccgccatggccaccgcagtcgccgcctcccccgctcagtcccgcaagactgagacctacaccgacaccaagcgccgggatgacgtccgcggccttaacatagccgccgcgcgcgccgtcgccgacgccgtgcgcacctccctcggcccccgtggcatggacaagatgatctcctccggcgagcaggaggtcatcatcaccaacgacggcgccaccatcctctcccgcatgtccctcctccagcccgccgcccgcatgctcgccgagctctcccgctcccaggacgccgccgccggcgacggtaccactaccgtcgttgtcctcgccggatctctgctccgccgtgctcaatccctactctctgctggtgcccaccctaccgcggcagctgacgctctccaccggctcgccacgcgcgccgttgaggttctccacgccatggccattcccatcgagctctctgaccgcgactccctcgtcaagtccgcatccacagcactcaactctaaggtcgtttcccagtactccagccttctctcccccctcgctgtcgatgccgccctctccgttgttgatcccgctcacccggacctcctcgacctccgagatatccgcgtcgttaagaagcttggtggcaccgttgacgacactgagctcattcgcggcctcatcttcgataagaaggctagccatgctgctggaggaccaactcgggtcgagaatgctaagattgctgtcatacagttccaagtttcacctcccaagacagacatcgagcagagtgtcatcgtatcagattacgcgcagatggatcgcatcctccgtgaggagcgcaattacattcttgggatggtgaagaagatcaaggcttctggatgcaatgttctgctcattcagaaaagcatcttgcgtgatgcagttactgatttgtcacttcattatcttgcaaaggctaagatcctggttgtgaaggatgtggagagggatgagattgagttca

SEQ ID NO: 71439 - DNA, 884 bp, Oryza sativa
  Clone ID: PAT_MRT4530_71913C.1
gtgcggccatcctcgagctgcttgccagcaaagatcagtcgctgctgatccgggggaatgccctccttgtcctgaatctttgctttcacgttgtcaattgtgtccgacgactcaacctccaagtcagccagggtgcgtccgtccttgagctgcttgccggcgaagatgaggcgctgctggtccggggggatgccctccttgtcctaaatcttcgccttctcattgttgattgtatcagaagactcgacctcaagcgtaatggtctttccggtcagggtcttgacaaaaatctgcatgcctcccctcaacctaagcacaaggtgaagagtggactctttctaaatgttgtagtccgccaaggtccgaccatcctcaagctgcttgccagcaaagataaagacgctgctggtcagggggggatacactccttatcctggatctttgccttcacgttgtcaatcgtgtctgaggactcaacctccaaagtgatgggtctttcttgtcaaggtcttcacaaagatctgcattcctcccctgaggcgaaggacaaggtggagggtggactctttctgaatgttgtaatctgcgagggtgcgtccgtcctcaagttgcttgcccgcaaagatgaggcgctgctggtcaggtggaataccctccttgtcctgaatcttggccttgacattgtcaatcgtgtcagaggactcaaccttatggtattgccaaaaaagaagctagctgctagaaagaaacctgcaccacctccatcggtaacatacctttacaaattagtaaaatttgccacaggacacgtaaaaattgtggtcttttctgtgggacactcgaagattgtgtatttgctcgtggacaccgtaaaaatgtggtaa

SEQ ID NO: 71440 - DNA, 522 bp, Oryza sativa
  Clone ID: PAT_MRT4530_71914C.1
atggaggtagaagttgaaaatcaacttgacagaaagataaaaagacttaggtctaattgtggtggagagtttttctcaaacaagtttgacctattctgtgaggaacatggcatcatacatgagaggacgcctccctattctcccgagtctaatgggattgccgaaatcaatgaggcagataaatgtgtgtactatcgctatggtgggggtgagggagttattctgtacttgtatgttgatgacatactgatagttgggacaaactttgaggtgataaatgaggttaaatcattcttgtctaaaatttttgatatgaaggatctgggagtagctgatgttattctaaacattaagttaattagagttgagaatgagattacactcttgcagtcccattatgtggagaagatcttgaatcgctttggctacattgatagtaagccttctccaacaccttatgatcctagcttgttgcttcgaaaggacaagagaaatgctaggaatcaattggaaaactcctaa

SEQ ID NO: 71441 - DNA, 2919 bp, Oryza sativa
  Clone ID: PAT_MRT4530_71915C.1
atgggcgagcgcgggatgcgggcggcgggcggagagccggcggagtgggtggcgaagctggagccaagtggaggtgaccaggcgctgtacaacgggttcggggccgccggaatgcatggcgccgccgtcatgcaaccgccgacgttcgggcagcgcgcggccgcgctcgcgctcgccttcccgcagcaacaaatccaccacgagacgcacgtacgccgcagcattctcgcggcctcgcgtggtttgtcgcgcgcgacctgcacaacgagcagcagccagggtcggtaccaccaccacgacatgggtagaaacaattgggacgacattgactactccatcccgctcgccggcgtgcaccagcgatcgggagagcaggtctccggaacctctgcctttgacgtcctgcaccgggagaaggcggcaataagggtcactctgtggctgacagctatgaaatgcttctgggtgagtactggcaaacctgaaggagttcttactgctgaacagcagaagcaattcgaggaagccactactctctttgtgggatgcattcttagcgttcttggcgatcgtctggtcgaggtgtatatgcatatgaccgacgctaaggagttgtgggatgcactgaatactaaattcggtgctactgatgctagcaatgatctgtatatcatggagcagtttcatgactacaaaatggctgacaaccgttctgtagtcgaacaggctcatgagatacaaaccatggctaaggaatactccgttgaggggttgattgcgtctcttgatgttgaggagaaagctcgggaaaaagatgccgcgtctaagggcgatggtgggcagtccagtgccaatgttgtgcacaaggcccagaacaagagcaaggggaaatacaaagctcagcagaccaccaacttcaagaagcagaagaagaacaacaacaatcctaatcaggatgagaggacttgctttgtgtgtggccaagttggtcatctggctaggaagtgtccacaacgcaaggggatgaaggcacctgcagggcagacttctaagtctgctaatgtgaccattggcaacactggagatggaagcgggtatggtaatttacctactgtcgcacggggttccaccgtcctaatggggaatgggtcacatgcttctgttcatggtgttggcacggtagatctgaagtttacttcgggaaagatcgtgcagctgaagaacgtgcagcatgtcccttctatcgacaggaatcttgttagtggctcccgtctgactagagacggatttaagttggtttttgagtctaataaagtagtcgtgtctaaacatggatattttattggtaaaggttatgagtgcggaggcctgttccgcttttccctttctgatttctgcaataacatgtgtttaattcctaagttttccattgtcaaaggttctaagtgccatagttgtgtgcaatcgaagcaacctcgcaagcctcacaaggctgccgaggagagaaacttggcaccactagaactcctacattcagatctttgtgaaatgaatggggtgttgacgaaggaagttgaaaatcaacttgacagaaagataaaaaggcttaggtctgatcgtggtggagagtttttctcgaacgagtttgacttattctgtgaggaacatggcatcatacatgagaggacgcctccctattctcccgagtctaatgggattgctgaaaggaagaaccgcacactgactgacttggtgaatgccatgttggacaccgcgggactgcctaaggcatgtgaagctcctcgaaggagtaagagacaaaggacggctaagtcttttggtgatgatttcactgtgtacctcgtggatgacactcctaagtcaatttcagaagcatatgcatctcctgatgcagactactggaaggaggctgtccgtagtgaaatggattccattatcgctaacgggacttgggaggtgacagagcgaccctatgggtgtaaacctgtggggtgcaagtgggtgttcaagaagaagcttaggcctgacgcctcacatggtcttctcgttcatcaaatggacgttaagacagcttttcttaatggagagctggatgaggagatctatatggatcaacctgatgggtttgtagttgaaggctttgcagtcaatgaggcagataaatgtgtgtactatcgccatggtgggggtgagggagttattttgtgcttgtatgttgacgacatactgatatttgggacaaaccttgaggtgataaatgagtcccattatgtggagaagatcttgaatcgctttggctacattgatagtaagccttctccaacaccttatgatcctagcttgttgcttcgcaagaacaagagaattgctaggaatcaactggaatactcccaaatcattggctcgttgatgtacctggctagtgcaactaggcctgatatctcctttgctgtgagcaagttgagccgatttacttctaatccgggagatgatcactggcgtgcgcttgagcgagtaatgcgctatctgaaaggtactgtggaattgggacttcactatactgggtatcctgcggtactggagggttatagtgattctaactggatctctgatgtggatgagatcaaagccactagtggatatgttttcacactgggtggtggtgctgtttcatggaggtcttgcaaacagacaattttgacgaggtcaaccatggaagcagaactaacggcactagatactgctactgttgaggcagaatggctgcgtgatctattaatggatctgcctgttgttgaaaaaccggtgccgactatccttatgaactgtgacaatcaaacgtctatgaagattttgggtgaatcttctaggaagcttactaaagacctaggagtatga

SEQ ID NO: 71442 - DNA, 465 bp, Oryza sativa
  Clone ID: PAT_MRT4530_71916C.1
atgttcttgttgcttcgtaagaacaagagaattgctaggaatcaattggaatactcccaaatcattagctcgcttatgtacctggctagtgcaactaggcctgatatctcctttgctgtgagcaagttgagccggtttacctctaacccgggagatgatcactggcgtgcgcttgagcgagtaatgcgctatctgaaagtactggaggaatatagtgattctaactggatctctgatgtggatgagatcaaagccactagtggatatgtcttcacactaggtggtggtgttgtttcatggaggtcttgcaaacagaccattttgacgaggtcaaccatggaagcagagctgacggcactggatactgctactgttgaggcagaatggctgcgtaatctattaatggatctgcctattgttgaaaaactggtgccggctattcttatgaactgcgataatcagacg

SEQ ID NO: 71443 - DNA, 444 bp, Oryza sativa
  Clone ID: PAT_MRT4530_71917C.1
atggcgtcgacgacgctacgtcgccgccggcggcgaagcggccccgcgcgggcgggcgccgcggcgttgggtgcggaggcggaggtggggccgggcaccacgacggtgggcacggaggtggaggcggggctaccgggcgcccgcagcggtggacttggcggactcggagccccgtggaggtggaggcccccgcctcccttctcaagcggcggcgacggcaacgacatgggaggcggcggtgacaacgatgtagagataccgctctgctcccctgatcaccacgacacagtcgcccgtgcgcacgtagcacgacgagccggcgctgtggaggctcgactcgagtactcgacgcgcagaaggctggccaatgtcgccgccggcgaggccgtggcacgcatcctccacgccttcctcggcaccaagggagatggtccagtgccctga

SEQ ID NO: 71444 - DNA, 1595 bp, Oryza sativa
  Clone ID: PAT_MRT4530_71918C.1
gcgcggatggcgtcttctccggtgtcgtactggtgctaccactgcagccgcttcgtgagggtgtcgccgtccacggtcgtctgcccggagtgcgacggcggcttcctggagcagttcccgcagccgccgccgcgcggcggcggcgggagcggccggcgcggggcgatgaacccggtgatcgtgctccggggagggtccctgtccgggttcgagctctactacgacgacggctccggcgacgggctgcggccgctgcccggcgacgtgtcgcacctcctcatggggtcgggcttccaccgcctgctcgaccagttctcccggctcgaggcggcggcgccgcggccgccggcgtcgaaggcggcggtggagtcgatgccgtcggtgacggttgccgggagcggggcgcactgcgcggtgtgccaggaggcgttcgagccgggcgcctccgcgcgggagatgccgtgcaagcacgtctaccaccaggactgcatcctgccctggctctccctccgcaactcatgccccgtctgccgccgcgagctaccggcggccgcggcccccgagtcggaggcagatgcgggactaaccatctggcgactcccacgcggtggattcgccgtcgggaggttcgccggtgggccaagggagcagcttccggttgtctacactgaactggatgggggcttcagtaacggcgtcgggccgaggcgggtaacgtggccggagggcgacggccatgtcgatggcggcgaagtcgacaacagggtagttttcctcctcgagttcgtgcccgatgagatcaaagatagcgctttcgtctctcctgacagtatccggagacaccgcaggggactagccgtgcctatctccgaagtcgatatccggcgtcttgtcttgacgtatgttgtggcttctgttgttccctgtatgttgactgtggtgggatccgacaaggccttatcggctctgggcatccccagccgaagtttccttaggttcctcggagtcctgatatcaacttgttgaggtagaggtagtgggagaatcgctgcaccgctggtcgaggaccaagtagtagtcgtaactcgaccactagaagtggaaatagtgggagaatcgctgcaccgctggtcgaggaccaggtagtagtcgtaactcgaccacttttcttgagtagtccagccatggccggtgctatgagataggtcgccggtcttcgttggtaggttgggcgcgacgactctgcatttgtcgaggtcgttctcgataatgcggtgtacttgaccacaacctactcgagtgctcaattgttcctttgtagatacatgccggatgtatctctgatgatgtagatggataatctgattagatttttggcggcgacgtggtttcaaagtaatcaatcgggccaaggcctcacgatcgacaacattgaactgttgttctccgcggcggtgacgtcttgaagcttgatcgatctcgtcggatcgaatagttgatgacgatggttccgatctcgtcggaaggcaaactccggtcgggttagacctccccacagccgaagtcgtcgagtagcttgttgtcggagaatccat

SEQ ID NO: 71445 - DNA, 271 bp, Oryza sativa
  Clone ID: PAT_MRT4530_71919C.1
ccggccggggtgcatcctcccgccgccgcttccccaccaacgccgccggctgcgcggctgcgacggcgacggcgacgctctcccccggctatctcgaggtgggggatgatggctccggtgatgtgcacttcgaggcgttccagatgagtgagatttgtgtgaagctgttcaaggatggtgtgctggagacggagatgggggacaaagacgattcccgcctgtccaagatgcggaaagaggtggtggttgtgcgaaaggatactatggagtg

SEQ ID NO: 71446 - DNA, 174 bp, Oryza sativa
  unsure (1)..(174): unsure at all n locations
  Clone ID: PAT_MRT4530_7191C.1
cgaacgtgaangcgtggccngggccatcctttagaccnaacggantttgaanctaagaggtgtcanaaaaagtngaccacagggataactggcttgtggcaaccaanngtgcatagcnacatngctttttgatcnttcgatntcggctcttcctatcattgtgaagctttattg

SEQ ID NO: 71447 - DNA, 288 bp, Oryza sativa
  Clone ID: PAT_MRT4530_71920C.1
aaaaaaccaaaccaagggggccataaatttgattccaaacgggttaccaaaaaaaaaaattttaaatccggggagtttttaaacggggttggccgggcattgcctttgattttaacaacaaggcccggggggaaaaaacaaggggaaaaatttccgaaaaaataaaggttcgaccaccccaaaatttataggccccccggtccataagggagggaattaatcgatgggccgggggggcgggggaaaaattaattaacaccttgccccggggggggggtttttgggggg

SEQ ID NO: 71448 - DNA, 285 bp, Oryza sativa
  Clone ID: PAT_MRT4530_71921C.1
atggtcactagtgaccaaatcgtttgcccgtcacagatgtttaagtgcgccgccagcgaaaaggtgtacatcttcgctagcggccctcttaaccttgctgccagcgaatatccattttcactggcactcccaaccatgttggtgctcatggtcgtgaacgggcaatatggatgcccgatgcctccgaagcctagccacatcaattacttgttcgtgagatccatggctgaaaacaatgcaggcgagctgcttatccgcttccccaggagtacaacgcatggctga

SEQ ID NO: 71449 - DNA, 603 bp, Oryza sativa
  Clone ID: PAT_MRT4530_71922C.1
gtgcgctcccgtccaagccaccaccgagtgcgatttcgcttctaccctgggtgaatcgcgccaattctcgccgcacagttggattggacatagatggtggtatcccctctcacaattcaaaccattcacccccgagccagccgttttcaccctcgtcgcacccggattggcgccaacaagtcgccagccgattccaaccgcggtcaagtcaatacttggccgcatagtaagccctaaccgaagctctgcgtcgagttttacctcgtcgcaccaagccgagcacagccgcccccgcgctgctctgttcttcgccgccgcgaagtttttccggccgcaatccgtcgtttcaaccgatctcgccattaggccgtccacacatcaaattaattccaccgccgccgctccccgtcgccggagatccctagctccctcacctcctcggtcgcaaccactttctccctctagcgccacttttggggatcggctggaggtagaagaagagaagagagagagagactgacaggtcttgaggattcctctgacaccctagataatatcaatcaatctcaagacatcgagcaaggcaagttaccatatacctgt

SEQ ID NO: 71450 - DNA, 1080 bp, Oryza sativa
  Clone ID: PAT_MRT4530_71923C.1
gacactatagaatactcaagcttgcatgcctgcaggtcgactctagaggatccccctcgagcacctccatctccttggcctccttgagccaccgcgccatctccgcctcccactccccctcctttcgggctcggtccaagtcctcccctcaatcatctcgctcggccccctttccctctaaagtctattggtcctcccccaaccggcctcctctctccctctcgcgacaggtgggacccacgggctggcaaccgccgtggccgcccgagccacccacgtcgccgcctccttcggtagcctacagcctctcccgtgtgggcccggaccgcgccgcccccttcttcacctcgccgttcgcgtcgccccactctcctccccccctcccccgcggaatccggagcctctcactctctctctctcttccccatgtcgccgtcggttgccggcccaaatcggccacgatcccgtcgccccgagccaataaaaaggatgctcggacctccctctccattttcccctctctcccgagacttcccgtgctcgaaatccttcgagccaccgcgctccctctctccgccgcccgccggcgatcttcagccgccaaccgccgccaccctagccaccgccaagctgcgtcgccgttgtcgtcgccgtcggcatcgccgtgccgagatccacccgtccccgcacctcccttttcttccccaggaaaccccggttgccgtcctttgtcggagcgccgccgcccgagctccaccggccaccttccgtcgtcgtcttgccgtcgggtgctcggtgagcatccccctctcctcctcccatcccttccgctgcttcccgcgccgccgctcgccgtcgatggccggtggtcgtgcgccaccgcctctcagccgccggccgtgtgccgccgccaccgccttgtcgggttggccggcaagccagcccccctttttgccgatctgggccgccgcccgtggacccgtggtggtcctggtccacggtgccgccccagccatggtggaccgtgtccaccgtgcgccaaccccttgtgtgtcgctgactcgtgggacccgcctgtcg

SEQ ID NO: 71451 - DNA, 700 bp, Oryza sativa
  Clone ID: PAT_MRT4530_71924C.1
cccacgcgtccgggagccgggagctccagatccgtggcgccgtgctgctgctgcgccgtgctgctcgcggcggcgctgctcttctccgcgccggccaccacaggtttccccggctctcgctccttctctctctctctctctgtttgcgcctgccagctcgtgccgtgccggtctcagatccatgcgccggcccgatcgccgaggctctcgactaactttcacgagttgtgaccacgagatttgggcaatgcgatcccctcctgactgtgtcggtggctccagttcggtgtgtcggtggctttttttttttttttgaattccgattcgtttcatcagtaattcagttcgtttcgctcctgcttttgccagaattcttggagcagattaggtagcagtaattcagttcgtttcgctcccgcttgaccggattcttggatcaggttaggtagcttagatccattgagaggagcacgcatggagcttccttcccacactaatcagtgcccaaggtgatagatctgatcaggagaggcgaattcgaaaaaaaattcccttccagatcgaaatcgggatcacgatataactaactcatggggcttattcatctgccgaactgctaatttacccccatttcgtttcccttgttcaggatcttgatatgcaactcttttttgttttcctcttgcagaggcttatgatg

SEQ ID NO: 71452 - DNA, 603 bp, Oryza sativa
  Clone ID: PAT_MRT4530_71925C.1
atggctggggcggcaccgtggaccaggaccaccacgggtccacgggcggcggcccagatcggcaaaaaggggggctggcttgccggccaacccgacaaggcggtggcggcggcacacggccggcggctgagaggcggtggcgcacgaccaccggccatcgacggcgagcggcggcgcgggaagcagcggaagggatgggaggaggagagggggatgctcaccgagcacccgacggcaagacgacgacggaaggtggccggtggagctcgggcggcggcgctccgacaaaggacggcaaccggggtttcctggggaagaaaagggaggtgcggggagatgagtccggcgacgattcgcggagacagaggagtggccgagctacacacgagggctgcggtgccggggaaggcaacggcgcagtgcggcgtcaatcgaggaggcggcgcaacgcggttggagacaacaaatgagatgatggctcggcctcgcagtgagaatggcgctgcggggggtggaagaggaaaaaggagtggagaccgggtggatctcggcacggcgatgccgacggcgacgacaacggcgacgcagcttggcggtggctag

SEQ ID NO: 71453 - DNA, 409 bp, Oryza sativa
  Clone ID: PAT_MRT4530_71926C.1
aaaaaggggggggaaaattccaaaaaaagcccctttttcaaggggtttcggtcccttcctttaaaaatttttgtttgctttttttgggacccccccccctttggaaggggcaaaacgttccggatttacccccccaaaaaaaaaagttttttttcttttcccggcgggccctttaacctttggttccccccccttttttttttgggattgaaccccctttacttggttatttttttttttccaaattcctcccaatatttcttttttttggttccaaattttattgggttccacattaacccacccgggggcttttttttttcttttaaagaaccctcccgcccattgctttagtttcccttggaaaatttattgaaacccttttttgttttgggaacctttccccccc

SEQ ID NO: 71454 - DNA, 570 bp, Oryza sativa
  Clone ID: PAT_MRT4530_71927C.1
ttttttttttttttttttttggcagtacaaagcagtaggtggccaaattggccaggttatcaatcaacaagtatacatgaaaaattagctccaaatctcacattggaataacagaattgcagtaaattttgagctacattttattcaccaatagaaacgacctaaaatttctccaaagaacatgtataatataaagctaacctcgctcacaagtcagggaatccccaaaatcgaaagtcctcccgcgtggattcggtcgtcgaaggagagcccccggccgctactcgtcgagctgcttgagctcggctttgagctgctccatcttgagccccatggatcggcggagcgagtcggcgtcgggcggcgggaggcgcgcgagcagcgactcgaaggccgcgagggcctccccggcggcgtcgcgcgcgcaggcggcctcctcgtcgaagtagacggtctccttgctgtccatggcggcctcgatctcctcccggctccgggaacttggggtcacctcgtcgacatccttggcgaagtccgccgtcgagaagggccgccggtggggggaccctc

SEQ ID NO: 71455 - DNA, 165 bp, Oryza sativa
  Clone ID: PAT_MRT4530_71928C.1
atggaggacctcccgacgctggtggcgttagagctcaaggaggccaagccgacgacaaagttttgtcggcagaggcttgttgataatcacgggagtggggggaggtggaactcaagcaatggccaagtaagggcgtgggaaagaaccgcactaaggctcggatag

SEQ ID NO: 71456 - DNA, 547 bp, Oryza sativa
  unsure (1)..(547): unsure at all n locations
  Clone ID: PAT_MRT4530_71929C.1
ggcacgaggtccgtcgtggttactggggtaccaaccttggtactcctcactcgctccccgtcaagnagancggcaagtgcggttccgtcactgtccgccttatccctgctccccgtggtaccgccctggttgcctcgcccgctgtcaagcgtctcctccagcttgctggtatcgaggatgcctacacatcgtcgtcaggctcaaccaagaccctcgagaacaccctgaaggccactttctcggccgtttccaacacatacggtttccttacccccaacctgtggaaggagaccaagctcatcaggagcccgctggaggagtttgccgacaccctcagggacggcaagcgttactagatgtttgggacgatggtttaaattttctgacggtcgtcggggcgtctttgatctggctttcttcatttgcatgggtttacggacggggcatcaactttcggggtcattcaaaaagcaatttgttatgacctgatttgaacgaaatgagacttcaaccaacgatggattaaaaaaaaaaaaaaaaaaaaaaa

SEQ ID NO: 71457 - DNA, 288 bp, Oryza sativa
  Clone ID: PAT_MRT4530_7192C.1
atgatgttgacattggataggttcaaattcctagaggcggtcaagctcgggggatccaaggatggattcgacgacaggaaagcaacggtcgtggccatctctccagatgagggagagtcgacggacatggccctcgtgggctcgaagcgtgtcatggatggcggccacatccttccccattgtctcgccattgacctaagcctcaagattgagaggcacggagcaccagagcgggcggcgggcgccaccgtcatgagaggacctgggtgctggtgccatccttggtag

SEQ ID NO: 71458 - DNA, 538 bp, Oryza sativa
  Clone ID: PAT_MRT4530_71930C.1
gggaggaaaacaatttcagcacaaaaaaccccacttattttacggatcaaaaaggaaaggtacaaaacatcagggggagggagaaaacgggccttgggggggcaaccaacaggacaatcaggagggggtcttttaaaacggggctgggggcaaatctatgatctttttatccaccggaaacgccttcataaaaatatcatcggaaaaagggggggtcgatccaaacaccggatggggaataggaaaaaccccgggattttgggtactcagggcaacaagggcaactgccggcttgggggggttaggattgaaccggaagggggtgagcccctcagggaacacaaacacatcacccttggggagcaccttggacaaaaaccgggtattggggggggacggaacaaagccaacggaaaggggtccttcaagcaccgggaaaaactcgggtgcccaagggggcgggggggggggggtcaaacccaagggggcaaaggcaaaacgggctatcgagaagccaaggggtttggaaccaggaagc

SEQ ID NO: 71459 - DNA, 1038 bp, Oryza sativa
  Clone ID: PAT_MRT4530_71931C.1
atggcggtggcgaggccaaacctcaacggcgccctgtctctgcgcgtggaaggcaggccggtgcgcggagcggaggttgaagacgtggcatggaggtggcggatccggcgccgccgcggccagatccggcctctccgcgggtggatctggcgactccacgccggagtaagccgttctcgggtggcgacgacgggaggtggaggtggcggcgtctggcagctggcggcagccggcgaaggaggccggcgcacgtggaggacacggtggcggctggctgcggtggtggtgacagcggaggccggtgctcgcggaggccgcggtggcagccgcagcagaggcttgcacgcgcatgaggcttggccgagcaaggcgtgcggctggcctggaggtgcggccaggtgggcggcgcggcgcgctaggtggggcaaggaggtcggacaaagggggcgctggcgggtggcgccggagccagagcgaccgcgtttccgatgtcggtgcaggcctagatgtgactacgccttcggtcgtggtaaccctactgagggcattgttgagatacccctcctctcttggcaaggatctctgggtgaaaacctagtccagttctttggacggatgacgacggtatctttcggcgtcgcaaccctcgtgagggcgtcgtttttgagtcttcgtgtcgtggtggtgttgttggcctggtggcgccgaccgaccagcagcgtcaatcgtggcgcctcctctggacgtcgccggatttcctgctacggcggcgggagcagcgacgccgccagcgacgggcgcatggagggtgagggcccgtccggtggcgaggcgttgaccaagataagaagagtcgacgaacaccacccggtcatggagagaatgaagaacatggatgcagatatatcagtggtcgcaggtaagataagtcgggctgccagaacagcctgctccgatgccaaatgggtagtggatgctcaggttcccgcaactcttggggcagctggcacaagcatcgccatggacgggaggctgtga

SEQ ID NO: 71460 - DNA, 312 bp, Oryza sativa
  Clone ID: PAT_MRT4530_71932C.1
ctggcgtacgggtgctttgagttcctggggcagacggcgcccgatcggctggagcatatcgtgccggtgcgcgttgtcgtgtcagtgtcatatcctgagccaaagaggccgaagacagagagagagagagagagagtaattgatacgccgaatccggctggggagtgtgagagtgagatttatggccgcggcgaggatttccagacgcctgctacgtcgatcgacgaggcgcgggaggaggcactagctcctcatgatgaggcgcgggttcacgacagcggagggatcagggcccgtcgtgatagacacgca

SEQ ID NO: 71461 - DNA, 319 bp, Oryza sativa
  Clone ID: PAT_MRT4530_71933C.1
tcgcgatctaggactagttctagatcgcgagcgactcgccccgcaatcttttgttaatcaacgcttgcattattacacacattcatatattaccacatgactagccactacgtataatactgaacaataaacctgtacaaatcacacgccaattcaactaaactaggaacctacgtacgtccttatttatacgcacactatgacacgttccacatacgacacagcatgttcttcaccattaaaccgatgcccaaactcaaatttactcacaaggctttaacctaaacaaacagtaacaggtaattctgtcaaaactttt

SEQ ID NO: 71462 - DNA, 417 bp, Oryza sativa
  Clone ID: PAT_MRT4530_71934C.1
atggcgagctcgggggggaggtggaggcggagcggcagttccatgctaaagctggtggtggccttgtgcttcttcgctgtggccatctccctgtgttgcgtctgcctcagctcgggttgcggtggcagtggctgtggtggattcaggcggcgcgctgtgctgctccgtttagatttccggacacgagcaacagcatattttggcgctaatcaggatcacagctcgagcgggcgtcgatggcggcggctgctggcggagggcccggggtcgtacccgccgcggtgcacggccaagtgcggcgcctgcgtcccgtgctacccggtgcacgtcgccgtgccgcccggcgtcccggtcaccaccgagtactacccggaggcgtggcggtgcaagtgcggcaaccggctctacatgccatga

SEQ ID NO: 71463 - DNA, 318 bp, Oryza sativa
  Clone ID: PAT_MRT4530_71935C.1
atggagatgcagagtcaagccctcctcttctaccttcaatctcctgatggagaggtcgcgcagggaggaatcggcttggagctcaccggagaaggaataatcagcggcggaggcggaataccggctccagggaagaaggttgcgatctccatgctcattgcaccattgattcggtttcttgaggggaaatggagaggttatcgagggaaagtcggtggcacgatggctcggacaatcgttccccacgacagctggcgcaacaatggaaatgtagcggtgctgaacagtgcgcgctcgagaacatccgggcacccatag

SEQ ID NO: 71464 - DNA, 791 bp, Oryza sativa
  Clone ID: PAT_MRT4530_71936C.1
ctgaaaacctcgcagccgtaaaaccctagaggcggattccggccgcagatcggaggcgcggcggcggcggcggcggcggcggcagaggaggagtgtccggtatgcagatcttcgtgaagacgctgacggggaagaccatcactctcgaggtcgagagcagcgacaccatcgacaatgtcaaggccaagatccaggacaaagagggtattcccccagaccagcaaaggctgattttcgcagggaagcaactggaagatggacgtacattagctgattacaacattcagaaagagtcaacgctccatttggtcctgaggctcaggggtggaaccatgatcaaggtgaagacactcactgggaaggaaatcgagatcgacattgagcccactgataccattgatagaatcaaggagcgtgttgaggagaaagagggtattccacctgttcagcagaggctcatttatgctgggaagcaacttgctgatgataaaactgccaaggattacaacattgaaggtggctcagtgctccatctcgtgcttgctctgaggggtggtcagtagatgtagtttccatgcccgcattatctctaaagggagaagcatatttgctattctatttctatctgtagttgctgcagacttatagctatatttggtaggtttattgaagtcctatgcgattggcgcattgtgtattggaatcaattgtcatctgtactggaaaggaaatattggaactaagttaagcagtagtttatcaattgccattctattaaaaaaaaaaaaaaa

SEQ ID NO: 71465 - DNA, 446 bp, Oryza sativa
  Clone ID: PAT_MRT4530_71937C.1
cccacgctcccgaccatgtttgctttaatagtactacattttggaaggaaccgacgtaacgcacactggggttatgaacatatctatctagtctcttagattgattgacactatgtcagtggcgcactatataatttcatactcatttgctgcaatttatgttgtagtttgcttcctcctttcgtaaacagcgttatgctgcttttatcatgagactaagagaaccaaaaactacagctctgatatttgcatcgggtaaaatggcatggttcaacttcttgcaccgtgactgcaaatgttctgttttgttcatctgcttattgacttgtgaattggtttgctatctgtccaatggccagctgttgatcttgtagctattatcctgcatattgattcatgaactgcttttgctggtgtgcaactgcttttgctattagcatactatc

SEQ ID NO: 71466 - DNA, 711 bp, Oryza sativa
  Clone ID: PAT_MRT4530_71938C.1
atgcagatcttcgtgaagacgctgacggggaagaccatcactctcgaggtcgagagcagcgacaccatcgacaatgtcaaggccaagatccaggttgctcccccctctctctgtatgcctgtatgcatgcttcttggctcgatatgccgcgatgagatttgccatggctccgccgatgacaaagagggtattcccccagaccagcaaaggctgattttcgcagggaagcaactggaagatggacgtacattagctgattacaacattcagaaagagtcaacgctccatttggtcctgaggctcaggggtggaaccatgatcaaggtgaagacactcactgggaaggaaatcgagatcgacattgagcccactgataccattgatagaatcaaggagcgtgttgaggagaaagagggtattccacctgttcagcagaggctcatttatgctgggaagcaacttgctgatgataaaactgccaaggattacaacattgaaggtggctcagtgctccatctcgtgcttgctctgaggggtgatactgctgatccaatattgattgataaatacaggtttaatgctcctaggagaaaaaaacgtatagccaattgtgcttctgaaagattatggagaaagaaggcatcaagacttgcacagtcttgttcaatgctcttgaaagatgatggagaaaaagaaagcatccaggcctga

SEQ ID NO: 71467 - DNA, 1515 bp, Oryza sativa
  Clone ID: PAT_MRT4530_71939C.1
atggatgagatgcagatggagatggaggcgcaggcgcaggcgcatgtgctcctcttcccgtggccacagcaaggccacatcaaccccatgctccacctcgcctccgccctcctcgacgccggcctccacgtcaccttcctccacaccgaccacaacctccgccaccgcttcgctcgaccccatcacccaacccgtctccgtctgctgtccatccccgatggcctacccgacgaccacccccgcgccgtcggcggcctcatcgagctcctggactccatgcgcacggccagcagcgccgcgtaccgcgccctgctgcttaccgagtcctcccgctcccgccccgactccctcgacgacgctccgccaccggtgacctgcgtcgtcgtcgacggcgtcatgccgttcgccatcacggtggccgaggagatcggcgtcccggccctcgcgttccgtacggaaagcgcgttcgccttcctggcgtatctgtccgtgcccaggctcctcgagctcggcgagacccccgtcccttccgacgagcaggtgcgcggcgtcccagggatggaggggctcctacgccggcgagacctcccgcgtgtagtgccgacgaaacaagacgacgtcggcgcagaagaagccgatcccgtccccgtgctgctgaccgtcgccgacaccgccgcccactgccgcaactcacgcgcgctgatactcaacaccgccgcgtccatggagggcccggcaatcgcacgcatcgcgccgcacatgcgcgacgtcttcgccgtgggaccgctccatgcaagggtcgccaccaataccattgcactagaaaaacacgaggacgacgacgaggacgacgacgactacggctgcaaggcgtggctggacggccaggacgaccggtctgtggtgtacgtaaacctagggagcctcacggtcctctccagcgagcagctggccgagttcctccacggcctcgtcgccgccggctacgccttcctgttcgtgctccagccagatatggtggccagctcgtcggcggtgctccaagaggcggtggaggcagccggtgagagggcgctggtggtggagtgggtgccccgtgacgtgcactacgtgctgcggcaccgcgcggtggggtgcttcctgatgcacggcggttggaactcgatgctggaggccgccgtggagggcgtgccggtggtgtgctggcccttcttcgccgaccagccggtggtcagccgcttcgtggccgccgtctggaagacggggctggacatgaaggacgtgtgcgacagggccgtcgtggagaggatggtgagggaggccatggagtcccccgagatcagggcgtcggcacaggccatggcacgccagcttaggctggacgtcgccgccggtggctcgtcgtcctccgagctgcagcgcctcgtcggcttcatcaacgagctcagcgccgtgcatgttcgatctagagacgccgacgagaattcatcgcccgcggtttcacttctcacttga

SEQ ID NO: 71468 - DNA, 540 bp, Oryza sativa
  Clone ID: PAT_MRT4530_7193C.1
gcacgagggggggccatgttgcacactaggccttctctccaaggtggttacaaaggcaaagttctatgtgttaaggatggagggctttggtatgggacggtgtatagcatgccagatagggtagctcagggtctcagttaatgtgagaaaatggatgtgtgataattagaggaaggatcagaaggtcttgatagtatcaaggagaaccaaaaaaatcaatggtatatatctgtatagaagatctgggtggtaggtagccagttctctcttaacataaacgatgcatttgaccagaaaaggcgttaagatttctcaacagccaactcacatgatttacactttatagaactgcaccctactcagcaaatatagcaacatgtttcagtacattctgatattccaagagttctaaaagaaacatctgagacaccttcctctaaagactgggcaactgaaacatctgggtcatcacaaaattagacgagattggacaaaaaaattctgaaaggcacctctccaggtcaaatgccttacaaaagg

SEQ ID NO: 71469 - DNA, 382 bp, Oryza sativa
  Clone ID: PAT_MRT4530_71940C.1
aaaacacaaagcccccattttgagggaaggaaaaaaaacggttctcaggagcacaaaaaaaacgagcaccccctggaccagaacaaaaggcccgaacttttgccttggtgcccaaaagcaaaaagcgcccgccccccttcaaaaaacccctttgggccggggaaaaaaaaaaaaagcccacccccggacgggggccccccccccgggggcgggggcgatccctccaaaacggcccagaaaaaagaggccccccgcaaaaaaaaaaagacattttgggaagcccccttgcacaaaggggggagctttaaaaaaaaagcgggcctttggcccccttggtccctacaaaacccatggcaaacgagggggaggggcccggggcccc

SEQ ID NO: 71470 - DNA, 542 bp, Oryza sativa
  unsure (1)..(542): unsure at all n locations
  Clone ID: PAT_MRT4530_71941C.1
aattcggcacgagattaattaccagtmmytaacagctctagcttctttaattttaatctctmcwnntttttccagcttcctaaatctgtacataggtttccagttttttttcttctttttttaatcttttttcaggcaggcttaatatatatttctgcttgattttttcccctttcgtttcaagtgtcctgtagctttgcctttttgttcagtttggggctcttgtcttctgaatttgtcttcctattgcctagtggctctacctgcagagtgtcaactaagctaagtcattaatgacttaattatgtataataaaaatctttacatgcaaaaaaaaaaaaaaaaaactcgagggggggccggtacccaattcgcctatagtgagtcgtattacaattcactggccgtcgttttacaacgtcgtgactgggaaaaccctggsgttacccaacttaatcgccttgcagcacatccccctttcgccagctggsgtaatagcgtargaggcccgcaccgatcgccttcccaacagttgcgcagct

SEQ ID NO: 71471 - DNA, 638 bp, Oryza sativa
  unsure (1)..(638): unsure at all n locations
  Clone ID: PAT_MRT4530_71942C.1
gtatttttggttcaccccgancagggaatatcgtctctccctattgttgcccaccatattttgtaacataatgggtttgccagtttcctcatcaccacaaaaaagaggagtggcatcagtagcatttctggctggttcattgtccttcttntggctccttttcctgcgaccgagcccaaaactatataattctaggatagatcagtgcagttgttggcctggatattgcagatggagctaanacantcctatattggaggcctgaccaggcctcctggtgctgaccatgaagtaactagcaaggcaaaccctaattgatggtagtggagccttccctcagttttntgtttttcaggtttttagttgatcctgctattggccatttgaaatttacagtgtgtaaaattttgatgtaagatactttgcccttctcatggggtgcttgcaaaacttacatttcttcacatgtaacaagcagattagaaagctgtcagacttgtttggctatattgtcggattagttcctatattgtcggctgccaatgttggctatgttgtaaattctgtcgatttacatcgaagttacacgagtagagcaaattaggtttcgaaaaaaaaaaaaaaaaaaaaaaaaaaaa

SEQ ID NO: 71472 - DNA, 355 bp, Oryza sativa
  Clone ID: PAT_MRT4530_71943C.1
tttttgtttgggttattttttttttttctttttttttttttttttttttttgatccttttttttataaaaacccgactccggggtgctgggttcgttataaacagaaaaccccaagaacccagaggccccgaaaaaaaccgggccaaccaacgggcggctggggcccccacgaaaaaggggagtacaaaccccaccctgcggcgaggggccaggggccacccccacccccgctgggaccaaagaaaagcccgcaagaacgggggccccgaccgaggaccccgggggtgggaacccccccccgggccgatagccccccccccttgcggggggggcgggggagaacccccccggggg

SEQ ID NO: 71473 - DNA, 2625 bp, Oryza sativa
  Clone ID: PAT_MRT4530_71944C.1
atggcgccaaggaaaggcaatcccgacagatggaggcaagatggggaaggagatcgcggcggcggtggaaagggaagtggggatcgccgcagcagaaagaaaatgacgcgagtgagccgcggagccagtccatgcgcttctagttctggttgtgggagtcgacgcgagcaagccgagctgggccttctcctggtgcagatggagccgtgtgggcacgctgtcggatcactcgctcgtccacgcgtcgccaatctgaatcgggtgtgcacggtgcggggtttgcagccggtctgcacagaatttttttccaagtttgtgtcctttcttcttccaacggttgctctcctctcttccgagttccgactttcgaaatttccaaaaccctcgatcatctccacccagcgtctcagccatcgatcgatcatggagtgggaggatgatggggaggaggcggcgggctccggcggccagctcggcggcgcaccgctgtacgcggtgggggacgaggtcgaggtgcgcatggacgaccccggcttccacggcgccttctacgaggccaccgtctccgcgcgcctcccgtgctccggccgctacgaggtcatgtactccacgctcgtcgaggggggaggaggccgcggccgccgcggcggtggcccgctccgggagacagtcgccgcgtgcgacgtgcggccgaggccgccgccgccgccgccgccgccgctggcggaggacggggcggcgccggggcgcgagctcaacgtgttcgacatggtggaggcgtaccacagggaagggtggtggccgggcgtggtgtccgcggcatggccggctcgcgggcggaaggcggcggcggcgatgtacaccgtgtcgttcccgtcgtgccgggaagaggcgaagctcccggcctcgctcgtccggcggcggcgggcgttcgtgcgcgggcgctggatggacgcgcgcgacgtggttccaagggtgccgcagtatgacgaagggagcaatgtggaagtcatgttggatacaggaaagcaccgtgcagcctgggtaactgctactgtcattaagatggttagcagtaaaaactatgttgttaggcttaaaaataaggaaggctcagttaacatcgtagattactgctatattcgaccacaacctacctttgacagaaagaagtttgagtatgaactggagccctctgcagaggttgaagtgaatctgggtggtgcctggtcgctaggcgtcatctcagatgttggaagctgtggatatggggtaaggctaaaaggacatgatagctcagaggaagaggactacatgcttgtgttgcgtgctttactcagaccctactgcaaacaggatgatcaggaattgatgccttgtacagcaaaggaatttgcttgtacaagtttggatcttccatgtatctctgcacctaaagatgctgttgaaatcaagggcaaatctagttatgtcgatgtagtcgaaatcagtgacaactctggctatgatgctcatttcaacaacaatgctgggcagctaattcctctgccaagttatccggtattagagaagttgccagttaaagtgcttcctgaaatgaatgaaatgaaagaaacaaatcatgctcatttacaagctgagttcttggcacctgatgattgtacagccggagaccaaaactatgctctgcctataaaagttgaggtggagagctgggtcgctgatatccgcaagaaagaagcagcaatgcagacaattactgatagtggtgaagacaattcaagaaggccacgatcaggagattctgagataccaaattccagtaaattagaaccatattcatctgagcaacaaagacatacgtttcaatttgtttctcggaacaaactggaagtgccagtgagacataagaaggcccctgatgctctggagatgaataccaattcggttgtcttctctcccaaggagcaaacacactgtaatttggagatctttagtccaaactccaagaagatcattgatgcgtcacactatgaaagttatgcgtcattacagcagcatcctttgggccaatgtcaagttccaaattattggagtgctgcagggcaatcttcatttgtgcatccgagcataacaatgaacctattcacaatattgccagcacctaacagtcatccaactacttttgcctcaagcttgttgatggggccttgtgagaaaatagaggacgaagaaaacgtctttgaggagaaactgaggtgcctctcggaattggaagaggacggatttgatgttagggccctgaaggagcggcttgaaaacctcgtgagcataaagaatcaccagacagaactcaagaagaaaagagcaagattggatcagttcatgcttgagagagaggtggacaatgcctctgtagagcaaagccagaagctgctcgacataatgatcaaggagcttgagctgaaacttttagagtaccgagagaagaaggcatcactcgtggagaagaaagcagcgaactgttcggaaattgcaaagctccaaggcgacatggatcaaattgaggagtcattcctttctgccgagtatgatttccacaccaccgctgctgcgccgtggtaa

SEQ ID NO: 71474 - DNA, 425 bp, Oryza sativa
  Clone ID: PAT_MRT4530_71945C.1
cccacgcgtccggtgatttcccttgaggaaggaagagcatgcatttttggttggtttggactgcattaggtataagaaaagcagaggcgaactatcctgttcctggtagaaactgtgcaatatatcctaggtttctatgagaatttgctctactaggtgacctgagatgctggaatatttttaatgtttgccagtgccttttgcctccatcagcaggtggctcttgctctgcctgcacctgcggcaattgttcctttggacagcaaatagggttctactgttatttgttactcaactttgtctatgttcatagctaaaaatagctacatttcgggacagacgtaacttagtgtatcattagttatattatagatacaatgtttgcatactagcctttttatcatgcgtaatcgccaacttatttt

SEQ ID NO: 71475 - DNA, 1592 bp, Oryza sativa
  Clone ID: PAT_MRT4530_71946C.1
aacaaccaaaattatagcaataaaacagggggttttcaaaatagtgcgtcaaaaatgttcagaacacagcatcgatggtagtgtgattagacttgtgaaataatgatttgtgtgggatcatttggagttccactttcccactgccgccattggcatcctggaaacatggcttcacctccacaccggtaaagacagcaacattctggtcaacatcaccccgagagtcactgttgtgactcctagagtggaagaaccttgtgatgcagaacctgccagagccgaggttgacaagttgagggtttttgcattccttcaaatcctctggcaggtaaagctcctcccaacgacccactaactgtggctgggagtccatggcagagaggttagaagcagccaagtagtgcggtgactcatcggagctgaagccaaaccagaggttgaactcaggcacatactcaaccctgccatggaagggtagggtccaattaccgacttttatccatgtgtggcttgccgtgttcaggcagtaggtgccaacaccatcgatggagatgcaaatgtgggggtcaccattgacggtgagcgatgtgtaggagctgatctctgggcggctgcagctgtgccagtacttaggttcacgaacgtacggcggcggcgggaggagttgccactgccaggtcttggagaagttggtcgatgtccgcttgtgcttgcagtagacaaaggcctcaaactgatcgctccactgtgtgcttgagttgacctctggcttgggaatcctctccataacaaaaagactgctgccacggcggtggtgttcatagtcattgtcagcatcggcgttgggtacaaacacagaaaagggcatcgacttgggcttgtggagacagggcaacatgtccatcagccgtgtctctgcttcaaagaggaaagggcgccccaagtgatccacccagaacatcttgtgatccacaaaagggaagcaatcaatcctacatgcctcgtttagagcaggtcggaacttgaggatgggtctgggaagccgaatcctctccatctttaagcctgctgccttcttcttgggattacaggagtcggacaccagtgtctgagaggtgtagtcttcttgcacagctgctgactctgatccatgtgcgattgttgttggtggtggtggtgtagcggtgttaccgaacagctggcctgccagatcgacgcagcgtagccatttggcgccttggaaggggacgtcgacgatgagattcttagcccgacgcgacaggcccatcttcagagtcgatcagcaactcccaagttccagctccaataagcagcagcagcaaacagaagatgtagccagccgagccgagataaagcttccttgaggcgcgcggtcggagcaggaagtcagactgggatggagtctcgacgcctaaaagtttgggtctccagcaaacagatgcgaccgcagtggattgcgcgtcctgccctgccctgcgatggatctgaggagcgcggtccggtcggagaaggggaaaggggccagcggcggccggcggggatgggagtggcgaatcgagatttccggccgg

SEQ ID NO: 71476 - DNA, 395 bp, Oryza sativa
  Clone ID: PAT_MRT4530_71947C.1
aagggggggataaaaacggcccaattttaaaggccaagccggacctgcccttttaaggatttttagcccaaccaagggaagggttgacccaaaaccaaatttagcccaaaggcttattatttaacccaaaatttttattcaaaaatccaaacggggggaaaatccatgcccctaaaaaccaatcactttttaaacattcattatttttaccaggtcgggaccaaaggtttttttaaggcctaattaacttaaaaggcgcccgcattcctaggaagcggcttatgggcgggcgggcccatgaaggggcccttataaaccagcccagccaaaggcccccctattaggggccccaccccatagatccagggggcggcccattcccccgcggcgagggc

SEQ ID NO: 71477 - DNA, 1332 bp, Oryza sativa
  Clone ID: PAT_MRT4530_71948C.1
atggcggcgtcctcttcctcctcctcctcctcccagcagctggccggcgacggcgagctcatcctcgcggcctgccatggccggccggtcacggcctacgacgcggtgtcgggccacgtcgtggccgagttcccggcgccggtgaacacgtcgcggcacggcctcgccgtcgtcgctgccccgggcgccgcggcgcccttcgtcgccgcgtcccacgtctgccccgtcacgggcgccggctccgtgctcctcctccactggtggtcgcgggcgcccgcgcggtcgctgccggtccccgagccggtcgcgccgctcgtcgcggcgccgcgcggcggctcccactcccacctcctcgccggcggcctgtcagggcgcgtccacgccatcgcgctcccgtcgggcgacgtcgcgcgctccttccgcgcccacggcggcagcgcccccgtgtcgtgcctcgagctcagcgacgacggctcgctcctcgtctccggcggctacgacggcgaggtagccgtgttcgtgctcctctccgtcctcgacgtcgacgccgacgccgacgacgccagcgtctccgccgacctctcgctctaccgcgtgccggcgcacgccgcgccggtgacctgcgtcgcgtgcgggcgcggcgggtgcgacgccgtcgtggccacggcctccatggacggcacgtgcaaggtctggacgctcaaggacggtagccacctgcgcaccctcacgctcccatgcaccgcgttctcgctgaccctggaccacctcgccgcccgcctcttcgccggcggctccgacggccgcgtccacgtcgcgtccctaagccccgccgccatcacgagctcgtcatggcacgcaagcggcaacaccaacgccgccctcgtcggcgtcggcatggcgaacgggagcaagaacctcgtcacgtgcacggaggacggcgaggtcagcgtctgggacataccaagcgggttgctcctcgatgcctcgttccggatcagcggcgcggtgaccgacgtgatggtgatcaagaaatccgccgccgccgacgccgccgccggagacatggtcaggccacgcgacggcggcgtgggcttcaccggcgtgcgcgacggcgaggcctggaggagagccggcgaggtggcgcggatggagcagacgctgcgggagtcggaggtggagaaggcgaggtccgtcgagctcgtcgagatggccgtcggcgggtacaggagatgcctccggctgatgctccgggaggtgaccgccaccgtggccggtggcggccgccgtccgaatgacgtcagctcatcggacggtcacgtcagtgactaa

SEQ ID NO: 71478 - DNA, 1436 bp, Oryza sativa
  Clone ID: PAT_MRT4530_7194C.1
atttatgtgtgtgacatgtatgtcgagttcgttaaccaactcgtctgcaatggaattctgtgacgatttgctcgtggagattctctcgaggctcccgttcaagtcgcttgcaagattcaagtgcgtctcccgctcatggcgcgcgctcatctccggcggcgacctccgccgccggctcccgctgctcgccgccggcttgttcgtcggcgacggcggcggcggcgagccgaggtacgccaccgcgtgctccggcgatggtgttgagttctgcgacatgagcttcttcccgctggcggagacggcggcgagggtcgtcgacgcgtgcgaggggttgctgctgtacaggtcgctcgccgcggcgtcggcgatgtacgtcgcctgcccggcgacgaggaggtgggcggcgctgccggtgccgcggagggaggcgcagctcccgctgctggcgttcgacccggccgacggcggcggcggctcgccgcgctaccacgtcgtctgcttcgtggcgtggcaggagcgcggcgccaccgtggacgtcttctcgtcggagaccggcgcgtgggcggagcgcgacgcggcgttcggcggcgtcgaggcctcgtcgctgtcccccaccacgcactaccgcggcggcgtcctccacgtgctcgcgtacccggaccgcgtcgtgctcatggacctcgccgccacgaccacgacgacgacgtcggtggcgccgggcaggctcgcgccacggctgcccgacgacgtcgacgccggcgcgcgcctcggccactcccgcggccggctccactacgccaagtgcgacggcgagcggctgagggtctgggccctcgacgtcgacgccgcctcgccgggctcatgccaatggatcttgacgaacaccgtctgtgtcaacgagatgaccatcaatggcgggctctgggcggcaagcgaggtcaagttcttggcgttccacccggacatggccgacgtggtgtacctctcgtcgccggaggggaaggtggcgagctgtgacatgaggaggaaggagatggtgagctcgtggaagctgggagctgagcaccatgtcgtcaggttttggttgcttggtttctcctcgggtttgatgagctgcctgggtggcgagcaagcatgccagattgccggtgctagctagctatagtatactagtatattttttttctgctatttcttttccatttgaccttcgatttgattgcttcagaactcatatatcaaaacgcagttttgaagaaaaagttaaatggatggtggcggcgtgtggcaacgataacataagcccttttgaattgtgctttggtttgggtcggataggtgttgtgacttagtgtttcttggtagagttggagttgccgatcacatgggtgatggtgtaatgataataacgtcgtgtttttgccaaaaaaacaaca

SEQ ID NO: 71479 - DNA, 710 bp, Oryza sativa
  unsure (1)..(710): unsure at all n locations
  Clone ID: PAT_MRT4530_71950C.1
cattattgatcggctaatcacccggtggattagcngttggtgtctgtcttgacaataaatttctacttggttgggcttgttgctgtccaatgcacaatgatcatcattcatcgatttgtgctgcaaccaactttgtgcacataatatcagcatgtattatcaccaagagcgttctcttttgttactgtctggaaggacaatggcagacagacatgttgctatcgtcgttcatcagcaaagacattgtgaataggggacaaagaccaattaatcagcgttgtggctacttgtccaagaatgccgacataagaaggggaccttgtgtttaagagagattgttgcattgctgccgacctgaacctgccaaatggaacgctcagcgacaattttgcctccttatgacccctgaaatgttgaaaaaattatggctatgtcgctccaaagtcgtcgtgactttagacatactctacgtgccactgtttttagcagcaccagcacggcatgagtagaaccaaaaatatgcaagccaacgaattgacttcctccagccttcaagtcccgtgccacaaccctccaaagtccagagtgttgagctaacgagatttatgaccggtttgatcctacccttggaggaaagggagcacagtgttgtcacttgtgagatttcatgtaatgacaatgcaggagcaattcttaaaaaaaaaaaaaaa

SEQ ID NO: 71480 - DNA, 747 bp, Oryza sativa
  Clone ID: PAT_MRT4530_71951C.1
atgctgccgccggccgcccgcctcgcggcccgccgcctcctagggctcgcgacctcctccgcctcggaatcggccgcggcgcgacgcttgtcccgttctccgcacctcgattcgccggaaaacaaccccgacatgccgtgggagttcacggaggccaacatgaagaaggttaatgagatattgtctcactatccaagcaactacaagcagtctggtattattccaatgcttgatcttgcccagcagcagcatggtggatgggtgccagttgcagcaatgaatgctattgctaagatcgttgaagttgcaccaatcagagtatatgaagttgctacattttacacaatgtttaaccggactaaggtgggtaaatatcaccttttggtgtgtggaaccacaccttgcatgattcgtggttcacgtgaaattgaagaagccttgttagaacatcttggagttaaacggaatgaggtgaccagtgatggtttattttctgttggagaaatggagtgcatgggctgctgtgtgaatgctcccatgattgctgtggccgattattctaaaggttcagagggttacacatacaactattatgaggacctcactcctaaacgagttgttgagatcgtcgagatgctgaaaagaggagaaacccctcctcgcggcacacaacacccagagcggaaaaactgtggccctgctggagggaataccaccttgcacgctgacatgaggcggcagtggtaa

SEQ ID NO: 71481 - DNA, 1172 bp, Oryza sativa
  Clone ID: PAT_MRT4530_71952C.1
gggaggggcgcatttattccctcccccctcttcgcctgagtcgagtcgcctcccccaccgccggccaaccatgctgccgccggccgcccgcctcgcggcccgccgcctcctagggctcgcgacctcctccgcctcggaatcggccgcggcgcgacgcttgtcccgttctccgatctcctacgccgccgcgggctgctcctccaggctgttctccacggcgcttaactaccacctcgattcgccggaaaacaaccccgacatgccgtgggagttcacggaggccaacatgaagaaggttaatgagatattgtctcactatccaagcaactacaagcagtctggtattattccaatgcttgatcttgcccagcagcagcatggtggatgggtgccagttgcagcaatgaatgctattgctaagatcgttgaagttgcaccaatcagagtatatgaagttgctacattttacacaatgtttaaccggactaaggtgggtaaatatcaccttttggtgtgtggaaccacaccttgcatgattcgtggttcacgtgaaattgaagaagccttgttagaacatcttggagttaaacggaatgaggtgaccagtgatggtttattttctgttggagaaatggagtgcatgggctgctgtgtgaatgctcccatgattgctgtggccgattattctaaaggttcagagggttacacatacaactattatgaggacctcactcctaaacgagttgttgagatcgtcgagatgctgaaaagaggagaaacccctcctcgcggcacacaacacccagagcggaaaaactgtggccctgctggagggaataccaccttgcacggtgagccgaaacctcctccgtgcagggatctagatgcttgctaggtttgctttgaattacaggcacacaaataagttgggccacactatgattatatggtgtggaaactggaacaaagcaaggcgatgtgttgtttgtattttgatcttgttttgtttacctctgcccgcatcttttttctctccttttgcaccatcagagaaatggtacattgataatgacgatatgttattttgtcagctgacatgaggcggcagtggtaaaaagatttgtattcgtctttcggcaaagataaaactcttggacattctctttttgggc

SEQ ID NO: 71482 - DNA, 483 bp, Oryza sativa
  Clone ID: PAT_MRT4530_71953C.1
atgtcccttaagtctcatctgaaacttagcccgttagagatgaggttatccatgatgaaaaacttcgactcgttatcgatgggctgtcacatatgtgatgacccacctaaacctggagggctgtgcagtaacgcgtctcttcctctccccagcgccccagatctagccctgccgctgccagagctgaccggcgtttgtgcggcggctaggacggcggtggtggggaggtgggaggcggaggtgcggcggtggcggcctgaggcagccgggcccgtgcctagccgtgtgagttggggacggctggaggtggtcggaagggcggaggggagcggcaagacgtcggcgagggaggccctcgggggcggcggtgctcggcggtgccccagtggtggcggtggccctaggggcggcggctgcccaagacggcgggggctcccggcggcgccggccacccaggacggcaggggctccaggcagcgctag

SEQ ID NO: 71483 - DNA, 425 bp, Oryza sativa
  Clone ID: PAT_MRT4530_71954C.1
aatgctcaaatgagttgggcgtgacaattggatatgtactgattcatcatcacccatgtcgactttgtccaaaaccataaaaagtcatataacctctcgctacaatacataatgtgccatttatcattttaacattaccaaaacgccttgcctgccgtgccaggtttaccatcccacagttctttctcagctacttggccgttatcttcgccttcaatgagcggtatcaccaaccctgctcgccttctctcagacagccaacgatctatccaccccttcatccgctttcttgactgttcactacccacgttgacggtcgggacaaccttttcgatccgtaaagtaatgaaaaacatggctagctttcgaaaactgttgtgttccgagtatggaaccccaaaacacatggtttccttggggctgcc

SEQ ID NO: 71484 - DNA, 960 bp, Oryza sativa
  Clone ID: PAT_MRT4530_71955C.1
atggcgacgtcgatctccgccggcttcggcggcgagcccggcgcggtgctcgccccgtccgcctccgtcctccccgccccgcgccggcgcaaccccgccaccagctccaagatcctgcttggattgacactggcacagtttagttcatttcctcgtggacgatcttgcaacatcatgcttactcctaagcatctaggcattgagcaccaaagctgttcaaagagctccattcagacttttgctctttcaaggaatgacttctctcctattgctcaagaggtggaaggctttcttcacaacattgttaacatggggtttcttgatcgtctgaaattagcatggaagataatcttcccagcaccaagcattaaggagaactctaatgcaaacatcgcaaagcagaggcttaagatgatactgttctccgacaggtgtgaagtgagtgacgaggcaaagaagaagattgttgagaacatcgttgaggcactctctgaattcgtggagatagaatcacgagacaacgtccaggtggatatctcaactgatgctggccttggcacagtatattctgtgaccgttcctgttcgccgtgtcaagcctgagtaccaggaatctgaagagcagtacagagggaagatcgtaggtgttgacttcaaggacactggagaaacatcaggcagcgtcgacgttacgttcgatttcttcgtgcccaacaagaactactgaccgttgtattccccttttgcttccgagtatcccagaactccttggttagaatgttcatttgttgaaggctttcttcgcatcttggttagtctaatgtacatatctaggctttagtttgtctctgcgtttcatgtaattttattttgaatttttgttctgaaggtggcaatatcagtaccgtggggttagtccacttggattttccgaagaaatgtttatttataagaaaataac

SEQ ID NO: 71485 - DNA, 1227 bp, Oryza sativa
  Clone ID: PAT_MRT4530_71956C.1
atggaagctagaagagagaggctccgtgaggacgtcaaaaggaggaagagtgcaagttccttcaagcccagaggagctaaagaactaatcctgctaatcatcgagaggctcgctggcgacgatcacaactgcagagagatatgcgacacccaaggcctgctgtccaagatcacagctccgatcacttcacgtgctttccttgacgccgtttgcgaagacgatgatgtatggtttgacatattaagcacatcgctcagagtcctggccaggcttatcagttctcctggagaagccagcacaaggctgctccaggaaacctcaactagccaggacatggaaccggcactacagatccttgcacaggttgcattggggccttatactgggctcatgaccaaggaagagtttgttagtctgcttcgggacatcttcttcggcaacaaggataacattgaggagaaaagcaggagatacggcaccgtggttgatcaactcactgaaatgcttgtcaaggacaagcagtgccagattagcgcagcagcaatattggagcacctatgttctcgcttcctgaagagctgccaactatcgaagcaggatgccatcaatcttttgacaacggttctgggcctaatattgtccagtaatacggaaagaaatgcagtggcaggttcagattcaagcaactatgcaggtgctgcgacagaggcgagaggaagcgactattctgcaatagccagagatgaagaaagccaaccgccaaaagatgccgttcaggacaagtcccctacggagcaagatgatatactatctcaggaaaagaaattgcttgcggccttgctatcctttacaatggtgatatgcgagaaactgattgatgcagatgacttctctaatgttgctcatgtggacagagaactgttgaagaagctgatagagataatagatgtaaataacgatgccacagctgactgtctgagaataatgaagctttcctgtcaggtggctatactagcaattcagcacaaaccgagctgcgccaaggacttcaatgaacatgatcgaaatcatgtactgaccaaggcttcagagaacttgttagaacttgataaatgcatgttctttgctggtaatgatcatgaggcaatcaagcctgctagatctctctcttctcttgtgaaagaagcacaagaacgcttcaaggaagcacaagctagagccaggtaa

SEQ ID NO: 71486 - DNA, 1416 bp, Oryza sativa
  Clone ID: PAT_MRT4530_71957C.1
atggccgccgtcgtccgtgagcttgtcgagaggaggagagttcattcgcaagcgcacggatataccattatagcatttcacccgagagtattccaagggtatctgtcgacgtttgatgtcgcgattccgatggatcggcaatggatgtgcgcagaccgacggtcgaaagagtttattgatggcgtgcataattttctgagagtggccgaagctaacaagcagaataatggttttatccgttctccatgcactaagtgcaaaaaccagagggagtattttgcagtaagaactactcatattctcttgtttgagatgggcttcatgccaagctataatgtttgggcctcgcatggggagcaaggaaatacaacgggtgaggtggaaagggctgttgaagataatgacgctgcaaatgatcgtggtcagatgttgcaggatgtcaaggaggactgcgaaagtgaaaaggaggctcagaaattagagcgttgcgaacaggggcacaaaaagttgggtacaactctggaatttttgcaatggaaggccgaaaatggtgtctgccacaaggcattcggcaacgtattaaaactagtgaagaacattcttccggaggaaaacaagttgcccgaaacaacatacgaaggtaagaagatagtctgccctctaggactggaggtgcagaagatacacgcatgtccgaatgattgtatcctctatcgtggtgagaagtacgagaacctagaagcatacccggtctgtaatgcactacgatacaagattagaagagacaatccaggtgaagttgacagacagccttcgaagaggagagttgctgctaaggtgatgtggtatttccttataataccatggctcagatgtttgttcaggaacaaagagcatgaaagaatgatgcgatggcacgcagaagaacgtcaacaagacgggatgctgagacaccccgctgatgggtcacagtggcgaaacatcgatagaaagtttaaagactttggaaaggatgcacgaaacgtaagattcggtttaagtacggatgacatgaatccatttggagagatgagcagtggccataccacttggactgttacgatgtgtatctacaacctccccccttggctatgcatgaagaggaaatacatcatgatgccgattatttttcaagtcccaaagcaacccggtaacaatattgatgtgtacctaagaccactggtcaaagatctgaaactgttgtggaaaaaagaaggcgtccctatgtgggatgaggacaaacaggaggaatttaacctacgagcgttgttgttcgtaaccatcaacgattggtttgcccttagcaacctatccgaacagtcaaacaatgggtacaaggcttccattgtttggaagaaactgaaagtacgtatctga

SEQ ID NO: 71487 - DNA, 605 bp, Oryza sativa
  Clone ID: PAT_MRT4530_71958C.1
aacttaaagctgtttgactttaactaaagttaaaacattgctagtcattagttgttactgtggaaaatctaatttgttgtattacgatgttttctgatctattagatcgagtctagttctccacctggtgcctgcatccccttctgtgtcgtcccttgactcttctctattcccatcaatgatttttgttgtagatgttcattgatttagccgatcatatagtagccgtggttgtaggtgtagccgcatacagccgaaggcgaaatttttttttacgccattacgttgtgaagatggaactgcaattgttagcatcttgcacccactttggttggtccgtctgcaccgtgaagcagtcatcacaatagtgatgctgagttgatacaatcgttgtcgtcgtacatgacatgatcaatgctgttgccgctgacgcggtcgttgtcgtcgtagaggacacgatcgatgtcatcgatgaagcgtcttgcagattaatctgtcagaggacacgacgtgtgcatctatgtggacgagtcggcggcgacaaattgatgaagaccactggtgatgtaggatcggcgaagactgttgtgttgctgatgagtttg

SEQ ID NO: 71488 - DNA, 1704 bp, Oryza sativa
  Clone ID: PAT_MRT4530_71959C.1
atggatggtgtggtagcagaagatcaagcaggcggcagcggcagcggtcaccgccgcctcatcggatcgaggatcgaggagcaccgcaagtacatgtcggaggagagctgctgcccgaggtgcggccacaagatcgaccggaagctggactgggtggggctaccggccggtgtgaagttcgatccgacggatcaggagctgattgagcatctcgaggcgaaagtccggcccggcggcgaggcggcggcacacccgctcatcgacgagttcatacccaccattgaaggggaggatggaatctgctacacccaccctgagaaattgccaggtgtcagcaaggacggcctgagcaggcacttcttccaccgcccatccaaggcctacaccaccggcacccgcaagcgccgcaagatccagccgccggcggccgccgcctcgtcgggcggcggcggtggcaacgcgtcgtcgtcgtcgtcggcgtcggcggctgcggcggtggcgcgccatggccatcagcagcagcagcagcagcagaggagcgagacgcggtggcacaagaccgggaagacgcgggcggtggtgggcggcgggcgtcagcgcgggtgcaagaagatcctggtgctctacaccaacttcgggaagcaccgcaagccggagaagaccaactgggtgatgcaccagtaccacctcggcgaggccgaggaggagcgcgacggcgagctcgtcgtctccaagatcttctaccagacgcagcccaggcagtgcgccgccgctgacgccgccgccaccgcctccgcctcggctgtagataggaggacaacgtcgttgagggaccgtgcggcggcggctgccgccgcagctgcagcggcggcgccaatggcttccgctaacgtcagcgtggccgcgttccacggcggcgccgccggcattgatgaattcagcttcgcgcagttcaggagtagcttcgaggaggcgggaatgggagcgtcgtcgtcggatcaccaaagtgctatggttgatcagcggcggcggcagcagcagcacgacgacgacgagcacgaccaccggcgcggcggcggcggccaccactacgtcgggcagcagcagagcgtcgcggcgacgttccacgtcgtcagctcgccggcggaccccatagccaggctgatgtcgccgccgccggctcaccagggcaccgtcatgctccggcagccggagccgccgtatatttaccatcaccaggaggatgaacggccacaccaaccgcgaaagtttgatgggaggtcgacctctggttctggactggaggaggtgatcatgggctgcacctcacggaggtccaaaggaggggaaacatcaggtggtaaggatggcacagaatggcagtacccatccttctggccatctgacagccaggatcatcatggagacaaagatgatattgaagcaaagcaaaagggagagacagaaaaagaaaaaggagaggaaaaacaaagtttctcaagatacacatttgccaagaaatattccatgaacaaggaaactctaaagatttctagtattttgcattctggcatcttgtcagaatcgaagttgccggagaatttcccagtgtgtgtagtggagggagaatatgatgagcatggcaatgcatggatgaacctgatactgcccttttcagattcctccaaactgagattaatgtga

SEQ ID NO: 71489 - DNA, 391 bp, Oryza sativa
  Clone ID: PAT_MRT4530_7195C.1
cggacgcgtgggcggacgcgtgggtttgagtgagtgagtgagattctttggaggagggattttggtttggtttcgattggtggtttgcgcgggattttgcggggaggacagttatgccgaccgcacggacggcgatcaactgcaacacgacggttgcatgggaggccgccaagccgctgatgatcgacaaggttgacgtcgcacccctccacaccatggaggcgctcgtcatcatcctcttcacctcgctctaccacacccacgtctacttctcgtaggccaacggacacactcccgtgcaccctatgatcttcatccatcaagctataagtattgtacacagtcttgaagaggatattactaatcttacccctatacaccatattctccc

SEQ ID NO: 71490 - DNA, 385 bp, Oryza sativa
  Clone ID: PAT_MRT4530_71960C.1
cagatttgccttgccgctgcgttgctgaactcttcgctgatgctgccccgcggcggggggcggcggagtcccggggagttgggggcgctgcctgggtggacgccggccggggagcccgaggcttcgaggaggaggaggaggaggaggcgagccagccgcctcgctcaaaccccgtgccgcgcgcgggcgggggggcatatcggtcgcgccgcgggtggagccgccgcgcggtcgcgagaacggcaaggatatcttggtgatttagttgtccttaccagtttcatcaagaataccatcctctatcagtttaggaaggttcatcctgagtgcaaagatagctgcggagtaagttgagaacaaggcaatacggacacccattgtggta

SEQ ID NO: 71491 - DNA, 1268 bp, Oryza sativa
  Clone ID: PAT_MRT4530_71961C.1
gcaagcaagcttgttgttgtcctgcttcttgcatccaccttatccatgcatccaaatatacaactagaagccaataatctagcagctatcgcccttagggccaccgccaccaaccatcaccaccgccgtccacgccacaggaaagcaccacctccacaaccaccgtcctcgccatcacatggctgggtctggacaaaaagatccactagcagccacctcccctagggttgtcgccgccaggatcatcacctcctccgccgccgccactatcactggaggccgccgcgacctctcatcccgcggcctcccctcccatcggaaatggcggaagggagggtgcagccaccgccaccacctcccctctcgccggatccggaagaggggagggcagggcggccgccgggcggtccgctgcctccccacccgctggatctggcggaagggagggtacgggcgccgccgtggcctcccatcccgtcgaatctggcaaaggggatggcatggccactgccgcggcagccaccgcccgtaggacagtcgttgctggggagctgcacctccgctgctgccatcctaccgctgcctatagcaccgcgccatgccgccccatcagccagaaccgacactgacgagcatgtttccacattgggacaaccccaccgctgcatccgccaacccgcatggctggaccttggcgcgcgggagtccccagatttggaagccgctgccccaagctccatcactaccagaaatcaaatgaacactgcccaaaaaaaaatcatctgccgaccggccacccatcccgccgcctcctctctggccggatctgagggaggggagggtgaggccgccgccccgcgcctggccatcgccggccggcctcccatcccgccaccccgcgcccggctgccgtcgatcgacctcgatcctgccggcccgcgcccggccatcgccggccagcctccatcccgccaccccacacccggctgttgccggccagcctcccatcccgtggccccacaccgggccgccgccgaccggcctccatcccgccgccttgcgtcaagccgccgccgcccgccccactgaactacccctttcacaccccctctcctcctgttctctctcctcccccatcttcctcccctgatccataagataatcccccatccaatccagtcgcaggagctgacgcctccgacgacgcagccatttaccccaccccagctcataaatacttctcgctctcttgcaacgaagccactgca

SEQ ID NO: 71492 - DNA, 1394 bp, Oryza sativa
  Clone ID: PAT_MRT4530_71962C.1
atatagcatccactgttcattgcaaaattaccaaaaacgtatgcacaagctacaaacatcgatagactgatgatgaaagacacacatttattccatgagagacaagctagcaaaacatgcaattaagctctgtccaaagctctagatagggtagtatgcttggacatgcatgcctaacacacaaacatcaacagatcatacatggatcaacacttgtctctctctgagctagtatagctaaacacatacttaattaattcatgtgattatatatgataatatagctctggctgcagcttgatgatactatatcagcgtaagtgtatagcattcatgcatatgtagtagtagtattcagttcagttcagttcagttcagttgggcttggagcttggcacgtagatcctggcccagaggtgcctccccttgatcatgtacttcgccgtctgctgtccgtcgagcaccaccgggatcatcgacgggcaccggagcaccacccgtccgtacaccggcagctgccccgccgccgccttctccaccatcaccgactccacgcacggcccgtacaacgagttgaagaagttgatgatgtcgtcctgtctgatcgggtagccgcgggagaaggtgatgaacagcgagcggtagtcctccggcaatgggatgtagccgtgctgctggtgcggctgcggcggcggcggcggcggctgctcctgctgctgcaccgggaaccatggcgaggccatcgggttcagctcggccaccggcggcggcggcggcagcatcggggccatgtggacggcgtggtggtggtactggtggtacatcggcggcggcggcggtggtggtggtgtgccgtcgagcgcgtcgagcacgtcgcgggggaggaacgcggcggcttcggcgtcgtcgtcgtcgtcggcggcggcgacggcggcggcgacgccgtcgtcgaagatgacgcggcagacgttcctgtacacgtcgctgacgccctccatgacctcgtcgcggtgcgcgtcgaagtaggcgaggccctcgacgggctcggcgaggagcgcgttggtgcaggggaggaagcggagcgccgggtcggcgtccccggcggcggcgagcgccgcgagccgccgctccgccccgcccgcgacccctcgccgccgcggcagccgcgccaggcacgccagcgcctcgtctacgaagcgcagcacgacgggggccggcagcacggcgacgcggcggacgaagtcgtggtggccgacggactcgagccacagccacagcgcgatcacccacctcatcggccccggctgctgcccgtgctcgccgaccagccgccagaacagctcccgctccatcgtgtggaacatcatcagcgcaaccgccccgctgctcgccat

SEQ ID NO: 71493 - DNA, 2645 bp, Oryza sativa
  Clone ID: PAT_MRT4530_71963C.1
gaacaacaaacctagcgtgtttccttaaacttattaaacccatcaggtttcaggtaaaataataacaatcattgtccacggcagccagtgaagtggatactcctatggagggaaggtcttcaggccaagttacatcatgcataaacatcttccagaaaaagacatacaatatatctcctagactgaatcagcaaacgatacagaggtttgctacctagctctaattctttagatgatgatcaagacctaatatttctataatactatccagtcttgtgtccaagtttgtcataagctgctatattctgtggttcacactctgggctgaagagtcgcacgagcaatgccgatgctgagctcacagagattgctccgcatgatgcccacctgagactccttggaactgttattcttggaccgtagtgaaggcggcagagcacccagaaagaaagggcaccgccaacagagaagacgccagcagtaagaaaacctaactcttcttttggaattagttttggaatttcagtatcgacagtctctggcaatcgattgaatcgaatcagaactactcggcgaggcagcttgccaagggcggtgggggcgcgccgcgcgcggtgagcaaggggagatggccgaccgagcgagagaacgtcgtctgcaaccggccgagggcgatgcctcgacggcgtctgtgcgccgccgcgctcgcgtgtgacgcgcttctgcttctgtgcgatggcggcgccgcgcgttcgagcgaggcggaaggcacaggaggtgccgaagaggtctagggttacttgattttgggccttcgtttcggctattgggcaatactcccttctagcagcatccctaatgtttacatccaaatgttcaattggtgtgcgaagcccggtatcagcaacaacaacatttggagcaagcgcaacattattttgcctattgttactagcactggttcctgccgtttctagggttggggtggattcatcggtttctgtagttggagtggactcactggactggactggacttggtagaatgatttttaaagttgtgctcctcttcattgttaccaaatacaaaacaaatcgaggacactgaacacttgacctggatttgggggcaaatggggaatcaacctttgagaagtggctgacaaaagggtcgtgcttcccgctgacccgctgtcgtcggcctcggctcgccgccgatgtgcgcgctaccgccgcgaccggatccctgccgccgccggtgtgcgcgtgagctcgaggccaccctagcgaccctattttctcgatcaggccataccgctgaccctgccttctctgagcttggccaaggggtatgggctccatgcatgagcggagacgggaaggaggagaggggcggtgtggtgccgctatggtcgtcggccgtcgctcggagaagggggtgctcgatgaagataggagctgacgcgtggctgcattggtgttcaatctccggctaaggggtaaatccaatattccgccggcccaggcaattgtatcgtttacgtcggcgttgttcaaggctgcattagtacattcgacctcttggattgctctggtttggatggtatattttcctaccttcactggagctaagcagatctcccaggctagtgtgttttttcgcatcaacaggtggtcgacgccgagcttcgcttttgagcctcggtcaggttgggcggtagtggaggagctccgacgagctccatctctcccagatagtcgacaccgtcccacgcctacgagagcttcatcaggacgacgatagtaataaggagcagatgccggtgggccatgcctggtgaagcgagccgcgccggtctccttttcttcttcacggcatgggggacagcgagggagcgcgaacaatgatggcaataggatagaactcggcgagggagctccagtggacaccaccggggcagccaccgtcggcgctgatagccccgccgcgtcaagctcattggggacgtcgcagggggaacaagacgagagacagagagagcagtttccaagattgcaattttgcaagcaaatagaatcagaaacctggtgcacgcgaattcttagaatccccagagcgcgattgaaggacatgtatctggtagtcactttggtccatggtgcgccggtgctaggtagtttcttccctgcctgacaggctttccttttggtacaccgcccacttttactcaggacaatgcactgtctctctgtgtgagacacgtctattcgtggttctcctaccaacgtggtgcaccatggtcccccatcacacaggtgctttcctatatgcgtgttccgtgcgctaggagcacgttcacctaacaccattgaaagtagctgagaaattatccgctggttaataccacaaaaatcctgatgcacatgcatccggttcgttagttctgctcgaggctgttgctggttcggttcgctggtgtgctttgctcccgttttgccccttttcgctgttgcgcacatggcgagcaccaggtgatatgctgccccatatgtctttcgttctccctgactgctattctgaatgtgtatgcgtgtgcaggggacattgtggatactgcgtcgacacttaggatttgccccgctcat

SEQ ID NO: 71494 - DNA, 524 bp, Oryza sativa
  Clone ID: PAT_MRT4530_71964C.1
cgagttcggtaccagcggattcccaaaagtgtgctccgtgttgtcccccaccctgtgctcaggtttgtccagctcgggcgatcaccagtgatgctgatgaagttgtccccacaggagtgtgggcggaaaaatggtacggttgtggccgctgtttacccatctgtccccagggaatcattactacttattctcatcaaacaacggcgactagtctggtcccttggttggagttgggacaaatcgctgccctggaaatccatacccaggtgggacatgaagaacggtttcagcacactctcggcgtagtctggctccggtattgactcaactgcaggcgatcgccattagttgcccctaccatgcagaggcggtggagtatctgcaaaccatctctggctggctggggccatgagcaatgccgacaatttgacaaaccgatggcaggcccatgagtggggacattggccggggtactacccatctttgtctccactgcactgatcctctagagtagactgcaggca

SEQ ID NO: 71495 - DNA, 339 bp, Oryza sativa
  Clone ID: PAT_MRT4530_71965C.1
ctaaaaattaggatttagcgcccaagagtagagttgttgtttgcctacggcgtcgttacatcggtttgaccacaactcgatatagctggcgcagcgacgaaggactagcgtgttggtttcatcgatggagttgaagatcttgttgttgcagcgtttccatatgttccaaactgcggcgagtaagatgatgcaccagacctgtggggtcagagcattgccgggggtgggaggccccataggtcttcgagttgtgctaggaggtaacttgctgttcatcaaatccataggagtgccaaatggctgccactccggagcagcgaaggaagagatgttccacat

SEQ ID NO: 71496 - DNA, 407 bp, Oryza sativa
  Clone ID: PAT_MRT4530_71966C.1
gaagggaccagtgaaatctgagcggaaactaacatgataataacttacgacaggaggagctaaacattataggtgtgggggtaacgccagtggtgtgcattatagcattgctcactctgcaggtacattcaggtacgtgaaagaccggaaaaagagtaactccttcataacaacactactagcattacataaacacagaaaaacgtttgatccttttcacacatgtcactacgccgaaggataatggggtgaatatcttaggcggacttgaccatggcggcactgatgataaacatgaattcaggcttacatgaaacaccacctactagaaaacaatcaacatcaggctaggcttccaaatccttgaattacggaccaatcacggaacctccatagaaaagccttgg

SEQ ID NO: 71497 - DNA, 561 bp, Oryza sativa
  Clone ID: PAT_MRT4530_71967C.1
atggcgacccccaacgccacgacggcgcgccatccccgcagcgccgacgaaggggggaggagatggagagaggaagacgagggaggaaggggaaggggccccctcccccaccattgcggcgccgcggaccgctcgcccccacgagccaccgtcccccgcgcgctgccgtctgccgctagccacgcacgtctgctcccgcgtcgccaccgccgatgccctcctccacggtcgcccgccgcgccgcccgggaagctccgccttagcctcagctgcctgccgcccgccgcacggggagctccacctctacctcagcctcccgcctcccgccgcccggggagctccgcctccgccgccacccgcctgctcggccttcgcctcagccgcccgctgcccgcccgctctgcttccgcctctgccgcccactgcccggggagctccttctccgccgccggccgcccgctcctactcagccacctgccgctcggggagctccgcctccggggccgccggcgcacccccgcgcgccgccgcccaccatccttcatcggaaaagaggattag

SEQ ID NO: 71498 - DNA, 400 bp, Oryza sativa
  Clone ID: PAT_MRT4530_71968C.1
acagtaggccctcaaacaccaaatccacaaccaccaagatccaccacagctttcctgaaaatcacaaacaaatcgcagcggtaaaatttaacaggcccggaacctcctggtgtagaacaccggaatttccggtctgctcagacaatccggaacttccggtgttcttgtaccggaacttccaggcaatagaaaaacctgggaaaaactaacagggactaaagctaaaattcacgagatgaatcacaggattagctctactaggaaaacctctaggacttcagcacaaggttctttactcacttacctcattttcttacggagaatggctcaagattgggtggaggaagcaaagaagctcatgggagaggctagcaacagctatggagtggaaaagcaaaac

SEQ ID NO: 71499 - DNA, 1260 bp, Oryza sativa
  Clone ID: PAT_MRT4530_71969C.1
atgggccaatggaggagggaggatgaaatacataaatatgtgtacgttgtaggttacagtttaggacttggagttgtaataggtattaggactagatggtatcagagcgtgcggcagatccatggtagaggtacgagggaggtgctccacgccgcgacgactacacggggtgtccagagacggacatggacgcaaggtggagcacggcggcgatcaacggaatttgatcggtggaatcaaacacttctggcggcggccggaaccgtcgatggctgcttcaacagggagatgaccagacgtggtgctcaggttgatggcggcggaagcgattggcgaatcaatcggtgggttggacacttcgggcgggtggctcgaactttccacggagttggccggaagtgcagaagggaaggtgcagaagccgtgagatacgtgaaggcttggaagtccatgtcgcgatggactcagcaacaggaattaatccacgggattgcagattttgcaatcgaacaaatcaccaagcaaaagtcggattgggacctcttggcggcggtgatttgggacgacgagcgtcgagtggcaggagcacggcttggtgttgtcgtcggggcaagtaccggcgaaggggcggcagcgacgctcctgtgtcggggaggccgttaccgtggtcgtcagcatcctcaccggcgggaagcctacggtggcagcatcggcagcgttgtcattggcggtgtcctaagcttgatgtttttcgttttgtctgactccttttacttctttttaatatatccggcagagctcctgccgttaatctttcaaaaaaaaactcctctgcgcggcagcatcttctggacgggcggcggcgtcgggaaccgaagcagcgtcttcggtggcggcgcggaggagacggtgaggcaggaagtagcggccggcgcggcaggggcgcgacaagcgctgggcggcggcgcactcaggctgaggggagcgagcagaagggcgaggggatcggttgtttcgatctggtccctggacgcgactggtcagttgctgcgactgttgttgaccgagtctagttggctgtgggcccatgtggactttttggatgcacagtcaaatgtttttgcttggctggtttgcacgtggagaccgaacgcatgtggcaaggcaaggtggcgtgttcagtcaagacgtgactcaaacgaaggcagcgagtggaccaaaactagaaggtcccgagcaaccgcggatgaaaatcgttga

SEQ ID NO: 71500 - DNA, 185 bp, Oryza sativa
  Clone ID: PAT_MRT4530_7196C.1
aagcttagtaggctatagtaaatgagtagataatactagtactacatattggtatttagtagtaaatgagtgagatgtgtaattgtgtaaagacatatgtagtagtgtatgtgaattatttggcattggatggggattcttccattgatgaccatcgatttttcttcctgaaaaaaaaaaagctt

SEQ ID NO: 71501 - DNA, 151 bp, Oryza sativa
  unsure (1)..(151): unsure at all n locations
  Clone ID: PAT_MRT4530_71970C.1
ccggcggcgttcatgagggtggaggacttctcgcacagattggtgtgagctcgtcaagaccacagcttttttccccgagcactggttcantcagaaccagatgtactaggactcttcnttatattactaccaccacctccaggtattctac

SEQ ID NO: 71502 - DNA, 1002 bp, Oryza sativa
  Clone ID: PAT_MRT4530_71971C.1
atgcacgcgcgctgtggtcggcctgcaatgcacgcaaggcgttctcccatggtgggttgcagcgcagttgagactgatctcttacaaaatgattcgacccacaagcttatcaaggcatggaggaaaggagaagccgtctatgaggagcgggggctgcagtggtggcggtgggcgggagggcgagggtgctggagcagtcgcgccagccggcagcgatgggacgaagataccttttcttttacaaagaaattcagcaagcatgaaccaaattatggccaaggggaagagaaagagaggaggaggaggaagaagggttggatagaggatgacatgtggacccaacatgttatgccacgtcaatgccacgtggggcgaagaccaagtcagcaccgccacgtcagcgaaaccaccctccaagaccgtaagagagtcaaattacgtcgatttaatagtttaggggagtcgtcctacccaatttattttaagggaaatatatataaagatcgaaaagtggcatttcaagtcaccaacatactgatgcattgtttgtttggttcattgattagtgaaggcttgcagctgtgcagctgtgcgtgcagggccgacgacgagggtatgcgaacaaaaacagggtactacttattatctcggagagacggagacttgaccatcactatcggatcaatgagctctgacgtgctcatgcagcacacaccacagaaaatgcaacagccaaacaacacatgtggccaattctcacacataacgataacatcccaatcacaactttatgataaacgaaagcttccattccatccagttcacggcaaagagattacccggtcagtcaaagatagcagctgcctcctgccgctatccgcactgacctctggagtccacacatccaggcttgcagtgatccgaatgccacagcaaagaagagaagaaatcaggaatggattaagtagcattttttttcagcaaccattcagtagcactttc

SEQ ID NO: 71503 - DNA, 778 bp, Oryza sativa
  unsure (1)..(778): unsure at all n locations
  Clone ID: PAT_MRT4530_71972C.1
ccggccggggtctcagccgccgcgccgcccccccgtcgaccgcgatcttccagtccgcaccccgccgcgatggccgacgccggcaagcccgaccccgcgtcgccgccggaggcgccgtcggcgaagaagggggtcttcatgcgccgcatcttcccgttcctcctcgccgccaacatcttcatcggagtttacgtatttgcaaagacctacaagagagaccaggaaaagaagaacgctcagactgctgctgctgcagctgcagttgtagcattgtcatccccagctgccccagctgctgagactgtagatcctactcctccaactcctccacccaaaagagtgcttccaccaatacccgaagacgaacagcgccaggtctacaagtggatgctggaagagaagcggaagatcaagccacgcaatgctgctgagaagaacaagatcaacgaagagaaggcgcttctcaaggagttcatcagggcagagtctcttccccgtttgtgattagcatttcactggctgccctgctcggccttgtttttttttttcttttgcctgctgttccatggaaggacatgttctggattttacacttgtctcttgtttgttggcagaaacggtagcattttgtatgttgtcaagtaatcatttgttacccaaaatactgagtcaagtggcttcagtttcagggaactctggcattntacatcattggcggcttggcgctactggagattttttttaaccaaaaaaaaaaaaaaaaagcggccctcgagct

SEQ ID NO: 71504 - DNA, 1178 bp, Oryza sativa
  Clone ID: PAT_MRT4530_71973C.1
aattttgagtcgtggtaaagaagacggatggacggggggatgggcatgggcggggagcgatggacacgacgcgacccatcctggtttcccgaaacgcgctacgctgccgagcatctagggtttcccacccgctggagatcgatcgggatggggaggggtcgggtggagctgaagaggatcgagaacaagatcaaccggcaggtgacgttcgccaagcgcaggaatggcctgctcaagaaggcgtacgagctctccgtcctctgcgacgccgaggtcgccctcatcatcttctccaaccgcggcaagctctacgagttctgcagcacccagagcatgactaaaacgcttgagaagtatcagaaatgcagttacgcaggacccgaaacagctgtccaaaatagagaaagtgagcaattgaaagctagccgcaatgaatacctcaaactgaaggcaagggttgaaaatttacaacggactcaaagaaatttgctgggtgaagatcttgattcattaggcataaaagagctcgagagcctagagaagcagcttgattcatccctgaagcacgtcagaactacaaggacaaaacatctggttgaccaactgacggagcttcagagaaaggaacaaatggtttctgaagcaaatagatgccttaggagaaaactggaggaaagcaaccatgttcgcgggcagcaagtgtgggagcagggctgcaacttaattggctatgaacgtcagcctgaagtgcagcagcctcttcacggcggcaatgggttcttccatccacttgatgctgctggtgaacccacccttcagattgggtaccctgcagagcatcatgaggcgatgaacagtgcgtgcatgaacacctacatgcccccatggctaccatgatgatgacggggacaatgaattacgaaataacaaggatatgtggcatatatgtggtgccgcatacatgcatgtatcatggctagctacttaattggagtgatggatttgaactagtttcgtatgtagcctgtttgtgtgtaacttgtgtgagatactaccttaaaaactatcggtgtctgttgaacatattctgcgatcaactttaagcgtattattatcattttcattccaaaaaaaaaaaaaaaaaaaaaaaaatcgagactagttctctctctctctcc

SEQ ID NO: 71505 - DNA, 475 bp, Oryza sativa
  Clone ID: PAT_MRT4530_71974C.1
ttaccaaagttggtcgttaacagcggtgagggtggtccggttgcgatcggctgcggcctcctcatggaggcggagggaggactccgcctcagccgccgttctctcgtgggcggccaaagtggtctcacgctggtctagcatgcacgcccgcttctccagtgcctgggtacgctcctctagcacccgagcatgctcctctagctcccgggccatggcgaaggacaggaggtgcacggatcgctctgggtaccgcggccgcggttgcgactcccccaccctcacggcggcgtcctccggcatgatcttgcgggtgaggctaagccgaccccccgattttcgcgccctaggcacccccagcatcagcgtggttaatggtggtcaaatcaccattctggctaaagcgccagcctggccgctcgccgacaaccctctgaattccccgccgggcccacaaccacagcacgggaagtcgtga

SEQ ID NO: 71506 - DNA, 1814 bp, Oryza sativa
  Clone ID: PAT_MRT4530_71975C.1
atgccggccgaaggtggggaaaatggggtcctcaccggcgtgcgaggaaggatgaactccggtgggatttcgatgacgggaggcggcggccgaggtagctctcgtgacgatgaagccaacggcggcggcggtgcggctcggtggcggctcttgtggtggcgagcggcggccggaggagtggagatggtggcggcagatgggtgcacggtgcgggagcggtggagagctcgggagaggccggcggaaaaaggaaaaaggaggaggatgataatgtgcattaaaacccccgtccaggaccggccggggtacacaaacgacaaacgggaacaccactccacaggcatcctcgatggcacggacgaagcctacacctcggagaagccatcatctgacacccaagcacaccacacctcaggtttcacccccgtccccagcgggcaacgggcagtcccctctcgtgcctacgtaaatccggaagcgacagaggccgtcgcagggcctgtcccgctccatcacgcccacccttgcctggatgtgtcagctagagcaaagctacactacaagcccagccgttacccacgctggcttgtgggagagagagggggcggcgccgacatgcgggcccacatgtcagtgactcgggtggcggtccgcggtggactgggtccatggaccggggaaggggcagcgcaccacgtggcgctgatgtggcgccgacgtggcgcacacgtggcggccacctggcagccacgcgggcagctgaaccgacggccccgatctaccctcagcggcggaaccacgcggccggcgcgctcgggcggctcaagccggcccggcggccatggtgcacggcggcacggctcgatgccgtggcggcgcaagtcggcgaccggcggcgaccggctgggggcggagggcggcgacgtcgcggcgacgcggacggcgctagcggcggctaagcggctaggcggcggcacggcggctaagctgcgtgggagagagggaggaaggggaggaggtgcctcaccgacggcgattgacgacggcgagcgacggagggcgatgacggcagtggcacgagctccgaaaccacctagcgaacatgataaaaggggttagagagagagaggtggatagaagagggcgaggacgccagccgaaggcggcggccatggcggtgctcaccggcgcacgatgcggagtgggttacggcggcggtttctgacggaggagaggtggacgagacggcctgcacgacggcgaacgcaacggcatcgacggcacggctcggcacggcggctaacggcggctagcggtggccggagcggtggcggtggcggcggagaggagggcaacggcactagggctgtggagggcacgggagtggatggttgcaaaacgaaaaagagagagggggagacgggggcgctttatatagacccgcgggggtcgattatggccgggatggccgcgatttcgccggcggagtggggagaggtggggaggagagagagacgggattcgaatttcgaatcccggccgtctcgagcgcgggcgcgggcgggaaagagagggagtgggcgcggggaagccggggcaaggcggcgacgtggccaacgtggcccgggaggtgcgggagcgagcgggccggcggttgtgggagctgaagctgggagacgggcccgacaggaaggaagaaggcggccggctgctgggccttggccttcagccggcccagcggggaggggaagagaatgggccagcggcctattcgaaaaggaaaaggagggaaaataaaaagaaaaaggaggaaa

SEQ ID NO: 71507 - DNA, 1456 bp, Oryza sativa
  Clone ID: PAT_MRT4530_71976C.1
ttttttttttttttttttgaatcaaacatgtaaaccgtttattgcacctttaatttggaacaaacacaatcatggtacgtacaattacattggtcaaccaattggccaattattaagctggatgcgcgtgatcataatagatccttgatcacacatccaaattggaacacatgtacattcttttttccatcctcttctccttgattaattaagctggactactaatatttctcacaaagtgcaagcgcgcttaattaactatgcacaaataaatctctctcattttgctaataataacaacaataataatcgacacatacgtaattaattatgttggacatgatgacgtgggttacttcaattttaaactaaccaacgtcatacatgaagggataattaattgacccttctgcagttggtccggacctcacccagggaagggtcagtgacaggggagaggttgcccatgttgatcatggactgcgcgaagctgcggaagaaggcggcctggctggtggcgaagcggtcgacgatgggcgccgtcgtcccggtcgcctccggcgccgacttgagctcctggtccgactggaggaagccgcggttgacctcgatgttggtgtagtagtggttgtcgaaggtgtccggcgtcgtcgggtccaggtcgttgagcgccgccggcggcccgttgggcgggcaccgctgcgacaggaagctccggtaggcggcgtccatggtggggtccggcctccccgtgttgctgaagttgtacagcctgtccgtcacgaactggcactgcaccctcccgaacgtgtgcccacctgagagggcgacgaggtcgacgtcgttgaggttgagggcggcgaacttttggcggaggacggtgaggttgtcggtgggggccggcaggttgagggagccattgaagtcggaggtcttgccgtcgagccgccccagcagcactccccacccgggcccacctgacagctcgacggagatctcggcggcgagggcgaggatgtcggcgcaggagacaacgccggggcaggcgtcctcgagcgcggccttgacgtcgtctacgacggggaatcccctcgcggagttgttgttgggcggcgacgtcttctccgacggcatcccggggacgctgtccagcagcagcgacgcgtcgcacccctgcacgaagcagtcgtggaaatggagccggatcaggctcgcgaagatccgggcgtcgctccggtgcgcatcgatcagcacccgccgcacgatgtcgtacgcgtcggggcacgtgcagtcgtagtactcctcgcacagctgcgccaccgccgcgccgccgccggcgaccagcgccaccgccgccgccaccaccaccaccgccagagaggaagaagaagaagaagaagccgccattgctagctagctagctgctacacgactactcctatacggtcgtgtcgtg

SEQ ID NO: 71508 - DNA, 176 bp, Oryza sativa
  Clone ID: PAT_MRT4530_71977C.1
tgcctctatctcagttggtgaaggcacggccaagaagagaaggaggggcactatctctctctggtaaagagggagaagtcaatgagacaatgaggggctctttctcacgtgcttataggagcaccaacgtcatgagaggctgagcttatatcatggtgactgagcgaacctcattc

SEQ ID NO: 71509 - DNA, 351 bp, Oryza sativa
  Clone ID: PAT_MRT4530_71978C.1
gtgctagatcgtgatctgcacgcttactgactcatagcttgtgccaacctactctggtagagtacaaaccttagtacgttgcataggaactagcacggagtatgcaccttgtgaaccactatgaggaagccgacgtgctcgtgatttaggttatgaacatgatggcttgctcatactgcgacacaatccgcaatgggagtgacgtactcttgtagggctacttattgctgattgctcagcggaggatcaatattggtcaagagtcgaggagtattaactaagttggacgatggcgtcgacagctaggtacttgtctaatgtgatgcgaagtcataggctgctgatatcacc

SEQ ID NO: 71510 - DNA, 385 bp, Oryza sativa
  Clone ID: PAT_MRT4530_71979C.1
cttaaaaaaaacccaaaactttgtattttattattattaaaaaaaacttgtcttgcccaatttttggttgggcgcgatttttttcccagaacaaagaaaaaaccttaaaaggggaaatttttttttgcaagcgttaagcccgcctgtttaaaaggggtaaagggagttgccgttctcacttcttaaggttgggtaaaaatttttggcaaaagggggggagcaaccttccggcaaaggcagggtacctggttgctgtgctccttgccctcatccttctatgaaagccgccttcgatgcataggggggatgcaaatagctaaagattttttattcaggtggatggggcaaaacccggaaaggaaccactctttatggggtcggaatt

SEQ ID NO: 71511 - DNA, 189 bp, Oryza sativa
  Clone ID: PAT_MRT4530_7197C.1
atgttgacagcaacggcgtcggcttcagtcttctccgcttgtatagtttttgccgtatctccaggaaccggtcacaccggccacaggaggcgcgatctggccaggatagagcacggtctgaccgactatggtaggcacggtctgaccggctatggtaggcacggtctgaccggcataggaagcggttag

SEQ ID NO: 71512 - DNA, 398 bp, Oryza sativa
  Clone ID: PAT_MRT4530_71980C.1
cccgtccttaagcttggacccctttaacgggccccccctttttttttgggggttttttacttattggggtttcccccccgcgggccccttccttggagagctgctacacgccaaaagggaaaaactccacatccttttcttttgagacatccatatgccgccaccccacaagggggggcctggggacactacaaatgggggcccctcactatctaaacttgtttggccccccctaatactttttaagcttatgccctgggtttctacttcaccctaaaacgggagaaccctcctatccccggttagcacctaagacggacctccttttttttggcgcgaaacaacagtgtcaccccaaaatccccaaagcataaacccttttgctccccttgaaaggg

SEQ ID NO: 71513 - DNA, 546 bp, Oryza sativa
  Clone ID: PAT_MRT4530_71981C.1
atgagcgacgggtatttcgctctgggtatctggagccagatccccagagcggacgacgcgtgcgacgtggcggcggggactgaggcaggcactctgatggtgaggacgctgctcgtgatgtcgtgtgtggcgcgtctcgacgacgaagacataggggccggaggcatcgtggagaaggcgtggcgacgagcaggtggccagtgcccagtgccgatgcaaacggccggcaagctactcctcggcgtcggcggcgctccttctgcgagcggcgacgggcggcggcgtctctccgcctctcgccttctctccctcgccatggggccgtgggagggctcgaccgtagcgggcggcagcgccctcccttccggcgggaggggaggcggcggacaggggcggtgcccttccctccgccggatccagcgggaggagggaggggagccgacggcggcccaccggcgtcccagcggcggcggcaccctcccctccgccggatccaacgggaagggagccggctgcggttctgtggcaccttctccttcgatctag

SEQ ID NO: 71514 - DNA, 169 bp, Oryza sativa
  Clone ID: PAT_MRT4530_71982C.1
gcacttcaaaacaagctttattccttactgtatccaggcttattacaaaagttcagtatttgggagaatgaccatacattacaaagtgttcaacacattggagcaaacaaaaacaatggaaaccttaactagttaacgcaacattagcattgacttcccaaatggtgga

SEQ ID NO: 71515 - DNA, 138 bp, Oryza sativa
  unsure (1)..(138): unsure at all n locations
  Clone ID: PAT_MRT4530_71983C.1
atgccgaagctcacctgcgacgctgacactgattttggcaccactatgcacaagaccaccaccattagcttnacaatncttcactctacaaatncacttttggctgcacctcatgaaaccccgccgttcactgtcagc

SEQ ID NO: 71516 - DNA, 231 bp, Oryza sativa
  unsure (1)..(231): unsure at all n locations
  Clone ID: PAT_MRT4530_71984C.1
agcncncatctttttttacggggttaccacgtcactaggcttcgacggggttctgagttctgaccgacgaggaaatattggggaaaacctactctgcngggggttggtccaaggcgaaggtttttcctaaggcaaagctggaaggggggcggcttcttgaagcatcgaggggggcccgtcgtcccccggtgggccggtccctcccaaccatggcctattttttcaccatta

SEQ ID NO: 71517 - DNA, 361 bp, Oryza sativa
  Clone ID: PAT_MRT4530_71985C.1
cttccgccgaaacgttctaagaacttatttggcagaaagggccagccggaaaaaaaggggggcacccaaaatgaagaagccaaagacgcttaagcttgccaggggggcccttaccaaaatgcttccaaggaaactggtgttgaaaccaaacctggttaaaaagccaaagaaggcccttaccaaaaagcttccaaagacacccatgtggagaataaaactggtgaagaagcccacaagaaccgaaacccccacccttcttgttcaagaccaagccgaacccaaaagggagaagccaaacccggttaattttaaggttgttcttccacacccttcgaagggggagagaaaaaagaaggttcca

SEQ ID NO: 71518 - DNA, 395 bp, Oryza sativa
  unsure (1)..(395): unsure at all n locations
  Clone ID: PAT_MRT4530_71986C.1
cttgagaaatgataaattataatagaagtacaaattggagaaaagataaaataagagtacaaaaatgggaatcgaagctattgtacacaagatcaactgtaagaaaaaaagnaggcaggccagtaagaagtaaaataaagctgtncccctacaaaagtgcgacaaacgatataatggaaaggcacggaaaagcaaaaatttacaaaaaggcttccaacgctgcctaaaatccccttttccttggccgattacatttatatcgaatgagcctcaatgcggggtttaaagctaaaacgaggcgtgcgtctaaaaaagccttaaacgctaaaatgggctgttcttgctcgctgagcaggttccagcccgggtgttgcaaacagggtagtaaggcgggc

SEQ ID NO: 71519 - DNA, 351 bp, Oryza sativa
  Clone ID: PAT_MRT4530_71987C.1
atgcgaacggggggcggatttggtggtgcggccctctccatcaagctgccgctgctatggtctgaggtggaatggaacaacgatgaaaacaaggttagttgccagatctattgcgccctatgccaccatcgcttcctcgtcgagctcgctagatctggcctcgggtttgtcggatctggcgaacgacatcgctttgggggcaacaaagatgctcagggtggtagcttcattaacgaccgccaggccttgcacggggtgtgggggtgtcgcacggggccataccctctcccaacgcgccactcacatcgcgccttaccccacacctaccaaattctgacaaagaatgcttag

SEQ ID NO: 71520 - DNA, 225 bp, Oryza sativa
  Clone ID: PAT_MRT4530_71988C.1
atggcgaggggcctcggggtgccactggggcagacgtgcggcgtgcccatctggcgcgtgatggttaagaatgaccggtctgtgactggcctgacgccggtcacgtctgactggacggacaaccgtgctcccacgtcgcatctgctaccggcggagtggagggctgtcccccgtgtcaggcgagggacgacgctgggccccactcaaggacaagctgtgatttag

SEQ ID NO: 71521 - DNA, 434 bp, Oryza sativa
  Clone ID: PAT_MRT4530_71989C.1
caagatactatgcacaattgtgctacacttggtgtgtttgattcttattctgtgatgaacaattggcatctgagattattggttctgatatttggagataattggcgaagtggttttggagatgattggatttgaaggtgatatacaggtactgttggatgtgtggtccggtcagatcggacactggttgctggtcagaccgacgtgtatcgagcgagagaagtaataaagttatcatctactttgagagttcttcgatttgtgtttgctctgattcggcagtctaaccaacgagacaccggcggtcagaccgacggcaacgcatcggtcatactggcaggacagcggcggtcagaccagcgatggcacaagcacggtcagaccgacaaatcaactccggtcagaccgatctacatggaattgagggtaacttt

SEQ ID NO: 71522 - DNA, 288 bp, Oryza sativa
  Clone ID: PAT_MRT4530_7198C.1
atggcgctggcgtccagctcgctgccggatctccggatatacgagccatgctgtgttgatcgaggccttctacccaaaggcgttccagcggatcagccaccaccacgccgccgccgcctctgcttaggcctcctcgggttggtctccaacatcgtcatcaacactctcaccccctcctcctccgcgatgcccgatccccaggcgaccacgcaggagcttgcggcgcggccgctcgacggcatgaaggccttcctcgtccgcttgttccccgacttgagggagtggtag

SEQ ID NO: 71523 - DNA, 588 bp, Oryza sativa
  Clone ID: PAT_MRT4530_71990C.1
atggacatctccaggacaaatgaaggctacacgagctgcggcctggatccccgtgctcttctctacccgccgacaccctcgccttcgcctctcgtcgtcggaagaaccctagcgccgtgcgccctagcttcgccgccgctgccgccgctccagccgtgcgccgccgtcgtcctagccgtcgccgtcgttcgggaaggtcgtcatcgtggtcgccgtcgcgtcgccgtcctcgtccgccccttcgccgccgccgaagaccaccggagcatcgtcgccgtcgtcgacccgaagagccccgccgtttcctcctcgtcgccggcgccgtccgttgcttctccgtcgctcttttggtcgtcggtgagttcgtcgtgccgcctgcttcgtcccggtgccctccgtttgcgttctcgcgccgccgttcgccggcgagcgtgcgccgcccgagccgtccgctccgccgagccgccaccgccgtcggtgacgtcatcgctggcgtcatcaaggccttccgccgtgaaccgccgtggacccgatcgatctcggccgtccatcttgggtcggttaaatctcggccgtccgttcgcgtga

SEQ ID NO: 71524 - DNA, 236 bp, Oryza sativa
  Clone ID: PAT_MRT4530_71991C.1
ggatcgcacaaatgctttctactgtacatgaacgacaggatgacctcctcactacaggaaggagtttatatgagaggcccatggataaagactgaaaaatacgatctcatattccgcctcttagccttacatataatcgatactaccagtgcttatctttgttatctgctggtagccattttccctagaagggaccccttgccttggagagtttgtccatacaaacattgtttgga

SEQ ID NO: 71525 - DNA, 204 bp, Oryza sativa
  Clone ID: PAT_MRT4530_71992C.1
atgggcggcaacagagctcatcagaacctgcaccatcagcggtggtatcgcagcagtgtaaatgaacaagacagcgaagtggagagagagaaggaaatgtcattgctactgtgccactgccatgttcaagcaggccaaggggcagaggacctgagtggcatcgctcatgctcgacggctgcaggcgggctccatcgatgtcatg

SEQ ID NO: 71526 - DNA, 513 bp, Oryza sativa
  Clone ID: PAT_MRT4530_71993C.1
atggacggccgagatcgatcgggtccacggcggttcacggcggacgaccccgatggcgtcagcgatgacgtcaccgacggcggcggcggctcggcggagcggacggctcgggcggcgcacgctcgccggcgaacggcggcgcgagaacgcaaacggaaggcaccgggacgaagcgggcggcacggcgaactcaccgacgaccaaaagagcgacggagaagcaacggacggcgccggcgacgaggaggaaacggcggggctcttcggatcgacgacggcgacgatgctccggtggtcttcggcggcggcgaaggggcggacgaggacggcgatgcgacggcgaccacgacggcggccttcccgagcgatggcgacggctggaacgacggcggcgcacggctggagcggcggcggcgacggcaaagctagggcgcacggcgctaggtctcttccggcgacgagaggcgaaggcgagggtggcggcgagaagagaagagcacggggatccttttaa

SEQ ID NO: 71527 - DNA, 818 bp, Oryza sativa
  Clone ID: PAT_MRT4530_71994C.1
atgcggggcccacatgtcagtcctccttcctcctccctctctcccttctctctctttctcttcccttcttccctttggccgccgctccctaccaccggcgagctccagcccctcccccgcgcgcagacggttggcgagcccctcccccgcgggcagatggtcggcgaacctctcccccgcgcgcggacggccggcgagcccctcccccgcgggcggacggccggcgagcccctccccacgcgcggacggccggcgagcacctcccccgcgcgccgacggccggcgagttcctcccccgtgcgctatcgtcgtcgccgccgccacgacgcctcagcgcatggccgcctcccccgcgagtccctctactgggccgcctcctcgtcgccatcgtcgtcgaccccccactccctccgcacctactgcctcctcgtccacctcctctcccgcaccgccggatgccgccgccgctcgctctcgctgtccccgcacgccaccggccgaaggggaagaaggggagagaaagagagagaagggagagagggaggaggaagaaggtctgacatgtgggccccacatgtgccacgtaggtgccacgtggaacgaagactcggtcaatattgccacgtaggcgccacgtaggtgccatgtggaacgaagactcggtcaatattgccagccttgctctggtgcccggcagcccggcccaacaatggaatccgaccgatgattctggtcgctcgctgcttcgcttgctcgcgggcctcgcggccacatccatcaaaccacgggaaagatccggccgcgcgctccttttctag

SEQ ID NO: 71528 - DNA, 469 bp, Oryza sativa
  Clone ID: PAT_MRT4530_71995C.1
aaggaaaaggggatttattgcgtcagcgggctagggtttggtggaccgggcgcacgggcggcggttcacgcgaacggacggccgagatctaaccgatccaagatggacggccgagatcgatcgggtccacagcggctcacggcggacgaccccgatgacgtcagcaatgacgtcaccgacagcggcggcggctccgcggagcggacggcgcacgctcgccggcgaacggcggcgcgagaacgcaaacggaaggcaccgggacgaagcgggcggcacggcgaactcaccgacgaccaaaacgacggcggagaagcaacggacggcgccggcgacgaggaggaaacggcggagttcttcggcttgacgacggcgatgatgctccggcggtctccgacgatggcgaagcggcggacgaggacggcgacgacttggcgaccacgatgacgtccttcccgagcgacggcgacgg

SEQ ID NO: 71529 - DNA, 204 bp, Oryza sativa
  Clone ID: PAT_MRT4530_71996C.1
atgggcttggctcatcttcttgctgttcgggagaaagagaggacctcggatctagaggatgaaaggcggaagcatgctggccgtcgaagctctggtgccccttgcaacaagcatcaggatgacgacgttgatcagggagccgcgagcaaggagaagggcggagctctggtgcctcttcagacgagtagcaggatggccggctag

SEQ ID NO: 71530 - DNA, 295 bp, Oryza sativa
  Clone ID: PAT_MRT4530_71997C.1
cgccaccgtcgcacccccatctctcattcactcacctacacgcctcatcacctcccaagaccaccaccgccttccccatggccgccgcaccgtctccgtccgcttcacccggccgcatccgtcgcgcgctgcggcggctgctcgcgccggagcaggcgcctgtccggggtcatcagggcgcagtcagcgccggcttctgcggcggcggcggcgctgacgcatgacgacctgaagaggctggcggcggtgcccgcggttgaacaagtggagagcgggatggtgcttgggctgggga

SEQ ID NO: 71531 - DNA, 632 bp, Oryza sativa
  Clone ID: PAT_MRT4530_71998C.1
agtattcagaatgtgagagttaagagagagtctgctgaaacagatgccgcagatcaggatggtaatagggtcgctgcagagaacaccaagggcacagaacctgcggctgatggagttggttcctcgaaacaaactgttcctaccgatgcaagtgcgatggccatagacgaaccaggctccctgaaagtcgagccagataactcaaacaaattgcaagatcaaccatcggtgcaccagaagtcataatagttctctctaccttaaaacttagtaactgatgccatctatcgtccattgattatattggagaaactccaactttgaagcagagagttcatgccataccaaaagttatataccaaatctcgaatggtatatacacctttcgaactggtggtgttttgtgcaatacatttatgccaggctgactattatgtggtatctattattagctttagtttaaccctgtctgctgtcgagcaatcggtatagtcgtgcaatatattctggatccatcaagcaatgtgagacagatgtcaaaccattggttgtgacttcagcaatgtatgtatatgtatgtatagggacaggcagcaggcgttgctttggtgggagctataagctttgtctct

SEQ ID NO: 71532 - DNA, 2126 bp, Oryza sativa
  Clone ID: PAT_MRT4530_71999C.1
gttggaaaagaaaaaaaaaagagataaaaaaaaaatctcctcctcctcgccgccgccgccgccgccgccatggacgcctccgccggaggcggggggaactcgctgccgacggcgggggccgacggggccaagcggcgggtgtgctacttctacgacgcggaggtggggaactactactacgggcaggggcacccgatgaagccgcaccgcatccggatgacccacgcgctgctcgcccactacggcctcctcgaccagatgcaggtgctcaagccccacccggcgcgcgaccgcgacctctgccgcttccacgccgacgactacgtcgccttcctccgctccgtcacgccggagacccagcaggaccagatccgggcgctcaagcgcttcaacgtcggcgaggactgccccgtcttcgacggcctctacagcttctgccagacctacgccgggggatccgtcggcggcgccgtcaagctcaaccacggccacgacatcgccatcaactgggccggcggcctccaccacgccaagaagtgcgaggcctcgggattctgctacgtcaacgacatcgtcctcgccatcctcgagctcctcaaataccaccagcgtgttctctatgtggatatcgatatccaccatggggatggtgtggaggaggcgttctacacgacggacagggtgatgacggtctcgttccacaagtttggggattatttcccggggaccggggacattcgcgatattgggcactcaaaggggaagtattactctctgaatgtcccgttggacgacggtatcgacgacgagagctaccagtcgttgttcaagccgatcatggggaaggtgatggaggtttttcgccctggcgcggtggtgctccagtgcggtgcggactctctgtcgggtgataggttgggttgcttcaacctgtcaatcaggggccacgcggaatgcgtgagattcatgaggtccttcaatgtcccgctgttgctgcttggtggtggtgggtataccataagaaatgttgcgcggtgttggtgctatgagacaggagttgcacttggtcatgagctcactgacaagatgcctccaaatgagtattttgagtactttggtccagattatacacttcatgttgcaccaagtaacatggagaacaaaaacacacgccagcagttggatgatataagatcaagacttcttgataatctttcaaaacttcgacatgctcctagcgtccaatttcaagagcgaccccctgaggctgagctacctgagcaagatgaagaccaagaggatcctgatgaaaggcaccatgctgattctgatgtggaaatggatgatgtcaaacctttggatgactcaggaaggaggagcagtattcagaatgtgagagttaagagagagtctgctgaaacagatgccgcagatcagttgttatggtcaacgtgtgctgcaaggtgggatggtaatagggtcgctgcagagaacaccaagggcacagaacctgcggctgatggagttggttcctcgaaacaaactgttcctaccgatgcaagtgcgatggccatagacgaaccaggctccctgaaagtcgagccagataactcaaacaaattgcaagatcaaccatcggtgcaccagaagacataatagttctctctaccttaaaacttagtaactgatgccatctatcatccattgattatattggagaaactcccaactttgaagcagagagttcatgccataccaaaagttatataccaaatttcgaatggtatgtacacctttcgaactggtggtgttttgtgcaatacatttatgccaggctgactattatgtggtatctattattagctttagtttaaccctgtctgctgtcgagcaatcggtatagtcgtgcaatatattctggatctatcaagcaatgtgagacggatgtcaaaccattggttgtgacttcagcaatgtatgtatatgtaagtatagggacaggcagcaggcgttactttggtggaagctacaagctttgtctctcttctcatccctaatacctacgtggggtgcgtctcgttgttgtttaggtattactgcattcttaaaagtgctcatttagggtg

SEQ ID NO: 71533 - DNA, 507 bp, Oryza sativa
  Clone ID: PAT_MRT4530_7199C.1
atgtctcgccgccgtctgcagctgctgcttctcgccgccgtcgtgctcgtccacgccgccgccgacggttgccgagtgttccagatcgaggaggccaccgtcgacgacatccagctcggcttcaacaacggcagcctcacctccaggcagctcgtgttcttctacctcgaccgcatcgcccgcctcaacccgctcctccacgccgtcatcgaggacagcatcgcgacgcgcgaccggctcaacacgacggccgggtcgctggcgctgctgggctccgtcgtcaggcgggacgccggcgtggtgcggcggctccggcgagccggcgcggtggtgctcggcaaggccaacctcgacgagtgggccaacttccgcaccatccaaggcaccggtggctggagcgctcgcggtggccaaagccgggtaaggctaagctacctcctctcactcgctaacttcgccattggtttctccatcacaaaagtcaatgctgaatatcgatctctttag

SEQ ID NO: 71534 - DNA, 690 bp, Oryza sativa
  Clone ID: PAT_MRT4530_719C.1
ctaccaagagaccaggaacaccagggagtcgaagccagctcggagatgctcaggtaagcaggccctggaggaagaccaccagtcctggaaccagctgccacggggggagagagggcagcccagccaggaggcgacagcacatggagccagactatcgatgccacgcttctggaggagatcagccatctcgcagcgctgctggaatgcaaaccaaaggaagaacctgcatttagcaggaccttttgcgtgccagagaagatcaccacaggcaaaggaatgctggccatggaagaaagccgggacagtgagggcaccacagatgtcagagacccaggagttgttcgtcagaccagaagcaactgtgcgcgaacctcggagatgctgggaaacaacgaagaggagatctggagccaaggacgccaccgagcagctgtcgatccattggtcagaccagaagagcatagactcaccattttcccgcacgaagaaagtggatgccgcgaacatgtcagagacggtctgctcgacttgagcttcaggccatcccagtaggggtgccctgagcgctgaagccagagccagcgaacacgcaggaccaatccggcggaatcggcggcggagggaggaggaggagcggcggcgggtggaggcggccgtggaggagatggaggggtgggagttcgaggccat

SEQ ID NO: 71535 - DNA, 2064 bp, Oryza sativa
  Clone ID: PAT_MRT4530_71C.1
atggcccgtttggggagcgttgcggttgccgactctgcgaaaaccgaccaaaccaccaccgccaccgccaccgccaccgcccctacacctgcgtctgagtttccccgtcccaccacctccaacaacaacggccttgattgcaccggcaacttcgccgtctctggcctccctttgcctctcaccaaccggctggtgctcgcctatgcggtgtttggggacacggaggcagcgtgccaggtgttcaacgaaatgtcagacaagagcggaatcacctgggcgatcatggtctcggcctactccgatggcacaatgcgccgccaccgtccctacctcgacggcgtcgccgccgccgccgcaaccttcctcctcgccgtcctcctccacgcgccgctcgccgccggagaggacgagcctccgccatgggtcctgtgcgggccgtaccctcccagcggcaactactcgaagaacggcacgtaccaggtcaacctcgacctcctctccaccaccctccccaagaacacctcctcgtctccggccatgtacgccacgggcaccgtcggcgacgtccccgacaaggtgtacggcctcgcgctgtgccgcggcgacgccaacgcctccgcctgcgagcgctgcgtcgcggccgccctccgcgacgcgccgcggaggtgcccgctcgtcaaggacgtgctcgtcttctacgacctctgccagctccgctactccaaccgcgacttcttcctcgacgatgactacttcgtcaccacctacaccctccagcgctcccgccgcgtgggcgccgcggcggcggcagcgttcgacgcggccgtcgcagtgctcgtcaacgccaccgcggactacgcggcggcggactcgtcgaggcggtacggcacgggggaggaggagggcgtcgacggcgacagcgaccgccccaagatctacgcgctggcgcagtgcacgccggacaagacgcccgaagtctgccggacctgcctctcgacggtgatcgggcaactgcccaaagaattcagcgggaggacgggagggggcatgttcggggtgtggtgcaacttccggtacgaggtgttccctttcttctccggccgcccgctgctgcagcttccggcgttcgtggagacgccgccgccgccgccttcgccatcggcgaccagtggagacgatattcagagcattgattcgcttatacttgatctaccaacaatacgagttgctacagatgattttgctgatactaaaatgatcggccaaggaggatttggtatggtttacaagggagtcctacctgatggccaagaaatagccgtgaagaggctttgccagagttccagacaaggaataggagagctgaaaagtgagctgattttggttgctaagctttaccacaagaatctagtaaggcttattggtgtttgcttggagcagcaagagaaaatacttgtctatgaatatatgccaaatggaagccttgatatcgttcttttcgataccgacaagaacagggagctagattgggggaaaagattcaagattataaatgggattgctcgaggcttgcaataccttcatgaagattctcaattgaagatagtgcaccgggacctcaaagcaagcaacatcctattggactttgattacagccctaagatttctgattttggcttagcaaagatatttggaggggatcaatcagaagatgtcactaatcgaatcgccggaacatatggatacatggcaccagaatacgctatgcgtggtaattattcaatcaaatcggacgtgttcagcttcggcgttttggtattagagattatcaccggaagaagaaacactggctcatatgatagtgggcaagatgttgatctcttaaacctagtgtgggagcactggacaaggggaaacgttgtagagctgattgatccatccatgggcgaccatcctccaatcgagcagatgttgaagtgcatccacatcgggttgttgccggcgttctgcatccaggaggtatgcgagcacggtccatgcggtggaaggaggagacaggagtaa

SEQ ID NO: 71536 - DNA, 1637 bp, Oryza sativa
  Clone ID: PAT_MRT4530_72000C.1
cccacgcgtccggttgggctgtttcaatctctcagggaaaggtcatgctgaatgtgttaagttcatgaggtctttcaatgttccgttgcttcttcttggtggtggtggatataccataagaaatgttgcacgctgctggtgttacgagacaggagttgcacttggtgaagagctacaggagaagttgccttacaatgagtattatgaatattttggtccagaatacagtctttacgttgcagcaagtaacatggagaacagaaatacaaacaagccccacccggcgcgcgaccgcgacctctgccgcttccacgccgacgactacgtcgccttcctccgctccgtcacgccggagacccagcaggaccagatccgggcgctcaagcgcttcaacgtcggcgaggactgccccgtcttcgacggcctctacagcttctgccagacctacgccgggggatccgtcggcggcgccgtcaagctcaaccacggccatgacatcgccatcaactgggccggcggcctccaccacgccaagaagtgcgaggcctccggcttctgctacgtcaacgacatcgtcctcgccatcctcgagctcctcaaataccaccagcgtgttctctatgtggatatcgatatccaccatggggatggtgtggaggaggcgttctacacgacggacagggtgatgacggtctcgttccacaagtttggggattattttccggggaccggggacattcgcgatattgggcactcaaaggggaagtattactctctgaatgtcccgctggatgatgggattgatgatgacagctaccagtccatcttcaagccgatcatcagcaaagtcatggagatgtatcgtcctggtgcagtcgtgcttcagtgcggcgctgattcgttgtccggcgataggttgggctgtttcaatctctcagggaaaggtcatgcagaatgtgtaaagttcatgaggtctttcaatgttccgttgcttcttcttggtggtggtggatatgccataagaaatgttgcacgctgttggtgctatgagacaggagttgcacttggtcatgagctcaccgacaagatgcctccaaatgagtattttgagtattttggtccagaatacagtcttttcgttgcagcaagtaacatggagaacagaaataccaacaagcaattggaggaaataaaatgcaacattctggacaatctttcaaaacttcaacatgctcctagtgtccaatttgaagagcgaattcctgaaacaaagttacctgagccagatgaagatcaagaggatccagatgaaaggcacgaccctgactctgatatggtattggatgatcacaaacctatgggacactcagcaagaagccttattcgcaacatcgaagttaagagagaaatcactgaatcagaggccaaagatcagcatggtaagagattgacaactgaacataaaggaccagaaccgatggcagacgatcctggttcctccaagcaagctcctgtaagtcgtcgtcttctctatccatctgcaaatccatagcaaaagctctgcattgcccaatgcctatatggatatcgaattatagaacaccatggttaatctgctctaaaaaaaaaaaaaaaaa

SEQ ID NO: 71537 - DNA, 345 bp, Oryza sativa
  Clone ID: PAT_MRT4530_72001C.1
aaaaaaaatacatttttgttaaaaataacacaggaaaaaaaaaaacaaaagacgtttcaggaaaattatattcttccaactctgcgcgcattggtctatccacgcacaaccaaccaaaaaaaaaagatactgtaataagcgaagatttaaacaagttcatgtcccgtgtgttttgaaaggcgattacccaccattatcctggccgcttgctccggccctagaattatagaacataaaaaaggcggatacaacttttggtaaaaatgaagataataagaacttgcgcaaaaagagttgaaaacctaaacctgggaaaaaatgttatccgctggcaaatttaagaaa

SEQ ID NO: 71538 - DNA, 448 bp, Oryza sativa
  Clone ID: PAT_MRT4530_72002C.1
ctctctcgtgctctcgtgcatacagttgatatagatacttatacagagagagagatagagagtgcgagagccacagatattggcggtgcttctgccgcctctgtcggtttccattctgcgtgctcatccggtttttgtgctttgtgctcatcttgttctttatgatgagcatcctcttcttctctatgaggcgcagacttttcgctacacccagcccgtcatcgctgacgatgcctatcactttctctctgtggttttgtcgctctcgccgtctttgctgttgccactttcgccgtcatacgatgttaacagcgtggttgtgaattgcctgtatcccatgggtgtgaatattgtgatccatgctcatcgcctgattgagctccttcctactcagccagagtctcttcctctggctgaaacactgtactgcacctttgataatacccta

SEQ ID NO: 71539 - DNA, 685 bp, Oryza sativa
  Clone ID: PAT_MRT4530_72003C.1
ctaatgacaagctagccatggcggcgacggcagatccgcgaagccgcctgccacgacgtcgacgcaccacctcgagctgtgggagcagctgccgccgccgctgctgccaactcccttaaacggtgggatcgaggagctccgcgtgccccagcctagcccctcacccataccgccgccgccgctgacaacgaagcctgagagcctacctgcggagatggacttcgagcccgagctcaaggcgctgcctccgcctccacttctcgccctgtcacagccgcaagtggatggtgcagtgaggccgtggaacctgcgacagctgacgtggcggcgcccagccatctccttgtcgtgggcggcggcggtgcccatgccgtcctcattccgacgccggaagcatgcgccatttttggtggcactcaccgcggaggagatcgaggaggacatctatgcgccactgcccccctccctcctgtcagcgccgctgtcctccctcccatcgcgcgcttgcctccggcatggcagctcagtggctcggcgagtggaccagaggctgatggagaaggagatggaggcgcggctgtggagctcgcggtgcagcggctgccggagagaaaaaaaaggaagaagggagaaaaaaaaaggagaagaagggagagaaaaagaaggaagaagggagaaaaaataa

SEQ ID NO: 71540 - DNA, 408 bp, Oryza sativa
  Clone ID: PAT_MRT4530_72004C.1
tttttgttttttttttttttttttttttagggatatatagacaggcgaacatgaagcgggtttttagtaccagctacgccattgtagggaccatatgaagccgggaaaatccagctgaaggtaaacgaccgacaacatgtttaacaaacaacaaatggagtcagcttttatcgcttggtggggaggaattaccgttcatattggcatgttgaaatttcacgacagtgcatgggatattggcaccactcccttgggaaaatgcaggagatgtcagctttcgagctggtgccttagggtcctccccaaattttacgaggggaaccggattcttaattgggaacaacatgccaaaggccattactagctaaaatcagaaactccaattcatcatctatttcttggtcctga

SEQ ID NO: 71541 - DNA, 540 bp, Oryza sativa
  Clone ID: PAT_MRT4530_72005C.1
gcacgaggcctttccccactccccccccccctcgcgagtctcgacgaagcgaggaagggatagaatccccccaaatcccccaacgcgagctccaaaccctagcgccgcaaaggcgggcgacggtttccctctcctcgatccgccgcgcggggctccggtgttgaagcccgcaccctccccgcggcggcggttgcggcgcgggcgagagggagggggagagaggggcgcctctcctctctcggcgggagggtttctcgatctggaaggctcacacctggcggctcctcggtgccccgcgcccggatctgcagcgatctgggagggggcggctccggcgatggcgatcctggcggggtgcgcccgcccccacaattcggaggacttcccccggttggtgtggtggagggagggagaggcgggtttctcttcgtgcgggctctttacctccggtggtggcttctttggcgctgcgttttaggagagcgccgctctagagatccaagctacgacgcgtgcatgcgacgtcatagctcttctata

SEQ ID NO: 71542 - DNA, 466 bp, Oryza sativa
  unsure (1)..(466): unsure at all n locations
  Clone ID: PAT_MRT4530_72006C.1
tcgtgttctagatttggttaccttgcgtccttgccttttattcatcagtgcaattagggccaagcttttgcgtggccttgtcagagagatgaaaaagtacatatgcagtgcatcacttataattggttgtgcaacctcctcatccgcatgctaagtacaatgagttgaagatgatgtgctgcaagattgacatattgttttccaaaggaacataatagatcgggcagtttctgtgagctggatcagtacgggcatatgtgctaactgcctcctatgcagttgtgctttgcacaacgaagtgagtgtggttcatctttagagccatgttcaaagagagtntgggtgttgatcaattgtgagaaaatcatgtgtagaaatgccttgggatggtgtctaaatagggcaattgattcatctccgtgaatgctgcacaaatattttttgttgactttatggtgaacatgca

SEQ ID NO: 71543 - DNA, 586 bp, Oryza sativa
  unsure (1)..(586): unsure at all n locations
  Clone ID: PAT_MRT4530_72007C.1
gttgaattgggaattttggagaaaaatgattcttnggtgcccacagatgggggaatccctacataatatgccagtgccagcccaccccatagcaccanatggtgccacgcggtgcacatgggccccttggtttgtttatttgggactggtttggttatcttgggacatggactgcacagatgacttgacaatgaccagactggtgacctgagtgctggtattggtgctggaacctgtaggagacttgatgctgtagatctgtggtgtgctgatgctgtgagaccttggtgtggtgctgactgatgtgaccacccccaaatggatgaccatggtgatgtgtgtgcgtgcctgtgcnngatgaggatgtgtggtgctgtgtgtgaaatntgatgttnatgcccgggttttaatgaatgccgattgaccacctgattggtggttttggttggcaatgtgaaatgctgtgtgatgaatgaagatgctgtaaccatggaatgttgtaaattacttttattatatatgtaagttatttttattatatannatacaatactttttatttgattaaaaaaaaaaaaaaaaaaaa

SEQ ID NO: 71544 - DNA, 345 bp, Oryza sativa
  Clone ID: PAT_MRT4530_72008C.1
gatggcaaagtcggcaccgacctggtactactggggagtgatatgaaactgtgcatatcggattccgggcaaagaaggattaagaaagtgattatgatgtggatgatgatgacgactcttgtctttggacaaggtggagagcgtgagatggcgtcggagagggtgaaagggatggtgatgtggttcgacgtcatcggcggattccgtcccagcaacggcggggaccacagctacggttggggtgactgcggctatggaggcggaggctggtacgacggcaaggaggctgctgtgcgtgctacaagtgtggcgaggaggaccacatggccaaggactcctccctag

SEQ ID NO: 71545 - DNA, 1152 bp, Oryza sativa
  Clone ID: PAT_MRT4530_72009C.1
atgggtcttgtcacggcctctttccggtgtgctggtgcaattagcttatatgagtgggttgtgatgactttcggcttgaatagtgctagggctacattttggagggccatgaattatatattccatgatccgatcggcttgttggttggggtttacattgatgatgtggttgttaaatcaaaggaggtagaggaccacatagccgatttgaggaaggtttttgagagaacaagaaaatatggcttgaagatgaatcccacgaagtgtgcttttggtgtatcagctgggcagttcttgggatttcttgttcatgagaggggaattgaggtgaatcagaggagcattaatgtaatcaagaaaattcaacccctggaagataagaagcagctgcagaagttgatcggcgagtggaggcattatttgttatccaatgaatgcactttggtatgcaaagctgatgtggtcaagtatatgctgtcggctccagttttaaaagggagaatcggaaagtggatatatgccttaacagagtttgatcttcagtacgagtcacctctccaccgagtatatgctatagccgatttcattgtggagcatcgtgatgattcaattggctcggtcgatattgtgccttggactttattttttgacggatcgaggatggggtatagatataatcggtcaaatcaatccaccttcatattggtggcaaccgattatttcaccaagtgggtagaagcgattcctttgaagaaggttgattcaggggatgctatacagtttgtcaaggaacatatcatctaccgatttggtatccctcaaacgataacaatagatcaaggatcaatctttgtgtccgatgaatttgttcagtttgccgatagcatgggtatccaattgctgaatttttcaccgtattgtgcgcaagctaatgggcaagctaaggcatctaataagagtttgatcaagttgattaagagaaagatttttgattttcctcggcaatggcatacaagattagctgaagcattgtggtcttatcagatggcctgtcatggatcgattctagttcctccttataagcttgtttatggacatgaagcagttctaccatgggaaattaaaatcagctcaagaaggatagatttgtag

SEQ ID NO: 71546 - DNA, 3072 bp, Oryza sativa
  Clone ID: PAT_MRT4530_7200C.1
atggctggtacagacatggaggcactattggagttcggcagaggcatccggcaagactcatccggtcatcgggccactccttggaaccccactagcgcgttggattctgatggctgccctctcgattggcatggcgtgcagtgcagcaatggccaaattctgtcaattgcatttgatggagctgggcttgtgggtaatgttagcctgtcggctcttgcgagtatgccgatgcttcagaacttgtccctgtcgaataacaaactggtaggcgtcttgccccgtgatctcgggtctatgacttctttgcagctattggatctttcgaataacatgttctcaggtcaaattccggctgaattgactaaattggctaatttgggacatctcaatctctcttccaatggttttggtggtgcattgcctttgggtctccggaacttaaggaaactgaaatatctggaccttcgtggcaatggctttactggcaaattggatgacatatttgcagaattacagagcccggttcatgttgatttgagctgcaaccggttctcgggttcattgatatcaatatctgacaactcatctgtggttagcacacttcagtacttgaatgttagccacaatatgctgtcaggagcattatttgagagtgatccaatgcctctgtttgatagcctggaggtgtttgatgcaagttacaatatgcttgagggcaatattccaccatttaattttgtgatttccctcaaggtgttgcgcttgcagaacaataatttttctgggtccattccagaggcgctctttcgacagacctccatggtgttgactgaacttgacctcagctgcaatcaacttacaggtccaattagacgtgtaacatcaatgaacttaaagtacctgaatctgtcatccaacagccttcagggaactttgcccatcacatttgggagctgttcagttgttgatctgagtagaaacatgctttcagggaacctatcagttatccgaacttggggaaattatattgagacggtcgatttgacctcaaatcggttaacaggaacatggccaaatgagacaacccagtttttgaggttgacttcgttgaggatttccgacaacttgcttgcaggagaactaccaactgttattggaacttatcctgagctgatttccatcgacttgagtctcaatcagcttcatggaccattgcctggaaatctgtttacagcagtcaaactgacctatctaaatctgtcaggaaacagctttgcagggactcttcctcttcctaattctgaagcaaagagctcaacttttatagacttgttagttctccctgtacaaacttcaaacctctcatttgttgatctttcaaacaattctttgaatggctcactgccttcgggcattggtgctttgagtggattggcattactgaacctttgccaaaacaacttttcggggcaaattccgagagaaatcaccaagctaaagcatttgatatacattgacttatcaaaaaacaatttcaatggtaccatacccgaggacctccctgatgatcttgttgagttcaatgtctcctacaacaatctatctggctcagttccaagcaacttgttgaaatttcctgattcatctttccatccaggaaatgagctgcttgttcttcctcattctgcatcacaaaatggccctgacagttctggaggggggagacgcggtatgaaacgtggaattctgtatgcattgattgtatgtgttgtagtctttgttactgggattattgtgcttttgcttgttcattggaagatctctagctggaagagtagtgaaaaaggaactagccaaagcaaacaacccgcaactgtaggagaatgttcacagagacaaggagaagctccaacaccagaaatgcaagaagtatcactagaatcatcatcatctacagagtatgtaggtaatcctttacctggtaaggaaagacagcatgaagcacaagatgtgtcagttcatgctgatcaaataggcagtagctccacccttaaagacaatatggcatctttgatgcctccattgacatcgtcacctcctgatgtgcgcgcgcagcatcagcactctgtcctgagagtccactctcctgataaaatggttggggatttacatctttttgacaatcttgtagtgttcacggccgaagagctctcccgtgctcctgcagagatcattggtaggagttgccatgggacatcctacaaggctacacttgacaatggatatgcactgacagtaaagtggctgaaggagggatttgctaagagcaagaaggaattttctcgtgaaataaagaagcttggaactgttaaacatcccaatttagtgtccatgcgaggctactactggggtcctaaagagcatgaaaggatcattatatcagactatgtagattctacttctctttcttctttcttgtctgagtttgaagaacggaatattccgcctctatcagtggaccagcgtctgaacattgcaattgacattgcgcactgtctagattacctacataacgagcgagtgatcccacacggcaacctgaagtcatccaatgtcctgatccagaacgcaagtccatctgctttggttaccgactacagccttcacaggctcatgactccaatcggcatggccgaacaggtcctcaatgcaggggccctcggatactctccacctgagtttgctagctccagtaagccgtgcccttccctgaagagtgatgtgtatgccttcggtgtcattctactcgagctgctgacagggaagattgccggggaaatcgtttgcgtgaacgatggtgtggtcgacttgacggactgggtaaggatgctagcaagggaggagcgcgtttcggagtgctacgacaggcggatcgtggaagctcatggctcaggtggcgccccaaaggcgctggaggacatgctgcgcatcgccatccggtgcatccggtctgcatccgaaaggccggagattcggacagtgtttgaggacctttcatccctgtcatcttga

SEQ ID NO: 71547 - DNA, 280 bp, Oryza sativa
  Clone ID: PAT_MRT4530_72010C.1
tcgtttagatagcgagcggctactgccgggggaggagatggccaagatctaccgggtgaagctctgggtcacctatgaggtccgcgcctagagcaaggtctggtactccctgtggaagctgatgaaggaggagaagagcaacgtgcaggtgctggccatctacgagatgttggagcgcaacgagagcacgatcatgaactatggcatgtggctgtgttaccagagcagacccggttaccacaacatgttcaaggtgtgccgcgacactacattgaatggt

SEQ ID NO: 71548 - DNA, 269 bp, Oryza sativa
  Clone ID: PAT_MRT4530_72011C.1
atggcctcgccgccattgccgtccgctcccggaggccgccgctcgtcgccggctctcctcggcggtgacctccgtcgcgattcgtcgtcgtcggcccttccccttctaatccgtcccgtaggctcactcctcctcgatccgcttgtcgctccggtggtattccctcctcccgccgtgcctcgcgccgccccgccgacgcgcgccgctgtccgccgtccatctcggccagccttcgtcttcctcctctcgccatccgacgcggccgccac

SEQ ID NO: 71549 - DNA, 246 bp, Oryza sativa
  Clone ID: PAT_MRT4530_72012C.1
tcagttcaattgtatacacatcgaggtagatcatacatccatgtctggtatcattcctttttctatcagaaagcaagcaacccaaagaaggtttgtccggtgtacgtcagcctcactatagtatccataaaacccatacatggttgggttatcagcttgcatgcaaatatacaggctaatcctccggtgatcgtggaagaggtggatctacacatcaccacgtcgttccagtgccagcatttctca

SEQ ID NO: 71550 - DNA, 1014 bp, Oryza sativa
  Clone ID: PAT_MRT4530_72013C.1
ccggccgggagccttctcccctctccgccctccttccgccgcaagccacacgaatcaaggctaatctctgctcgaagcatgtcaaacgatcagcatcggtcatgccgttgcgtcaagtcgaactgtgtcaagctctattgcccgtgtttcagcgcgtacggctattgttcacagaactgccgttgcactaactgtaagaacagagagtactatgaggactttgtggaggagcgtgtggacatgatcaagatgaaaaatccgagagcatttgatcccaagattgttagggttcaagatgcaagtgagattgaaccccagagctctaatgcagtgccggaaaatgagcatggatgtatgctaatgggtgcagatgccagaagtccaagtgcctcgtacattcgtgtgaatgcctcaagcacgaggtgaggtgcacttcaaaatgccagtgtatagattgcggtaacggccccagaacaaagtatgattcaaacatcggaaaagatcagagtgatgttagtggcctaacctatgaagagcccacgatggacaccatgcaatctgagcacactctgaatccaaacaaacgcccaaaatattattgatatctctcgcagatcgtgatgctttaccatcctcaagacaatagccactttcttccaaaaatgcaactgtaaatacaaacaggtttgagtatcccttgtaacgaaatcttaaagcacggtgatcggtgaggccttgaactccatgatacttcaaatcttgtcgtccatttggtagtctcagtgggttcagttgaccttgcgcttgatcaagaactacgaagacagttcccacctcttccatgacattgtaagatatgcagggaggcagctcttcttgcagccaatgtgtgagctctccatcttgctcctcaggatcctttcctctcaaacaataacaagataatccttctgtgccttccaagcgggccgggccgggtaaaaagattatttgggccgcagcccactctgccat

SEQ ID NO: 71551 - DNA, 577 bp, Oryza sativa
  unsure (1)..(577): unsure at all n locations
  Clone ID: PAT_MRT4530_72014C.1
cccagcagaaattcaaggcgaaggcttccgggaaggctcncacgttggccggatcttggccggcggggaaggtaccggaaggccttggangctcgcccccggccgggccgaaaactgggggccggggaaggcttccgcggcagcaggccgaaggctttgggccgggcctatggaagctcacgtccaacccgctttaccgtcagcggcagcgcaggggagggggctccggcagcggcaaggggatcgacggtgacagagcttggcggtggtggatggcacgtggcggggctcagtgatgacggtgcgtggtggcagcaaggggctcggtagcgatggcgcgcggctctctcctctctgccctccggcctcccacctccctccgcctctcttcggctcgacggcgactgcaccggcaggatgactttgtgtccgccagatctagtgctggtgcccctcgacggtggatggcgacgagatgcatgctgtgaaaatcgatttgcttcactgtaatggatttgttgatgttaatttgttgatgtgaatctgttgatttgttgaaaaaaaaaaaaaaaaaaaa

SEQ ID NO: 71552 - DNA, 423 bp, Oryza sativa
  Clone ID: PAT_MRT4530_72015C.1
ggatgggctgtgaactgcgatgatggacctcaaaattgcggggtatgttaatggggaaaggatgacaagagtgtgtgtgggtgggtgtgccatgatggtggtgatgaccttgcaaggccatgcaaatgtgtgtgatgctggaaatgtggtgcaggcactgtgtgaggaaccatggaaacagaactggaaaatggccctgtgctgactggagtgtttgtgctgagtgttgatgccagtggcctgctgatgtgttgaaaaaggctgtgcctggagtggtggccttgtgcaagctgattgagtgacttgaatttgattgggtgcagaaattgggaatgatgatgtgtgtgttgttgaacgcttgagtgatgtgaaactgacctgttgcagaatggtgcaagtttgctgaaaaaaaaaaaaaaaaaa

SEQ ID NO: 71553 - DNA, 592 bp, Oryza sativa
  Clone ID: PAT_MRT4530_72016C.1
tagtggatccccgggccggcgcagcggcgcgagggagagagagagagagaaggccaatcttactaccccaattccatccccctttgcatatcctcactcactctcaagtctcaactcaactcatcaagatattatcatcatcagagaggtagtagaagctacctagctagctagctagccaaaagagatatctttcagaagaaaggaaggaagaagaagaagaagcaatgagcagtggtggtggctcctctccaacatcatccccttctgtctgctccagatcatggtctataagtgaggattcgttgaagaggtacgtgagctacgcgagcgagagctgcatccaggagctcctcgccgcgtcggactccggcggcggcggcggcggcggcgacgatgggtggaaggtgctcgcgtactgcaacggcgtggagatatcgaagcggcgggccggggcggcgcacgtcttccggagccggtggctgctgcacgccgtctcgccggggaagttcatggccgtcgccaacgccgtcgacgccgccaagattccgccagggaactgctaggacgcccggtacatcagggagctggg

SEQ ID NO: 71554 - DNA, 197 bp, Oryza sativa
  Clone ID: PAT_MRT4530_72017C.1
cccctgtacctgcttcggcggctgacctcgtcgagtgcttgccgggcctgggcgtcgccgatatccggtcggacgacaggcgcgtcacgaaccttcaatggtgtcgtgtgccgggctgcggctgcgactgcgtgggcctcgcccgcgactggagcaccagagccccatcagcatggaaaacgaggcgcgtggggtga

SEQ ID NO: 71555 - DNA, 473 bp, Oryza sativa
  unsure (1)..(473): unsure at all n locations
  Clone ID: PAT_MRT4530_72018C.1
ttgctcgtcgtgttccttgaaaagagcaaatccatgcgaatcagaaagtatgatctcattagttcaacagagcacancaaggaaaagaaacagaaactactccaggagccccaatttgctatggttttatcggaaagggtaatggagcacagacaggttgccaaattaccctgtgccctgcgagctgattccccaattccgccaggttctcttgttttctttttctctctggttttattcatcctacatggacaacatggtttgaagaggtgccacagccctagttgncncgctgcatgatttccactgaacttaagtaggatggatatgtcattttctgacttttgtaatcaaactggcagagaactgtacacacgtgcattgcatgacttccatcaaccttggtcatagaattgttattgtatgtctcaactccccntgaagaatctccagaactcaaaaaaaaaaaaaaa

SEQ ID NO: 71556 - DNA, 432 bp, Oryza sativa
  Clone ID: PAT_MRT4530_72019C.1
atggcgagggagaggcgaggcgaggtgggtttcttggcttctcgttgcgcgcgcgcgttcgccgcgaggggatcgtcgccggtgggagttggaaggcgctgctgcgccacatacgcctactcccacgtcgcccctgccaacgccctcctccacagcgtcgtcggtcgcctgctctgcctccgcctcaacctcagccgcccgccgcccgggaagctccgcctccgccgcctgccgcggcactgcccgggaagctccgcctctgccgcccaccacccgttccgcctccacctcgcggcctcccactccgcctcagccgcccgccaaccgcccgctctgcctccgcctccgtcggccgcccgctccgcctcagccgcccggggagctccgcctccgctgtcggtcgcctgctgcctggccctagcacgtgcgtga

SEQ ID NO: 71557 - DNA, 2078 bp, Oryza sativa
  Clone ID: PAT_MRT4530_7201C.1
atcggaggctggtgtgagacgacatgggtttgggtggtgatggtggtggtggtgattcttgcggcggcgatggcggcggtggtggagggtgtggggtggccagagccggagctggaggcgttgcgcgacgagcggggcgggctggtggcgctgcgggacgcgctgcggtcggggagggacctgcactcgaactggacggggccgccgtgccacggcgggcggagccggtggtacggcgtggcgtgcgacggcgacgggcgggtggtcggcgtgcagctcgacggcgcgcagctcacgggcgcgctccccgcgggggcgctcgccggcgtggcgcggctggagacgctgtccctgcgcgacaacgccatccacggcgcgctcccgcggctcgacgcgctggcgcggctccgcgtcgtggacctgtcgagcaaccggttctcggggcccatcccgcgcgggtacgcggcggcgctgggtgagctcacgcggctcgagctccaggacaacctgatcaatggcacgctgccggcgttcgagcaggacgggctcgccgtgttcaacgtgtcgtacaacttcctccagggcgaggtgcccgacacccgcgcgctccgccggttccccgccaccgcgttcgcccacaacctcaggctctgcggcgaggttgtgaggacggagtgccgccgcgagggctcgccattcgacgccgcgccggccggcggcggcggcagcggcagcgatggtggtgatcgggtcttcggggcgcgcgacgccgccgcgccgccggcgcggtggcgcaagcccatccggttcaggatagcgaggtggagcgtcgtggtgatcgcgctcatcgccgcgctggtgccgttcgccgcggtgctcatcttcctccaccacagcaagaagagccgggtggttcgtctcggcggcggtcgcgccgccgccgccgccaccgcaggtgacatcaaggacaaggcggcggagcaagccggcaagaaggtgagcagtggcagcggcaacggaagccggagcacgacggagtccggcaagggagcggcggatcagctacagttcttccggccggagaaggcgaccttcagcctcgacgagctgttccgttcgacggcggagatgctcggcaagggccggctagggatcacctaccgcgtcgccctccacgccggcggcggcggcggcggcggcggcggcccggtcgtcgtcgtcgtgaagcggctgcgcaacatggggcacgtgccacgcaaggacttcgcccacaccatgcagctcctcggcaagctccgccatgagaacgtcgtcgaggtcgtcgcctgctacttctccaaggacgagaagctcgtcgtctacgaccacgtccccggccgcagcctcttccacctcctccacgagaacagaggagaggggaggacgccgctgccatggccggcgaggttggcgatagcgaagggcgtggcgcgggggctggcctacctgcaccagacgctgccgctcttccaccggccgccgcacggcgacctcaagtcgtcgaacgtgctcgtcgtcttcccggggcccggcggccgcggaggcggcggcggcgacgcggtgccggtggccaagctgactgaccacgggttccacccgctgctgccgcaccacgcgcaccgccttgcggcggccaagtgcccggagctcgcgcgcgggaggcggcggctctcctcccgcgccgacgtgttctgcctcggcctcgtgctgctcgaggtggtcaccgggaaggtccccgtcgacgaggacggcgacctggcggagtgggcgcggctggcgctgagccacgagtggtcgacggacatcctcgacgtggagatcgtcgccgaccggggccgccacggcgacatgctgaggctcaccgaggtcgccctgctctgcgccgccgtcgaccccgagcgccggcccaaggcgcacgacgtcgtcaggatgatcgacgacatcgccgccggctccgccgccgccgccggagacggggaggcgacggcggggcgagagctcgcgctgcggtgagctctgcacagaatttgccgggagaa

SEQ ID NO: 71558 - DNA, 765 bp, Oryza sativa
  Clone ID: PAT_MRT4530_72020C.1
atggcttctcgtgcatttgctgcagtgtttgcagcagtagcacttgtagtgtgttcttcagtcttgcctcgtgctctggcctctgacccgagccagctccaagatttctgcgttgctgacaaactcagtgctgtgttcgtgaatggtttcgtgtgcaagaacccaaagcaggtgacggcgaacgacttcttcctccctaaagccctcggcgttccaggcaacaccgtgaacgcacagggctccgcggtaacccctgtgacggtgaacgagctgccgggcctcaacacgctcggcatctcgttcgcccgcatcgactttgcccccaacgggcaaaacccgccgcacacccaccctcgtgccaccgagatcctcaccgtcctccagggcaccctcctcgtcggcttcgtcacatccaaccagccgggcggtggcaacttgcagttcaccaagctgctcggccccggagatgtcttcgtcttcccgcagggtctcatccacttccagctcaataatggcgccgtcccggccgtcgccatcgccgcgctcagcagccagaaccctggggtgatcaccattgctaatgccgtgtttggatccaccccgcccatcctcgacgacgtcctcgccaaggcgttcatgattgataaggatcaggtcgactggatccaggccaagttcgccgcgccaccggctgcctctggtggtggcggtggcttcattggcggcggcggtggtggcggcttccccggcggcggcgcgccatag

SEQ ID NO: 71559 - DNA, 1888 bp, Oryza sativa
  Clone ID: PAT_MRT4530_72021C.1
aaaacattggcttttgttctaccgatacttgagtcattagttaatgggacacacaaggcatccagaaggactgattatggcaggcctccaactgttttggttctgttgcctaccagagagctagccaagcaggtgcacacagactttgcattttatggtgcaacatttgggctatctgcatgctgcgtatatgggggttctgattatcgttctcaagaaatggcaatcagaaagggggttgacattgttgttggaactcctggtcgtgtgaaggactttgttgaaaagggaaccctcaattttaggtctttgaaattccgtgtccttgatgaggctgatgagatgcttaatatgggcttcgttgatgatgttgagcttattcttggcaaagttgaagatgttacaaaagtacagacacttctcttcagcgctactataccagagtgggtgaagaagctctccttgagatttctcaaatctggaaagaaaacggttgatcttgttggagatgagaaattgaaagctagtgcatctgttaggcatcttgctcttccttgtaaccgtgctgcaagggctcaagttattccagacatcatccgatgctatagccgtggaggccggaccattatctttaccgagacaaaagaatctgcatcagacctctctggtttgattgctggatcacgtgccttgcatggtgatgttgctcaagctcagcgtgaagttattcttgctgggttcaggagtggcaagtttttagttttggttgctacaaacgtggctgcacgagggctggacattaatgatgtgcagcttatcattcagtgtgaacctccacgtgatgttgaagcctacatacaccggtcaggtcggactgggagagcaggcaatactggtgttgctgtcatgctttttgaacccagatataagttcaatgtgaacagaatagaaagggagtctggggtcaaatttgaacatatctctgcaccacagccaactgatgtggcacaatctgctggtactgaagcagcagaagccatttccagtgtttcagacagtgtcattcctgtttttcgggagcaagctgagcaactattgaactcttccgggatgtctgcagttgatctactagccaaagcacttgcgaaggcagttggctacacggacataaagaagagatccttgctgtcttctatggacaaccacactacattacttcttcaaactggtcgatcggtgtatgcagcaggatttgttctttctactttgaaaaggtttatgccagaagagagacttgcagatgtaaagggtataaccatcactgctgatgggacaggtgctgtatttgatgttccttcagcagaggttgaagactatattcaaggtgcacagaacgctgccatggtgactgtcgaggaagtgaaacaattgccacccttgcaagagagggaacagtctggtggcagccgaggtggaggaaggtttggaaacaggagattttctggtggtggtggtggccggggtggaggcggcagagggttcggtggaggcagaggcaggggaggtggcggcggcaacaggtttaacaagaggtactagctgttgctggagcactctcatttttgacctataggttgagccaaggcacagggaatcgccaaaattttgactgcgccatgtatcggttttttgtttatttgttagtgtttgtgtgttcgagattatgatgatcaattttgccatcgcaatagtgtacaatattgatctgatacttgctacatagtaactgttaagaatgaagctatatacttgtttccccatcggctattaccgaagcttttgaatgaatgcaaaatatgtcgtctgtgaacaacaaaaaaaaaaaaaa

SEQ ID NO: 71560 - DNA, 327 bp, Oryza sativa
  Clone ID: PAT_MRT4530_72022C.1
ctagttctagagcatatgtcaaacatcgaactagtaagtaaacagaacgctgtattatacagcctgaactctagaaatgctgttctcaagtctatccagaatgtgataaatatagaagatatccaaaagttgatgaactacacatctgttgccaatgattaccaagcatagactaatgctgatttgtatatgcacatatctggtgcagatgcactgactgagttggaatgataatagtgctctgactcacatcttgttctagaattgttgccaaatattagcagtgctgactgatgtactttatcataagtatattcatcatctttt

SEQ ID NO: 71561 - DNA, 546 bp, Oryza sativa
  Clone ID: PAT_MRT4530_72023C.1
atggcgacggtgccggtggggctccacctctcctcctcctctgaccggcggcccaagtgggggactgcgcggagctcggcagggcggatctggtggtgcggccctcttcgccgagctgtcgctgttgtggtcctcggctacgcggaacggccaccgtcgccgccatcttccttctcctccctaggcctccgccagcacctcgtcgagctcgacagatccgaccttgggtttgccagatctggcgagcggcaccactttaggggcgacacacttgctcgggggctacagcctctcaatgcgccgctccacctgcgcgcctcgccccgcgcctacaagagctcggcggcgcgcgagtggagaaaggcgcagcgggatcttgggaggcgcgaacaggggacaacaggagctcggcagggcagatttggtggtgtggccctcttcgccgagctgctgctgtacgttgtggtcctcggctacgcgcaatggcgacaacaacgaggtttggtcatcatatccaccgccgccatcttcccttctcctccctag

SEQ ID NO: 71562 - DNA, 232 bp, Oryza sativa
  Clone ID: PAT_MRT4530_72024C.1
gctccgctccctccgatcgtggctcctcatcgcccctattaaacgagaaccagcccggcgtcccttctcggcttcctcctccacatccatccatccgcgcgcggtgcgtagtagcgagacacgacgaacgggggggacgggccacgcgactggctccgactgaagctgtaccgggtcgaccgctgtcgtggacccgtgaccgacggtgcgtggcggtgctggacggacggcc

SEQ ID NO: 71563 - DNA, 2415 bp, Oryza sativa
  Clone ID: PAT_MRT4530_72025C.1
gcacgagggccgcagctcccattttatcatgtcctataggttaaacctctatttctttggcaaatgatagcttcgagtatattatgagcagatggaatggctaacagaacagaactggctaccctcctgtgcattccactgttctctctcttgttacttgatgtggtggctggtaacttcacaggtcctcaccaaatccgccttagatgtggtggcaccagcactgccattgattctgatggtcgaacttgggaaggggatgctaactccaagttagcattggatggtttggcagccaacgcgtcatacctagaccccttgcttccctccccagtgccttacatgacggcacgcatattcagttccaatttcacatattggtttggtcttaaccctggtcgtgtgttccttcgcctctacttttatcctactgagtatgctgatcgtgctgctgcagatgccttgtttagtgtcactgctgggatccttgtccttctgaatgattttaatccttcccaggtagctcatgcgatgggtcgaacctatctcatccttgaatactcagtgaatgttccttcgggtgatctcgatgtcacattttccctgtctcctcaccacaccggttcttatgcgtttgtgaatggcattgaggttgtgtccactcctgatattttcacgaaacctgcgccaacatttttaaatgttggaatctcagatccattcccaatctctgttaatataggccttcagacgatgtatcgtcttaatgttgggggtgagacaatctccccaaaagatgattctgaattttgtcgcacatggggcaaggattccccttacatttctggagactcaggcctgaactttttcaaggatgacactgtaaccatcagttaccctcgtaccatgccaagttacatagccccagttggtctatatgagacagcaaggtccatggggctaaagggatatatcaacttgaggtacaatcttacatggattctaccgattgatgcaggattccactatcttttacggctccatttctgtgagatccagcacccaataaccaaggcgaaccagaggacgttctttgtatacatcaacaaccagacagcacagaagatggatgtcattgttttgagtggaggaattggtgtgccaatctacaccaactacatagttggcccaattggttatggtcagacagacctgagagttgcacttcaccctgatgttgaaaccaacccagaatttgttgatgcaattctgaatggtcttgaggtcttcaagctacaggatgtcaacaaaagtaaccttgctggaatgaaccctattccctggagccaccgtgatggggatcctcgtctggcaaccattggtggagctatttttgttttggtggtgctgttgattgccagtttgagcatgtatattatcaacatacgaaagaaaagagttgatcatggaaatacgaacaaagagttgttattagccaccttgctctcaaagaaatccaacctttgccaccaattcacgttcttgcaaatccaggaagctaccagtaactttgatgaagcctttctccttggcaaaggcgggtttgggaatgtatacaagggtgagttagatcatggaatgaaggtggcaatcaagcgtggagaccctctgtcccagcaggagcacttgtatggctcccaaaagccacctcttccatggaagcaacggcttgagatctgcatcggtgcagcgttggggctgcattacctacacactggtgcgaagcagaccatcatccaccgcgatgtgaagagtaccaacattctgttggatggcaaatgggtggcaaaggtttcagattttgggctgtccaaggttagcacagacaaggacaaaacctatgtgagcactgttgtgaaaggcagctttggatatcttgacccggagtactttcgaaggcagaaactcaccaagaaatcagatgtcttctcctttggggttcttttgttcgaggttctatgcgcacgtccggtaataaaccctgaacttccagaggagcaagtgagcttgcgtgactgggcactgtcttgccgtaagaaaggcatactcagtgagattattgacccccatctccaaggggaaatcaccccacagtgcttcaggaaattcacagagactgcagagcagtgtgttgctgattacagcatgaacaggccatccatgggtgatgtcctgtggaacctcgaggttgcactacagctgcaggagagtgcagaggaaaactgcgaagagacagcattgaacgtgttatcatcgcctttaacgaccaggttgcaaccatcatcccgctcaactatgagcatctctggacaaaaggctgtcttctcagagatgatgcatccagatggccgataa

SEQ ID NO: 71564 - DNA, 174 bp, Oryza sativa
  Clone ID: PAT_MRT4530_72026C.1
ggcaagcgaaggagtgccctttaaaaatcttgaaaggaattaagaggtatttaaccgacccggtcaaattatgcccccggaggccgaaattacatttataacacacacaaaaagggtagcaggtatacaaagaatttccctatggaaagggaggacaaaaaaaaatatctccac

SEQ ID NO: 71565 - DNA, 570 bp, Oryza sativa
  Clone ID: PAT_MRT4530_72027C.1
atgcagaagatgcgcaccgtcctcatcgagcacgcgctggccaacagcgaggcggagcgcaacgtcaacacctcagtgttcgccaaggtcgcaatgttcgaggagaagctccgcgcggcgctgcccagggaggtggaggctacccgtgcggccgtggagaacggcaccgccgcaaaggcgaacaggatcaccgagtgcaagtcgtactcgctctaccggttcgtctgcaaggagctcaggacagagtacttgaccgggaagaagatcgacgcggtcgcccggtcgcaatgttcgaggaggagctccgcgcggcgctgcccagggaagtggaggctaccccgtgcggccgtggagaacggcaccgccacaaaggcgaacaggatcaccgagtgcaggtcgtactcgctctaccggttcgtccgcaaggagctcgggatagagtacttgactggggagaagatcgacgcggtcacctggcgaggatgtgaacaaggtgttcgtcgccatgaaccaggatcgggtggaaggtcggagaagccagtcttcagtggtgcttccatgggacgatga

SEQ ID NO: 71566 - DNA, 219 bp, Oryza sativa
  Clone ID: PAT_MRT4530_72028C.1
ttttgcacacccttatgaaatttcactccgagaggcgccaggcataaagaccacgtccctggtaacttcattgggaccggtaattggaaactggatggagcactatagcagctactctacaacgtaggtggtgacgtgttggatgctattagagaagttgtagcatcatggcctgtgaacagtacaggactttttgcattgggtggcttgcgctttgct

SEQ ID NO: 71567 - DNA, 266 bp, Oryza sativa
  unsure (1)..(266): unsure at all n locations
  Clone ID: PAT_MRT4530_72029C.1
gcgccttctccggcgcgacggccatcannnnnnttccaggaaaaattaccagggttgcaggtcatagcattggctcacaaaatgcactgnnngcaatgtattccatgaacgttgacagacaggtggaagacatcttgtcgaaatctataagctcaagcaactcaagactagttctagatcgcgagcggcccgccttttttttcttncgtcaccgactttgggagtcgggatcctcttcctcgtcatcatcatcagcaccagcggag

SEQ ID NO: 71568 - DNA, 1872 bp, Oryza sativa
  Clone ID: PAT_MRT4530_7202C.1
ttgtcctgctgctgccgtattgttaaagacaggagtgcacgtttgaccggaaaaactatccagtttgaacgccatgggcacttggcccgcgcgtctgaattaaccaacgcaaaataaacacgagtctgctgagacactgctcactgcttactttactcatgtctcgccgccggctgcagctgctgcttcgtggctctcgccgccgtcgtgctccgccgccgccggctgccgagcgttcgagttccaggaggccaccgtcgacgccatccagctcggcttcaggaacggcagcctcacctccacgccgctcgtcctcttctacctcgaccgcatcgcgcgcctcaacccgctcctccacgccgtcatcgaggtcaaccccgaccgcgccggccacgagcgcgccaccgctccgctgcgggaccctccacggcttccacaacatcgcgacgcgcgaccggctcaacacgacggccgggtcgctggcgctgctgggctccgtcgccaggcgggacgccggcgtggtgcggcggctccggcgtgccggcgcggtggtgctcggcaaggccaacctcgacgagtgggccaacttccgcaccatccaaggcaccggcggctggagcgcgcgtggtggccagggccggaatccatatgttctatcagcggctcagtgcggttcaagcacaggatcagccattgcagctgcagccaacatggcggcagcaacacttgggactgagactgatggatccatactctgcccatcatcgttgaattcagtggttgggatcaaaccaaccgttggattgacaagccgggctggtgttgttcctatctcccctaggcaagacactatcgggccaatttgtcggacagtagcagatgcagtccaagtactagatgctattgtcagttatgacagccgtgatgcgaaagccacaagggcagcatccaagtatatcccacctggtggatatgtgcagtttttgaaacctgatggattaaaaggcaagagaataggcatcccaaatggatttttcaacttcccaagtgggacagtgcagcagattgtttaccagcaacttctcgacacagtgaggaaacaaggggcagttgtgattgagaacctggacatagcaaacctgactgttatacaagatgtccttaacaatgggcagcagattgtgttaccagcagagttcaagtcaagccttaacacttatctgtcagacttatcctactcccctgttcgttcacttgcggaaataattgctttcaacgatgcacatcctattgaggagagactaaaggattttgggcagctcatcttcctggtagctgagaacactactggcatcggcgcactcgagagagccataatccatcaactaaacaagctttcagctgacggactggagaagctaatgaaggatgagcagctggatgcaattatcacgcccaatgactcagtttccaccgttctcgccattggcggcatgccggcaatcaccgtaccagctggatacggtaagaggggagtgccatttggtacttgcttcggtggattgaagggctatgagccaaggctgattgaaatggcctatgcttatgagcaagctaccaaagttcgaatgatgcctggcttcaagatgtagtgtatataaaatttgtgttatataattcacggagctttttgatccttgcccaaataaattgatggaactaaatagccatctagttttgttgtccaattcagggatgccaaaatttggtagtccagaatattatatgttcaatgtattataataatttataattcaaaattaaatatcaaaaaaataggatatcctattttgaaaaaaaaaaaaaaaaaaa

SEQ ID NO: 71569 - DNA, 413 bp, Oryza sativa
  Clone ID: PAT_MRT4530_72030C.1
tgtcggtttatgagcaccaaccgcgggtaggggctccattagtgcgccggtagaaccttatagaagctgtcctgctcgtcccatggcagcgaccatcgtgtgcgtgaaggcgcgccagatcttggacagcaggggcaaccccaccgccgagggctatgtgggctgctcacatagaacctttgcaaggtctgcagtcaccagggaggcatcaactggtgtctatgaagccatggactagagggacgggggagctgaacacttgggacagggagtttgcaaggctactaacaatgcgaactcatctattgccccaaacttgactggcaaggaccctacttaacaggctgaacttgacatcttgatggatgagcaactcgacagtaccaaaaatgagcggaggagtgagcaagcag

SEQ ID NO: 71570 - DNA, 1158 bp, Oryza sativa
  Clone ID: PAT_MRT4530_72031C.1
tcgccgtgtcgcactgccgctacccgccccgaggcgttcgcggcgccgcccaccccatcgtccgcgcctccgcgtacggcctcgacgactcctacctctcccgctgcgaggacgagacgctaatcatctgccaggtcgagaccgccgctggcattgcggaggtcgacgccattgccgccgtcgacggcgtcgacgtcgtccagatgggaccgctcgacttgtcagccagcatggggtacctgtgggacccagggaacaggaaggtgcgagccaggctgagggaggccgagaagaaggtgttggatgccaggaagaagaatgtgacagcttcagatggcaatgtcgcatatctaggcggattcgccatgccgaacgacccggcagagcagctcaagctgaggggttaccacatggtgtctggtacagtagacatggtcatccacctggtgccgttttggagcaaataaatagattgataaaggaatggacagcatgggatattgcaagacgggcagcatttgcattatttggcatattttcagaaaaagaagagaatcctgagttcatacaaagtgttgatgagaaacttggtaaagatgcaaagattattgtggcatgttcgacaggaggaacattgaaaccaacacagaactttcctgatgggaagcaatcgaggtccctgatagcagcttacttgttggtcctgaatggttacaagaatgtgttccatctggatggaggactctacacatggttcaaggaaggcctaccggctgttgaaggagaagaataagcaattaggacatattacttgtaattagtgcatcagtattcatgaacatggaggtgtgatgagttgtaacgaggcatcttctcggataaatagtgcactagtttgatcctttcttcttcctttcccaaaaggatatgcctccttggacctcctgcctatatgaagatgtgttagatttctcatgacctgctgctgtcgacttgtcggtgtatgatacttgagcatgcccatttgacaaaatagataagtatgttagaacaagcatcaattctctcggctcttggacttggaatgcactatgaactttacaacatgatgttgtgatccagccaaaaaaaaaaaaaaaaggtcgaccgctactacag

SEQ ID NO: 71571 - DNA, 482 bp, Oryza sativa
  Clone ID: PAT_MRT4530_72032C.1
atgcgctctgctggacacaagatagcacccacaccacactgaccccccctctctctccggatcatggcctgctgctcgccgtgtcgacaccactccagctcagatctacataggcctctcgacgtcgtgatgtccgagcgacgccgatgcctgcaatcgacaactatgctgaagggcacagaaatacgactcatgctgaccgggtatcagtatacggagcacttgatgcacgccgtgaggcatggatcttctccaccgctgtgaaggatagtcacagcgagtggtttcccagcaggagcaatggctgatggagttggaaggcatgatggctcactgcaactgagacaccagttaccagatgatgcagagcatgcaacaagttatttgtgctggactcgggcagcagcagatgatgatgaacatggcgatgcagatgccatacatgcgaaaaatgggccctgtcaaattccaactctcttctt

SEQ ID NO: 71572 - DNA, 2058 bp, Oryza sativa
  Clone ID: PAT_MRT4530_72033C.1
tggcacgaggacactgactgggactcactcgccgcagatcccaaacctctccgccgccgcgccggctcgcctcgcgcgccatggccgcctccgcctccgccaccgcctccctctcccacctcctcctcgcgcgcaagccagaccccgcgcctctcccctcccgccgcgcccccgccctgctccccttgccgcggcggcgcgggcagcggcccatctccgccgccgccgccgactccgacctcctctccggcgcaccctccctcaagtcccggctcgccgccgggtgagaccctgtacgggctcttcctcctctccttctcccccacgctcgccgagctcgccgccctcgccggctacgactactgtcgtcgtcgacatggagcacggccccggcggcgttcccgaggcgctggcctgcctccgcgccctcgacgccgcccgtaccccagccgtcatccgcctccccgaggccggccccatctgggccaagaaggccctcgacctcggccccgcgggcctcatggtccccgccgtcgagtcccccgccgccgcggccgccgccgtgtcgcactgccgctacccgccccgaggcgttcgcggcgccgcccaccccatcgtccgcgcctccgcgtacggcctagacgactcctacctctcccgctgcgaggacgagacgctaatcatctgccaggtcgagaccgccgctggcattgcggaggtcgacgccattgccgccgtcgacggcgtcgacgtcgtccagatgggaccgctcgacttgtcagccagcatggggtacctgtgggacccagggaacaggaaggtgcgagccaggctgagggaggccgagaagaaggtgttggatgccaggaagaagaatgtgacagcttcagatggcaatgtcgcatatctaggcggattcgccatgccgaacgacccggcagagcagctcaagctgaggggttaccacatggtgtctggtgcagtggacattgggatgttccggaaggcggcgttggaggatgtcaagcggttcaaggaggcagtgatggaaatcggcgaggaggaaggcgaggaggacgatgaaaagaaggacaaggaagacgacggattgagaggtctaagtggttccattttccaggggcctctggtgtactcttgtttagttgtcaggtcgattttgagaacatcatgtttgggcatcttaggattcccatttgtaggtgctagctctgtagtgaacagcaaccttccttgctcatcaaggatatcctcctgctcagacttcacatctggctactcctggcgtcctatagaggctgcaaaactctgccggacacgagctgtgcgctcgctgcagataacctgtactgccacaaagcctgcaaagtcaccagctgaagaagaatggaagatcaagaggcaagtgctagtagaaaagcgggtccgtagtgttgatgtgaaggaagcactgcgtcttcagaaggaaaacaattttgcaattcttgatgtcaggccagtagcggactttaaagaggctcatccacctggtgccgttaatgtgcaaatatatagattgataaaggaatggacagcatgggatattgcaagacgggcagcatttgcattctttggcatattttctggaacagaagagaatcctgagttcatacaaagtgttgatgagaaacttggtaaagatgcaaagattattgtggcatgttcgacaggaggaacattgaaaccaacacagaactttcctgatgggaagcaatcgaggtccctgatagcagcttacttgttggtcctgaatggttacaagaatgtgttccatctggatggaggactctacacatggttcaaggaaggcctaccggctgttgaaggagaagaataagcaattaggacatattacttgtaattagtgcatcagtattcatgaacatggaggtgtgatgagttgtaacgaggcatcttctcggataaatagtgcactaattggatccctttctttttctttcccaaaaggatatgcgctcttttaccattttgctatttgat

SEQ ID NO: 71573 - DNA, 540 bp, Oryza sativa
  Clone ID: PAT_MRT4530_72034C.1
atggcgaagactatggagcaaggacggcgaaggaaggagaatcgcgtgggtacctcgcgaagccaaaggcctcttgggcgaaggataccaagagccagcgcagtgtggcgcgcagcagtcgagggcggcgcgaggtggtgccggccgagggcatctccatgtcctgttgggggcatatcactaacagcggcggccgagggcggcgcggcgcgaggcggcggcgggcgggagcggccgctcgcctggatctgccgcctctacctccctctgtcgtcgccggcgactcccccgtactccttcaacgcggatccggcggcggcgccctcccccgcggcggcgacgacctcgggtggcggcactaccgccatcccctcctcaccgcccctcccccctcctcaccagacgacgacctcggacggcggcgggggcggctctgccgcctcgggcggcgccgccccgcgcggatccggcgccaagggcggccgatctggagcctgtgacgacggcgggcggcgagggcggccgatccggagcccgtga

SEQ ID NO: 71574 - DNA, 621 bp, Oryza sativa
  unsure (1)..(621): unsure at all n locations
  Clone ID: PAT_MRT4530_72035C.1
acataaaaataaaattctattatgaattattcatccacataaatgtgtacatcgataggcaagcgcgtagcgcttattaattagtcattcatcaacacctacacacttatttatgcatacatgaataaggggatctgaacacatagaacacaaactacacaagctaggaacacacaacaatataatctttggtaagcttcacgcgggtcgtgacgagcttacttgccatggccactgcccgcgtatgagccggctctggaccctgcatacgagccggagccggcaccagagcctccatgcgggccagcaccggagcccgcgtacgagccggcttccgagccagcgtacgaccctgcgcctccgccgttggagccggcatacgagcctgcactggaaccagcgtacgagcctgcgccggagccgccatctccaccattcgagccagcatacgagccagccctggagccggcgtatgaccccgcaccacctggccccgcgttcgagccggctcctgactcancgctcgagccggccgatgagcctcctccacctgacctcgagctcgaacccgagcttgagccagaccacgaacctgacccagaccctgaaccggagcccgag

SEQ ID NO: 71575 - DNA, 323 bp, Oryza sativa
  Clone ID: PAT_MRT4530_72036C.1
ttttcaccgactagtccaggcgtgatgactgccctttccagcatgtactgtgcggcaggaatgacccaccacttgataccaaggaaaatggaaacgaaatcaccacgtctgtgaatactgcggggctggggaatatatacaatttgccatccatcggagcaatggtcggactcgctgacgctgtatgcatcatggccaactaccccaagaccaacgagagcgtgtagattcatggctcacggacacatgctatatgcgtctgaggaacatgggctatcaggacacatattctgccacactcttggacatcaaggctcccagat

SEQ ID NO: 71576 - DNA, 141 bp, Oryza sativa
  unsure (1)..(141): unsure at all n locations
  Clone ID: PAT_MRT4530_72037C.1
tcggcggtggcgactgctggccgggcgcaggtggtgcgccgcagcggtgggtgtggaggctaatgcgaggctcggcgctcccgcgacgggcgcanagtggagcagcgcctggcaccgtagcagcttttgcgggacgacagc

SEQ ID NO: 71577 - DNA, 479 bp, Oryza sativa
  Clone ID: PAT_MRT4530_72038C.1
atggtggccggagcggcggctgttgagcgtgggggccgggacgccgcgggccttcactcagagcgactccacgttcaagagctccgggagcaagcttcgactgcaatcgccgaagcggaagcagctcaggactcctctcgcgcggcagtctcccgggaggactttgcccgacaacaagcggagcgcgacctcagggtggcgcgcgcggagttggcccacgagtgcgatgccaccaagcgactggcggaggaggttggcgcgttgaaggctacccttggcagccatgaagaggaggtgcgggacgcccggagccgatatgaccaggtccggctcgctctcgacgagctaaacatccgggccatttccaccatccaggcccttactcacgccttcggcagcatcggggtccagggccccgcgccgcctccgaacgacagcgcggttgccgagaagctgcgatgggtggagaaggcaggcag

SEQ ID NO: 71578 - DNA, 654 bp, Oryza sativa
  Clone ID: PAT_MRT4530_72039C.1
atggccacggcgcccgtcaagatcgtcgtcctcgccgccgcggtgtccgcggcggtggcgctcagcttcttctaccggttcaggtgcgtccacctgccgacgccgtacgtggccggcggcgggcggcggctgatcgtggtgtcgaaccagcaggaggtcggcgaggagatggacctcgcagacggcaacgtgcagctgctctgccacgggtacggcgagcacgaccacagccggtcggtgtggtcggcgcgcgccgacatccccggcggcgcggcggcgcgcctgtcgctgcccgccgtgcgcggcgacgaggtgttcgaggtgctgtgctcctaccgcggcgccaaccggtgctgggcgcacggcgtgcgcgtgttcgccaacccgggccacgacaacctcttctgctcggagcacgccggcggctgcgaggtgcggttccgcaaggacggcggcgtcgagaagcagtacggctccacctccacgccgctgatattcatgggcttcgtgccggacttcgacaacgccagggacggcgcctgcgcgtcgtcgagctgcgtcggcaggacgatcaacagggtgatcggccaggagagctgctgcgacgattcctgtgggggttgggagaaggcatcgcccaagaaatcatcatga

SEQ ID NO: 71579 - DNA, 1476 bp, Oryza sativa
  Clone ID: PAT_MRT4530_7203C.1
atggctcagcggcggctgctactcgccatcatggctctcgccgccgtcgccgccgccaccggcttcgagttccacgaggccaccgtcgacgccatccagctcggcttcagcaacggcagcctcacctccacggcgctcgtccgcttctacctcgaccagatcacccgcctcaacccgctcctccacgccgtcatcgaggtcaaccccgacgcgctcgcccaggcggcgcgcgccgacgacgagcgcgccaccggtcgccgctgcgggccgctccacggcgtccccgtcctgctcaaggacaacatcgcgacacgcgaccggctcaacacgacggccgggtcgttcgcgctgctcggctccgtcgtcccccgcgacgccggcgtggcggctcgcctccgcgccgccggcgccgttatcctcggtaaggccagcctcaccgagtggtccgcttaccgccccgccccgaacggctggagcgcccgcggcggccagacactggtaacaccaaccaccgcaccaacaatttctgcttctttctcttctctatttgatcgtataagctcacaaggtgtttgtgaaattgtccatgaagaatccgtacgtgcgctcgttcaccccgtgcggatcgagcagcggccaatatgtcggacagtgtcggatgctgtccatgtgttggatgccattgttgggtatgatgcacttgacgctgaagccactggagcagcatccaagtacattcctaatggtggatatggacaattcttaaggatggatggattcaaaggcaagaggattggtattcccaacggcttcttcactcaagaaatatttgagaagaaacagctgagggcataccaaaaacatattcaattaatgaggaaacatggagccatggtgattgagaacatcgacatcgcaaaaaatctgactgaagtacagaatgttcttttttccaacgagcatatcgcaatgatagcagagttcaagttaagcttgaatgcttatttgtccgacttgttgtattccccagttcgttcccttgcagatgtcatagcattcaacaaggcacatccggtggaggtacgcaagaacttagtgttgtatgacgctttgttacaggagaggcttaaagattttggacaaccctattttattgaagccgaaaagaccaacggcattggaccggtggagaaagcttcaatccaacatctcaataagctgtctgctgatgggctggagaagttgatgaggatgcaccagttggatgcgattgtcacgcccaatgacaacgggagagtcttcttcgccgtcagtggcatgccagcgatcaccgtgccggctgggtacgacagtcaaggagtgccatttggtacttgcttcggtggattgaagggctatgagccaaggctgattgaaatggcctatgcttatgagcaagctaccaaagttcgaatgatgcctggcttcaagatgtag

SEQ ID NO: 71580 - DNA, 427 bp, Oryza sativa
  unsure (1)..(427): unsure at all n locations
  Clone ID: PAT_MRT4530_72040C.1
agttttcatggttttgaatccctgaactgcctaatgtattcaaatcatccatcataatatgtctatatgttttgacggagtaatcaccaagatttgtagtttgtaaggtaatttaatcggagtactgacaaatacttggtcttctccatccaagctgtatgctagcagaaccagctttgccattttacagtaagctagactattcatagttcagaacatgataaacaacttctctgtggtttcttatgttttttttgggtgttcagtttccttatacatatgctatcttttgtatggcactaagaacctgttcccattcatatttataaagaaataatgaaatcaactcatgtgactatttgcagatcccaccaacacgcgcnaggncaccaaagcttggccggnacagccaaccaaatccggcggc

SEQ ID NO: 71581 - DNA, 738 bp, Oryza sativa
  Clone ID: PAT_MRT4530_72041C.1
atggctgaggcgacggcagtgagcggcttgaggcggtttaaggtggtggcggctcgggtgcacggtgggaacggtgtttcggggtggaagggggaaaaaggagtggcggccgaggttccacgcggtgcggcgaacgcagtggatgcagaggcgcggcgtgaggtggccaggactggccgcaaggggcggccggagcacggcgatgagcggcggagctcggacttgcgtcgtgagcgcgatttcgggcgcggggaagctcgggagttgggggaaatgagagaaggaagggcggggagtgtttttataggggaggagaggtcggaccgagcccgggagaggcggagtcagggcggcaactgccggcagcgtggacggcaaccgccggcagcgtggggtgtgggcggcggttttggaggggaaaggctcctttatcttggatacagatgcctccagctggggttcatcgcattgcatcatgaaactccttatccagacccgtatgaaaatgttgcagatgcacatactcgggtaaggacaaggaagctcaccgtcgcccttgcctcgccgtcgccaatgtcgccccccatttgttcctccatgtcgccgctgtcagcaataaccccttttgcaaccaactactccggcgcttccgttggatctagccgccacgacgcgacaaggcgagcagcagcagcaaaccatccccatgacgatgaagacagggagcggtgcggctag

SEQ ID NO: 71582 - DNA, 405 bp, Oryza sativa
  Clone ID: PAT_MRT4530_72042C.1
ggtgtcatcaatataaggctttcacgcccaggttaacctcttataagtctgtattccagggcaaaacaggtaaaacctgtgtttcaaagcactcacttaactgaaaaagcgcacgatagtttgtgctacttcaacagtctaccatgtcttaccacctgcaggtcgattactacgacgtcatgggggtttatacgatggcaatcctggccctacgaattccaggtgccgacctacggctcgccacattgactctagcttggattaaacgatggatttgacattgagcttcttgaagtcatagtaagacttaccacatccaactaacatgactggtgcttcacatatataaaccattgaaagcctattttcaaccttaccattcaatgagtactacttggtgagcaa

SEQ ID NO: 71583 - DNA, 1034 bp, Oryza sativa
  Clone ID: PAT_MRT4530_72043C.1
atgctgcggcaatggtgcagccgcgcgaacgacgggacgagggccccgctcgggcggctcttcctcgaggagtcccgtggctcgttcgacaggtggtcctcttccacgtacgtcgtcgtcgtcttccgcggtggcgtccgacgagggcggcctggacggcgcgccgccggagagctactgtctctggactcccggcgccggccccgcctcggcctcggcctccccacgcccgcccaggaagagcggctcaacgggttccatggcgcgccacaacgacggcaaggagaagttcatgttcctccccatcccgccgccagcagcaaggagaacgacgtcgatcacttcaagcccaaacccaagccgacgccggcaagcggccgcaagacgacggggcactgcgagccgtcagacaggtgcgctccggaggtctgcaccgtcgggaacgagtcgatggccgacgacggcacgggcgctggccccggccgccgccctcccgccgcgcggggcgccggccaccacccctctggccgcgcgcgccgtcgtccagccgccgtcacgccgcgcggggcgccgtcgtccagccgccctcccgccgcgcgggcgtcgccggccaccgccctcccgccgcacgagccgccggccaccacgcccctgccgcacgggcagtcggccgccgcccctccggccgcgcgcgtgccgtcgtccagccgccgtcacgccgcacggggcgtcgccggccaccgccctcccgccgcacgcgccgtcgtccagccgctgtcacgccgccaccacccctcccaccgcgtgagcgtcgccggccaccgcgcccccgccgcacgggccaccagccaccacccctcccaccgcgcgggccgcgggccgccgcccctcctgccgcgcgggcatcgccggccatctccctcctgctgccactctagatggcactcttccatctacagggctgttttagacattaggaaccacacataagaggggtggagctggaactggagctgtgccaaacaggcccatag

SEQ ID NO: 71584 - DNA, 729 bp, Oryza sativa
  Clone ID: PAT_MRT4530_72044C.1
atggacgacggcacgcgcgcggccggaggggcggcgcccgactgcccgtccggcaggggcgtggtggccggcggctcgtccggcgggagggcggtggccggcgacgcccgcgcggcgggagggcggctggacgacggcgccccgcgcggcgtgacggcggctggacgacggcgcgcgcggccagagggccgtttccctttgcaaaaagtatactttgactccctcaactattgcccgagtatgattatctcctccaaccataaaaccgagtatatcgactcctccaactatcaaaaccggtgcaaacaatgcccctccgtggttttggagaacgaccggccggggccagcgcccgtgccgtcgtcggccatcgactcgttcccgacggtgcagacctccggagcgcacctgtctgacggctcgcagtgccccgtctgcaaggaggacttcgaaggaggggcacttggcgctgtaagctatcctgtgcatggcggcgaccgtgtcgatctctgcggcggcggcgacctgtaccgtcttgcggccgcttgccggcgtcggcttgggtttgggcttgaagtgatcgacgtcgttctccttgctgctggcggcgggatggggaggaacatgaacttctccttgccgtcgttgtggctgcggccgacgacgagctcgctgatgcgtgttgataaactttgttgtgtcctcgtctccctctcatatttctgttag

SEQ ID NO: 71585 - DNA, 645 bp, Oryza sativa
  Clone ID: PAT_MRT4530_72045C.1
gatatggcttacaaattcagtatcaaaacaatcagtatcagttacaaaagtgtgatgcccaaggcaaacacgtctcaccctgcaagcatataaaaccccaagaagaagaaaaaaaagactgtagcagagacggatggtactatacccaccaagcattggagattatatactcgcacaacattgagctcagaaaaaaatgatgatatatcttctagcacttcagtagagactaaagaatgagatgtatattgaggcagagtaacatgaatgaagagtgtgtagcaagccaagaatgtggattctacatggctagaattaaccagaaaatcagggaaccaaccaacactcttacatggagaggggcagcaataatcttctctctcttttcttagcaagctttctctgcctcaaaatgtaaaggccagcaggaagaagaataccgagtgagataataacagcggacagccagaagtgcctgaagtacaacgtcatgtacgatgatattatcagaaagcaacacagcaagccccatgagactgctccaattatgtcacgcctttgtgtttggaatcggatcttgttagtcgcgcagctgctcaaccagcttcgaccgggttatcatcgcagataccccagccgccgcgg

SEQ ID NO: 71586 - DNA, 157 bp, Oryza sativa
  Clone ID: PAT_MRT4530_72046C.1
atcactattcctggctaccgccgacagctcccctaggaaatgtctgccctgccaccctcattctcttcagcaataggctatctaaaagtttcgaagctagccagagctgcatacatacctgccatacggaggcatcgcacgtcctcatgatgtcgca

SEQ ID NO: 71587 - DNA, 213 bp, Oryza sativa
  Clone ID: PAT_MRT4530_72047C.1
atggcgtcggcgggcggcggatttggcggcgccaccctcaggaaggagcggttggcggcgacgcgtgggcgacttccacgacgacgctggtggtcgatgggagcaacggcggcgggcctcctcccgcctggatccgacggcgggaacgggcagcggtgggagcaaacggtgggagcagcgggatcccacgacgccgacgcgtggccggcatga

SEQ ID NO: 71588 - DNA, 364 bp, Oryza sativa
  Clone ID: PAT_MRT4530_72048C.1
aacttcgaaaactggaatgttgtttatttaccctacattactggcttaaaggggttctttcttcgaggtagtcaaaccagtcggaccgacctagagacatacgttaaccaccaaaacgatactaagttgacctcagatttcttaaacgtgtgtgacttcagttactgtataccttcatacttctactattttttcttacccgaccctacaacttcctttatgcaatacgaagtcctcgatcaacggatcgttgtgcaaatttagagaagtttgacagatttgacacttgttccaccgttttgtattatctaaccctccaccaaacaaaccacttaccccgaaattaaataagacaaaaaatttt

SEQ ID NO: 71589 - DNA, 762 bp, Oryza sativa
  Clone ID: PAT_MRT4530_72049C.1
gcacgaggcctctcctcgcgttcacaccacgcacccgaatcttccgcgcctaccggacgccggtgggcccccctccccgccgcacttcggtcggcgcgtcgcgtcgccggaggaagaggagtcgtcgccgccatgaagtgggggatcgccgccgccgtcgcgtccgccgccgccgtggccgccgcgtcaggggccgagctgctcgcctgcgactgcgccgatcagccgccgcagcagcaggaggccgccgccgccgccgtcgggaggtgcgacgccttcctcgtccgccacaaccagggttcgtcgttgtcaagggacgcggaacgcgcggcggcggcggcggcgggggagcagcgtgtggaggggaagaagttcgcgccgcggttcgacggcctccgattcatcgagacgctcgtcacggcgcaccgctgaaccgggctgagattccttccttccttcctcccgtgattcggcggaggaagaggaggaggaggagacgccagatgcgcgcgtgatccttcggcgatttagatgcagcgccgagaagttttgttaggacaattgagaaattgaggctttgaaatctttcctcttctttctgtttgcttttctttctaatttcttcttattttcccccctttctattgttactgctattgctgttgacaattatggtgatccttgttaagcctgaggcgataattgtgatgatttatgtaaattgcgagccatgattgattcttcaaaaaaaaaaaaaaaaaa

SEQ ID NO: 71590 - DNA, 261 bp, Oryza sativa
  Clone ID: PAT_MRT4530_7204C.1
atggcgctaggttttcccggagggggagaggagactgagcgggaggaggaagaagacgacggccggcctggcgcgtgggccccgcgcggccaggcgcgcgctcagcgcgcgtgcgacgcgcgtgcacgcgggagggaggggcggctcgggcaggggcgcggcgtcctggctccgatgccattttgttctctctggcgacaagaggcaagggcaaggcagtcggcgcaggcgaccgggctcctgacgcagagcagcacgtaa

SEQ ID NO: 71591 - DNA, 1664 bp, Oryza sativa
  Clone ID: PAT_MRT4530_72050C.1
actctccatctacgccccgcgcgacgcgaccattcccggcctcctcccggctcccacaaaaagcgatgccgcctgccgccaccacgaaacggagcgccacataagtcgtgtccgtccactcacccacgccaccgccaccgccacgcatggccgctccgccgtgcccgccgcggcggcccatctccgcgccgtgcttcctcctctgcttcctcctcggcttcgtcgcgggcctcttccccttcgcccaccgccacctccacctcgacctccacctcccgctccctccccctgcgaccgccatcctcgtcagggaggacccgccgtccgtcgtcgtcgacgtcgacaccccgttgccggcggcggcggaggagcggaagctgctgctggtcgtgacgccgacccgcgcacgcccgctgcaggcgtactacctgcgccggctcgcgcacacgctccgcctcgcgccgtccccgctgctctggctcgtcgtcgagtccggcgccgccacgcgcgacacggccgcgctcctccgcggctgcggggtcatgtaccgccacctctcctcccccgtccccgacgcgccccaggatcgtccccgccgccgcggacggaggcaggaccgcccggctgttgacagccgcgcccgccagcggaacacggcgctggatcacatcgagcaccaccgcctacacggcatcgtctacttcgccgacgaggacaacgtctactcccttgacctcttctaccatcttcgcgacattaggagttttggaacctggcctgtggcaaccttggcccccgggaagagtaagacgatactacaaggaccagtctgtgaaggtagtcgtgtggtgggatggcacacaacagataggagcaagaatcagaggaggttccatgtagatatgtctggttttgcattcaacagcagtaagctttgggacgccaagaacagaggtcatcaggcctggaattacatccggcagctcgacacggcaaaggaggggtttcaagagacggcatttatagagcagcttgtagaagatgaaactcatatggagggcgtacctcctggttgttcaaaaattatgaattttcatcttcatctggaagacaagaatgccatctacctgaacgggtggcaaaccactcaaaacctggatgtaattattcctttgaagaaggaagcaaggcccctactatagctccttgcttaccttgcagatcctcttttcgatgtggctgaagagaaggaatgtatttcaagtcataccagggcgccacagaaactgaggtggttcatatataccagagtgccatagaaactgaagtggttcttttggcttgtcatcttatcgaaagtcagataggatggtttgtggattaggtgtacatacaacataaacacatgaagaaatctgcgcttacttttcacatctaacatgtaaagatgctaatcctgatggcaattttgtttattctaaatccttagtggctgtctgccccttacctccatggcttgctattttgtctgctgcaattttgcattttgtttttgttttttcatgtgtcctcgacagtgcgggggtaagttttcagtcagtcataagtttacatctgatctctacattatacaaaaaaaattatggaaggggcggccgacaact

SEQ ID NO: 71592 - DNA, 133 bp, Oryza sativa
  Clone ID: PAT_MRT4530_72051C.1
ttattttgggatactaccaggaccaggcaggatggatgaattatcggtgcccagcatcaccatatggcatccttcaataattgaaaagagacagtacttacacgaacgcgcgttacacaaaccaactctgaac

SEQ ID NO: 71593 - DNA, 500 bp, Oryza sativa
  unsure (1)..(500): unsure at all n locations
  Clone ID: PAT_MRT4530_72052C.1
gccccctncccagggaanngatnnncnaaatgggangcntggagatatatgggagactatctcangtancgatctctngttgttgttgatatcanatgctgctcaagcggataactatgangaaattttctcacacatcaaacccaacagtatnctnggattgtcacatgggatttctcctnggacctttgcaatctgttggcctngatntcccnaaaancntcaatgtngttgctntgtntcccnangganngggnccatcagnccaanagctttatgtnctnggatanaangtaaacagtnctggtgtcnncnccacctctnctgttctccagnatgttgatngatgaacagcagatgtcnctcttnngatggtcggttggtctaggttcccctgtccccnttgctactactctacaacacgagtaccgnagngatatttttngctaacgaggtatttngnttngggcngtgcnnngtatcgtggaagctctttaccc

SEQ ID NO: 71594 - DNA, 672 bp, Oryza sativa
  Clone ID: PAT_MRT4530_72053C.1
actgagccacaaactaagccttacccactagacatgtggaagtacggtagtgctttgcaacagaggcccgagctcaatccttatagtacccgaggaaaaattagagacttgaacggtccaattccgagttcaaatggccagctgatggttgttctcttgctgtacctcctaaaaacgttccctgtttctcatcctctgaacccttctcttctgattcttactaaaaataccagaagggcaccattgcgaattcatgtcttcatcttcgtcctgaagatatcttcatctcatgattcccactgtaaaaataactatgaaactgcttatccagatcagcccaactctgaacagaattatagggcttttgctgaggtgctcctggcagttggtgctgaatttgatcaaattgattatactagggcaaaagctgaggttgaggtgatccccctggttgatactgaacttgaagtgaatgaggttgatattgaaagttcaggttaccaccaggataattctgagtcagacgatgaatattcctccctgcatgctgaggctgttgtctgctcaagagataagggtcaaccggttgcttttgtgctgatgatgatgcacccggtctcccaacagctgaggttgatgccatcgggtgctctggggctacaccagaagtag

SEQ ID NO: 71595 - DNA, 1347 bp, Oryza sativa
  Clone ID: PAT_MRT4530_72054C.1
atggggtgcatctcctcgaagctgctcccgcccgggccgggcgacgcgagagggggaagcggcgcgcgcgccaccgtgcgtggccgcgtcgaccatgtggtgtccctcacctccaccacctacggggtgctcgacctccaccccaagcacggggctgcggctgccgcggcagcggcggcagcagcggcggcggcggtggcgtgccaggaaaaggtgcaggagactcaggctcagccgccgcaggaggataagccgataagcagggagtggaagcgcgcgaggccgccgccgctcgtggtcccgagcgccaagaagccggcgccggcgggtaagctggactccggattggaggttatcaacgcctgggagattatggccgggctggaggacgccgacgccgcggatgcgtcgccggcgaagaagccggccaagcagccgagtcgttggtcgccggcaagggtcatcgcaatggccctgccgtcgcccaagaagtcggcgacgaagcggaggaacacgcccgggaaggagaacagcccgctgcagcgctgctccgggaacaacaacagcagcaacatcaacaagaccggcgacgtcaacgtcgacagggtcctccggccgtacaattcaatcgacaactcgaaattgtccaggatgtccaagagattctctccggtgagcgctcggatcgtccggaagcccgggccgccggagaccggcggcggaatgtcgtcgtcgcggcggagcctgagcccgctgttcgacccggagctcctggcgtccatcgagcgcgagctgtcggaggaaggcgcccacatcaagcggatggtcgggtcggagaagcccaagcacccgaaggcggcgccaccggcgatggtggccgaggggaaatgcccgcccggcggcgccgacgcggtcgtcctgtacaccaccaccctccgcggcatccgcaggacgttcgaggagtgcaacgcggtgcgcgcggcgatcgaggcccacgacgtgaagttgatcgagcgggacgtgtccatggactcgggctaccgcgaggagctgcggctgctgctgggcgggcgggaggtgcgcgtgccggcggtgttcgtccggggccggcacgtcggcggcgcggcggaggtgaccaagctggaggaggagggcaagctgaaggcgctgctgcagggcctcccgcgcgcgcgcgtctggtgcgccggctgcgccggcgtgcggttcgtcatgtgccgggactgcaacggcagccgcaaggtgcgcgtggacggcgagcggaaggagacggtccagtgcggcgagtgcaacgagaacggcctcgtccgctgccccatctgctcatga

SEQ ID NO: 71596 - DNA, 984 bp, Oryza sativa
  Clone ID: PAT_MRT4530_72055C.1
ggcagtcttgtctgcgacagccttggagctccaccgcggtggcggccgctctaaactagtggatcccccgggctgcaggttttttttttttttggcataaactggggtgttgactaatacgatagtagtacggtaatccatgtccacataaacggtacaactacaaactcatagctgacttacgtttgttcctacacgcagaatctcaacagaaatcccacacataaaaacacgttaatttcaagtattggtggggtgcttccctgaatggcgcctcgtccgatcttcttcccctgcccccctcccgttttccttcatatggttggtgcccttaggttcttcttgaccccgtgggcgctctctccaacccctccgcatttggacctcccccctcccaagccctcctttccctgctgctggcacccccctcccatgccggctcccccccatggccactttatgtttaggtcccatcgaaaggtggggaagagtgagcttttctaaaacaggtgaatgctgaagaatgcatgctagcgcactcaaatcggaaagcacacaccagcattcattgagtaacaaagtcttcaaattcctaaagatagggcaccacttcaagtctcttctgaaaacaaacattttagtttcagctaccaatgccagattcttagcttctgataaacctcgcagaagcacgcagttctcagcttgtacgccacgacaaccgccgcagaattcatgattgcaacccccagaaaagtcatcaaaactactgaaatcgcgacactgactattaagtttgatgtctgctttcactaatgatggcaatctctcaagcacaggagtccttgttatggtatccagatgcagtgaaatgagatttgtggcatgcacatgagggcgggaaccagtaaaacatttaatgattcttagccgctttagcgactgcgatgtgatctttgtcagagaagagaagtaacataaaac

SEQ ID NO: 71597 - DNA, 785 bp, Oryza sativa
  Clone ID: PAT_MRT4530_72056C.1
tcacgagcccgtcatcgttgtcgcgagctcgccgaggtccgccgtcgaggtcgtcgttgtcaaggccgtagttatcatcatcaatgtgggcctcccgaggaagcctccacggcgagcggtcgccgcgcgtccgccagtagacggcgcctcgccatgctgtcgtcgcccccagttcgccgccccttggctctcctccctgacgggcgtcgccccggctactctcctcacggtgggcttcgcggcagtccgcgtgtcttctctgtgggtctcatcaccattccacttcgtggcgtggggcaccaaaaacgagtttttcttcgagttacccacggtcatttgcactatctgtctcccagcccccaactaggcgccgaatctctgtgcggcaatgcgtccatagtagtgatgctgtcgaaggagcccgtacattatcactttacgataagtgttgaatcgttcttttatgtctctgacgggcgtgccgccgctgctctcctcacggtgggcttcgccgtcgtccccgtgtcctgtcttctcctctgtgctcttaatccttccaccagaaatagttccctctgttttttccatagggtgacccattagaaatttgtagtgcataatcaaatactgtttttctatgaattatgtaaggactcacgatgttcattgctaatatatgcttttgtgagtttgaatttggactcgggtaaaataagtgattttgttgtattgtatcaaaaaaaaaaaaaaaaaaaaaaaaaaaaaaaaaaaaaaaaaaaaaaaaa

SEQ ID NO: 71598 - DNA, 2594 bp, Oryza sativa
  Clone ID: PAT_MRT4530_72057C.1
ttacaggatcaaatcaactagcacgcctttgaatccaagagcaagatttaggacctacactggagttaagcagatctcctaggccagtgtgtgtttttcgcatcaacacgcttttggtacacccagtgggaccgagttgtgacgttttttcatcatgatagacattaagcagactgctaaaccactgtctgacgttggccccgaaaacatcatcccgataagactggataagctgacaccagaatagatgctagagtacgagcagatgatgaacaatttgaagaatcaatacttgcattcattcaagcagactcgttcgggcatagttattcagaggtataaactaaaggtggttcccaatgatgattcggactcatgcacgtctaaagatggtaaaactaaaggtgataaagccaaggatgatgaacccaaggacgacaaatcagaaggggaagattctcaagagatcaagaatttgcaagatcagtttgactatgctgtctacaatgcattgattaactagtcaggagtattagtcaacactttaataaatatgatcaagtctgcggttgatggtacaattgctgaacatcaagctaaaggaccggctttccttcctgagggtgtgtttccaccatataggaatttgttgactggcaagcaacagcctacttctggtgtagccccagagcacccgatggcatcaacctcagctgttgggagaccgggtgcatcatcatcagcacaaaagcaaccggttgacccttatctcttgagcagacaacagcctcagcatgcagggaggaatattcatcgtctgactcaagagcagattgcagcaatgttcaagccaactcaaccggttgttgaactaattcagcagataccaatcgggcagcagacacctattattcaacagcatcagccgattggtacctcagaattatcctggtggtaacctgaactttcaatatcaacctcattcacttcaagttcagtatcaaccagggggatcacctcaacctcagatgtgatgagggagcagtttggtcttaaaccaaaggatactagtaatttgtatcggcatccatacctagagtattttgagagcgttccattgccaaaccgatacaaagttccagacttttaaaagttctcagggcaggataatgtaccaacttacaagcatgtcagccgatttttggaccagtgtggtgaagcattggctattgatgctttgagagttagattatttcccttgtctttatctggattggcattcacatggttttcttcattaccctataattctgttcagagttgggctgatctggataagcagtttcatagttatttttacagtgggaatcatgagatgaagatatctgatttaacagcagttaagcaaagacatgatgaaattgtacaagattacattctaagattcagggatatgcggaacaggtgttacagcttggctttggcagattctcagtttgccgatcttgctttctaaggtttaatttctccaattaaagaaagatttttggctcaggattttgagagtttggctcaccatgctcaaaaggtaacattgcatgagcaaaggtttgcagaagctaagaagaactccaagaaggttaatcatgtatatccttacgcctctgagtccgaggaagatgatgattccaaagtagcagcagccgaatgggcaaggaacaagaaggttgtgacatgttagtgggtgaagatttctggaaaagacgagagatatgattttgatatcaccaaagctgacaagatatttgatctactacttcgggagaagcaaatccaacttcctgctggccatataattccatcggttgaggagctgcgaaagaggaaatattgcaagtggcacaacaccggatctcagactactaatgattgcaaagattttatgcagcagatccaatcggctattgaacaaggaaaaataaagtttaatgattcgagaagatcgatgaaggtggatggtcacccttttcttgttaacatggttcacacttccgggagagcagccgatgggggaaatcattgaagttcacagcttaactcggttaagattattaactagtatcaaaggaggcatgacaagcaggaggaaagatattttgaagatgatggtggttttgatctgcattgggactgcaagtttttcaggttttgttggaatgaagggatgagattgccattgatagaagatcggctgggtcagaaaaggttgcctattcatcagagattgggctcagtacaccaggatcaccttcaggacgaagatgaagacatgaattcgcaatggtgcccttctggtatttttagtaagaatcagaagagaaggctgaagaaggcaaagaaagaatggcgtgttaagagtaaagttatgacagccgatgaggttgaagccgacaaagcaaagaggttaatcaagggcaaagctgttacatctttatcggtaaacatggtttttttgctacctacggaatctggttataaacaaaagtacacggatggagatggacgaagtcgggggtcgatggacatctctagga

SEQ ID NO: 71599 - DNA, 310 bp, Oryza sativa
  unsure (1)..(310): unsure at all n locations
  Clone ID: PAT_MRT4530_72058C.1
gcgacaagctctcgccaagtcgctatccaagaaatccctcccctctctgtcctaccttggaatccccaccaggatctccggctatccggcggcagctacccagccatggccgcgcgcggcggcctggagaaccccctnctnggcggcggcccggtttcttctcagggcagtcggcgccgcgcccgtggaccgcgctcgacatcgacgtggcgctgctcgccgtggcgtgcgtcgtgctgctgntcctgagctcggggggagcgganaaaggcggtgatcggagcagggtggtgtccgncggaggcgggcg

SEQ ID NO: 71600 - DNA, 687 bp, Oryza sativa
  Clone ID: PAT_MRT4530_72059C.1
atggcagccagcgagcagagctccgagtcgtcgtcgacggcgtccacgtcgtcgtgcggcaagaaacagcaggtggccgggaagaggaagcgcgaggacgtcggcggcggcggggagcaggcggcggcggtggcgtacaggggggtgaggatgagggcgtgggggaagtgggtgtcggagatcagggagccgaggaagaagtcccgcatctggctcggcaccttcccgtgcccggagatggcggcgcgtgcgcacgacgtcgccgcgctcagcatcaagggcgcccgcgccgtcctcaacttccccgacctcgcccctgccctcccgcgcccggcctccctcgccccccgcgacgtccaggccgccgccgccctcgccgccgtcatgcaccaccacaaacacccctcctcctccacctccacctcctcgccgccggctgctcctccgccggacgaacaccaccctcgccacgagccgcagcagcctgagtcgagcagggaggatgaccagcagcagcagccggcggcggcggcggcggcgcagatggcggtggccgagctggtgttcgacgagctggcgccgctgtgggtggaggacgtggtggagttcgggacgtcggatcattgctggacggcgtacgatgcgcttgaccccatcggcttccagcctctcctctgggagtactag

SEQ ID NO: 71601 - DNA, 233 bp, Oryza sativa
  unsure (1)..(233): unsure at all n locations
  Clone ID: PAT_MRT4530_7205C.1
gcaacatctcactaccaggacttacgtngnccaggccatagggcaggngctccacctccagcaggtgggcggtctcttcnttgnccggnntctggctcnngcgcnngcnctgttggcttttnncttgccttttttttttggnntctncccttggtnctgtggggggggggggggtnttnccccccttggtggtgtctngcnctgggtgggggggtgttgtggttttggggtgt

SEQ ID NO: 71602 - DNA, 545 bp, Oryza sativa
  Clone ID: PAT_MRT4530_72060C.1
tcacagcatcgtgtatattactcaagcccgaccccaggttcaagttgtcaaccaacatatggaaagcccggtgttcacaccggagagcttcgtcgtggacagctaccttattgtaccaccacaccacctatgtagttgtaaagaaggccaccaaagagaaggatgtgccttaccacttgccattccaagccacaacccctaacttctatggtaagcccaccacttgccaggaaagagttcccattcttcccgtgcctctcccacactgatgtttctagccaaatgccatatcgccatctccaagagaagaggcctccagaggcctccaagccataaccagaggagatgagttcggtgcattcacctcccctccaataccagagctaccagacgtttataatgtgcggaatcctcttaagttgcaatcagataaagaataactaaataaataaataaataaattgcaagccattgcgttgctgctatgtactgtaaaagtttcttataatatcagttctgaatgctaaaaaaaaaaaaaaaaaaaa

SEQ ID NO: 71603 - DNA, 237 bp, Oryza sativa
  Clone ID: PAT_MRT4530_72061C.1
atggaggtcatggatgagccgcccgcagcgagaggcgacgaggtgatgctaccggaggacgtgctcgccgaaatcctccggcgccttaccctcgcagcctcgccgcgtcgcgaggcgttagcacagactggcattctgccaatcgactctcgccggctgctccgcgcggagctcctcccgttgtcgctcgccgcaccggacaagaagaggagtttgttagagtttgtcacaccctga

SEQ ID NO: 71604 - DNA, 512 bp, Oryza sativa
  unsure (1)..(512): unsure at all n locations
  Clone ID: PAT_MRT4530_72062C.1
gtcataacaatataaacaatgatgcatttgactaggtttatacttaattaagacattaaggtcctaattcaggagcacagcgtactgcttcacatctgagttgcttggtgcataaatttgttgtaacaccactatcatgttcgtgtcactatgaagcttgcattcatggaacttgcagcatctttactctgttatggaggtgcagtgtaacacatgattgtatcaacatacttttacagggcttggtatttatttttcataacacccttactgattgtactctcttggtcataaatagttgatgtttaggacaagattccgtcaaacttctaaagttccgacgggagtgaataacattattctcgtattgatttcttgctcatgtggcttctattntgtcttgaacatacacatcacatatngcatttatggaatgcggttaacacatgacactgataataaccatttacacttatatagggcactcttactgactatagcgttatttctct

SEQ ID NO: 71605 - DNA, 432 bp, Oryza sativa
  Clone ID: PAT_MRT4530_72063C.1
ggccggccccccctatggaagtttcattagccggccgttcaatcccccccgaaagggaaccccccccgcttttgccccattcaggccccaaaagggggccctccctggcacaaatttttcccttttttcacccccccctgtaaccagcgaccggggccctaaaaattcaaccccccaagtttttttcccaggggcaaaccctaacccccgaaatcgccccatttcggccccccccaggggttcccccaaacacccaaacccccgtttttttctctcccaccggaatggtagccctaaggggaccttttcacaccccccaaaaaccccggttcaatccccgattagtctgcccccaaatagcgaaccccattccttcctaaccctgggcggacccctgggcggacccctgggcccccccctgggcggccccct

SEQ ID NO: 71606 - DNA, 338 bp, Oryza sativa
  Clone ID: PAT_MRT4530_72064C.1
atataggggggcttggggcaccccaggaatttccgggccggtactttgggggttacccttttttttttttggggttaattttaaggttggggttaataagggtatttgttttttctttggaaaatttttttcccgttcaaaatacaaaaaaaaatataagcctgaaattaaaaagtgaaatcctggggggcttattgggggacataatttaattttttttgtggggcctataattccctttttaaagagggaaaactttttggccctttttatattaaagaaacccaaacctcgggggaagggggttttttttttttgcccctggtgttttttttttt

SEQ ID NO: 71607 - DNA, 777 bp, Oryza sativa
  Clone ID: PAT_MRT4530_72065C.1
atggcgacacatagatcgaagatcgaaacccctggcaccggctcgggccgcggaatgggcggccgcgtcagcgtgagcgaggtcgaggcgctgtacgagctcttcaagaagataagcagtgctgtgattgatgacgggctgattaacaaggaggagtttcagttggcgctgttcaagaccagcaagaaggagagcctgttcgccgaccgtaaaaatagctgtatgatagatgtcagtgcagattttgcctttatctccgtgctgcctcatgttcttaatattctccctgctcttacaggatttgatgaatttgctcgtgcactctcagtatttcatccaagtgctccacttgatgagaagattgacttttcattccagttatatgatctcaagcaacaaggctatattgagagacaagaggttaagcagatggttgttgctacacttgctgagtctggaatgaatctttctgatgaaattatagagagcataatcgataagacatttgaggaggcagacacaaagcatgatggaagaattgataaagaagagtggcgcaatctggttcttcgtcatccctctttgctgaagaacatgactctccagtacctcaagtcgatgacacctgaattcttggatttgtttgaactcaaaccatcagaagaatgctcatgccggttcattaagaattttgatattgggttgttggattgggcagagactccagagctctgtaggatgttgcatgttcgatttgagaagttctcaaatctttaa

SEQ ID NO: 71608 - DNA, 1776 bp, Oryza sativa
  Clone ID: PAT_MRT4530_72066C.1
atgtccacgccaccgccggccgccgccgcctccccggccaccgaccaaggcaagaccaagtcgaagaagaagagcaagaagcatcaggaggacacctcctcctccctggccgtcgccgcggcgtcggtggatgaggcggcggaggccaaggccgacggctacctgatcaagccgcagtcggtggcgccgccgctggacacgtcggcgtggccgctcctcctcaagaactacgaccgcctcaacgtccgcaccggccactacaccccgctccccgccggccactccccgctcaagcggcccatcgccgagtacctccgctacggcgtcatcaacctcgacaagccgtcgaacccttcctcgcacgaggtcgtcgcctggatcaagcgcctcctccgcgtcgagaagaccggccacagcggcacccttgaccccaaggtcaccggcaacctcatcgtctgcgtcgaccgcgccacccgcctcgtcaagtcccagcagggcgccggcaaggagtacgtctgcgtcgcgcgcttccacgccgccgtgcccgacaccgcccgcgtcgcgcgcgcgctcgaggcgctcacgggcgccgtcttccagcggcccccgctcatctccgccgtcaagcggcagctccgggtccgcaccatctacgagagcaagctcctcgagcacgacgccgaccgccacctcgccgtgttctggatctcctgcgaggccggcacctacgtgcggacgctctgcgttcacctcggcctgctgctcggcgtcggcgcgcatatgcaggagctccgccgtgtccggtcggggatcctcggcgagaccgacaacatggtgacgatgcacgatgtcatggacgcgaggtgggcgatggacaacttcaacgatgagtcctacctgcggcgcatcgtcatgccgctggaggtcctgctcactagctacaagaggcttgttgtgaaggattctgctgtgaatgctatatgctatggtgcgaagctcatgatccctgggttgcttcgattcgagaatgagattgaagtaggggaggaggtggttctcatgacaaccaagggggaagcgattgcgatcggcattgcggagatgaccacggctgttatggcgacttgtgaccatggagcggttgccaagattaagagggtggtgatggatagggacacatacccgaggaagtgggggcttgggcctgtggcgcttaagaagaaaaagatggttgctgaagggcttcttgacaagcatgggaagccaaatgaaaagacaccaagtgagtggcttcgcaatgccgtgcttccagctggtggtgatgcaatgattgccggcattgctgcagcacctgagccagagaagccaaaggtgaaagaggaggcagatgtggctgaagagaccaaggagaagaaaaagaagaagcataaggactgggcaggtgacaatgctgatgaggggaggaagaggaaggttggagatgatgatctctctgcttctgtgagtgcgaagaagattaaggttgaggaagaggctgatgcagtggaaggggaaaagagtgagaagaagaagaagaaaaagaaggacaaggctgaatcggcatatgccgatggagaggtgaaggctgagttgtctgatggggagaagggtggcagtgagaagaagaaaaagaagaagaagagcaaggaaggagaagctggggatgatgaagctgagaaaagtgagaagaaaaaggagaagaaaaagaagaatcgggatgcagaggtgacacaatag

SEQ ID NO: 71609 - DNA, 578 bp, Oryza sativa
  unsure (1)..(578): unsure at all n locations
  Clone ID: PAT_MRT4530_72067C.1
gagcataatcgataagacatttgaggaggcagacncaaagcatgatgaaagaattgataaagaagagtggcgcaatctggttcttcgtcatccctctttgctgaagaacatgactctccagtacctcaaggacatcaccactacatttccaagctttgtcttccattcccaggtcgatgacacctgaattcttggatttgtttgaactcaaaccatcagaagaatgctcatgccggttcattaagaattttgatattgggttgttggattgggcagagactccagagctctgtaggatgttgcatgttcgatttgagaagttctcaaatctttaaattgatgtaactttgtttctttcgtttggaagtttagtgtggctggagactttcggggagatgttaaatttctgtctgaatccgtagatcctttattctcttcccctcttttctgtttttctggctagcaatcagaatatcttttctgtttttttggctagcaatcagaatatcggatatagttttgtgaatctttcattttgcgtacaaaataggaaccttcaaaaaaattgatcgtgctgg

SEQ ID NO: 71610 - DNA, 295 bp, Oryza sativa
  Clone ID: PAT_MRT4530_72068C.1
cctggcctgaacatggctggaattgtttattgaggaagttaagcggctgtgcaaaagcgcctcgtctgagagccatcggaatatgattctttggcgtggcccggtcgtcaacttcacggaacgttttgctagagaaggccccagaagaaaattgttcgctgcgacgcttcgtgagacaagccatcagaagcacgacagacgacagagtctccctcacccagacatcggctcgctttcctgccatgctcagaccatgtattcacacgttacgatttcagcagctcacccattggga

SEQ ID NO: 71611 - DNA, 534 bp, Oryza sativa
  unsure (1)..(534): unsure at all n locations
  Clone ID: PAT_MRT4530_72069C.1
cccacgcgtccgtggtggtggtgggagagtatcatggtgcagtgtctcgacggggtgaggcagctgctggcggtcgtgttcaagtgctgcgacctcgagctgaagcagccgcgggggctcgaggatccccaggtcctcgcgagggagaccgtcttcagcgtgagcgaggtcgaggcgctgtacgagctcttcaagaagataagcagtgctgtgattgatgacgggctgattaacaaggaggagtttcagttggcgctgttcaagaccagcaagaaggagagcctgttcgccgaccgtgtatttgatttgtttgacacaaaacacaatggaattttaggatttgatgaatttgctcgtgcactctcagtatttcatccaagtgctccacttgatgagaagattgacttttcattccagttatatgatctcaagcaacaaggctatattgagagacaagaggttaagccagatggttgttgctacacttgctgagtctggaatgaatcttnctgatgaaaatatagagagcataat

SEQ ID NO: 71612 - DNA, 716 bp, Oryza sativa
  Clone ID: PAT_MRT4530_7206C.1
acgacaaccacctcgcttgccattctggactgcgggtgagatcgatggtgacggacggggagtgctcggcggcggcggtgaggaagggtgggtcgccggcggtgcggagccacagcgaggcggagcggaagcggcggcagcgcatcaacgcccacctcgccacgctccgcaccctcgtcccctccgcctcccggatggacaaggcggcgctgctgggggaggtggtgcggcacgtgcgggagctgcggtgcagggcggacgacgccacggagggcgccgacgtcgtcgtccccggggaaggcgacgaggtcggcgtcgaggacgaggacgacgacgagggcgagcgcgacgaggggtgttatgtcgtcggcggcggcgacaggcggtggcggcggcgcgtcagggcgtgggtgtgctgcgccgacaggccggggctcatgtccgacctgggccgcgccgtgcgctccgtcagcgcgcgccccgtgcgcgccgaggtcgccaccgtcggcgggaggacgcgcagcgtcctggagctcgacgtcgtcgtcgcctccgacgccgccgacaacgacagggccgtcgcgctctccgccctccgcgccgccctccgcaccgtgcttctcaaccgcgaggagctcctcgccgccgccgccgccgccgccaccgacggctacaagcggccacgcttctcgccgaggtgtagcagcctaacctaa

SEQ ID NO: 71613 - DNA, 2650 bp, Oryza sativa
  Clone ID: PAT_MRT4530_72070C.1
cttcttcaatggcttgggcatcttgagcgtcgattctagggatgacttttaaagacttggtgagatcagcaacattcttgatagccaattttagtcttgtcttttgttcttcgacagattttgggagatcggctagctttttatgttccatatccagctcggcgttgcattcttcaagttgtgccaagagttcaatcttacgagcttcgagccgatcaatgttagatttaatcgggccctcagatagttgatcaagtttggccttctcttcatgaacaagctatcaattggcctggattgtggcctcgatatccttgcgctcccgacgtttagctaatctcagcttggctttctccagcttgaattgatgctgctcaagatagacggctggagtacggacatcggctagctcatctgggattagagcttgaacctcgtgtagctgagtcctaattgagccacaatcaaccactaagctgtctaacgatgatgcctctagccgctgagagatatcttcaagaattttcttcacatcatcggataaaagggctaaagctttgcttctggtatcctcttctgtctcatcaagatagtctctaatgtcaaaagagaaaagatcagctaagactaggatagcaggagcagttggttgttcttcttcttcaatatgatggctctctatagccgatggagtttggtcactcgatgattgttgtataggagaaggaggaggaggaggaggtcatggagctggtttgagaattgttattgccgatttcttcttcacagcagttttttctttttcatctgcggcttgatcaacatcctcgccgatttcttcttcatccagagcttgttcaatggatggatctagggcaggcagatcatcagttggcttcgttttctttgacttgactttcttctttggagcttgagccgatagatccgcagtcgatgacctggtttttctctttttaccggtatcggctggttctctgatgaacccttggagaagagttgaagtcctgggggcacgataaccaatgacatggggagatggcccgcctccattaggaatcagacctggagcatattcgatatttctaccactattgctctgatgaggaggagagaattctgtcgtctgagggataacatctggaaagaggtatgtcatgtacatggaagccgattgatagaataggtgcagtttccattcaccccaccatctgttaaagtttttgctcctgaacattgccagctctatattctcaatgctgcccagaggaggtccttgaaggttgagcagccgatccatcatcaaggttgatgaaattaaccttgagcatccaatgagctcagctagacaacttggaatgggccaactcccaatcggcttattctttgccgataagatccagtgccgagtggaacttacctcagcgtactcggctgacagcgcggcagacgggctatcggaggacgacatcgccgtgggcagagatttggccaaaaatgaagtctcctggggatctccttgtgcgtcggagaaatcgccggagagagagaagacagagttggcttcggcggtgaaaacggaagaagacggtgtgagatttctcgggggtaacggttagtatttaaagcgatggaataacagtcgaaaaacggcaagagcgaatttcgctcggagttgatatatggcaaatccgaaacattgctaaatattccggatgcgtgcatgatcatcttcatcttcatcaagggaaggtaatatggaattttgaagatactactggttgatggcattaactgcatagatattcagccgtagctggatgaaccaccaagggcccccatgtttgacagataagcccattaacaatctagtcgatgtctggctcaaagtttaatagactgctcctagaagatattttcccaagggaatcggtttcttctcatgaatggcttgggctagatgctgaaggatggctgtgggaccacaagttgtgccgcagaatacaaatctctctaaccacaggttgagaaaggcgatgtgttcttgatctgtcactgggccagtacccatgttattggttgcatatcctaaccagccaccaccaaccttggtctttatcttatattcactcttgattttcaacctgatggggttggctgatgaagtgatatctaaaccagttagcatcttgatgtatagaacggttggtgtcattggcccttgaccaaatatgaaggagttcagagtatcagaccagaaataggtcgcaactgataacatggactcattttttggcatatcggctagggatagtgacagacacttagctattcccatctttttccacaaggattgcttagaagctgagattctcctgtaccattccttccattcatctaatttagatggccgagacccgaagactgtgggccaatgggctagttctggctttgtttctctaaaagggatcctattggtctcaacgttaatgaagtaagttgggtttgagtcacccattggaccaaggaaatagtgtgttgggtcatgcagaacaggaatcacaatttgccctctaagatgttgaatcaagagatttgaaagggcaaaccctaagtgacggaatgaagcaat

SEQ ID NO: 71614 - DNA, 769 bp, Oryza sativa
  unsure (1)..(769): unsure at all n locations
  Clone ID: PAT_MRT4530_72071C.1
cccacgcgtccgaccatacattcatcagccattaatatataatatccatactagtacaagaatattaatcttaatgccttaatcaactcaaaagcctaagcttaattatcacaagcacatcattttggaaacatattgatagcaacatgccagtgaagtagtgaacacaaagaatgggataataatgatcaagaatgcatcaggttaagaacagattgtttaggaaatcttcacagtaaccattttgctatatgaaaagtgcaagacaagaaggaagaacaacctctttttgtcaaatgcaacagacaggggcccacatggaagtacacacatgtctgatgagaataaaatgatccaggcccctaaagagcatatctatgctatccatataaagccaaacaaaagaaaggaggcacacatngcaaggagtcctctttatggtaagataaaatgaaatgccncagaggttggtgtagtggcagggngcagtgatactttgtgatccacgcactgatggggtctttcatgggnagcagtggaanaaaagtatggccaatcctgtcaacaacacatttttgcccattggaaaatttgtcacccctcggctgcatgatgtactgctggattctgtggcctatccatgcatcacaagattcacaagaaacgaatatatcacgtcttgtagaagggtgggtgcacaagcacagaggcatacacatatacncatcagtgtatcatctttttctaactcatcaggcaggcatgccga

SEQ ID NO: 71615 - DNA, 870 bp, Oryza sativa
  Clone ID: PAT_MRT4530_72072C.1
atggccagctcatcgtcacccgccatctcagggtcgtcgccgaagatgcccaacacgacgggcatcaatccatcgcggcgcgccggaggccggagcgctgcggtcggcgctgctgaaccccgtcccggcggtgctgcgcctctcgcccttgctacgaggctccgacgacttcaacggcgtatggcacgcgcagcagcgacggccacatccagcggcaataaagcgctagacatcgaggcagccgcagctggtgatcaccaggtggcgcgcgacgacgacgacgccgacgccgacgcgaagcgcgtttccaagagcgtgcagacggtgtccctcttcgcggcgtcggcgtcgcttctgctcttcgccaacctcacggcggcgggcaaagcaccgacgacgacaccgccgccgccgcgattgcccgccggcggcgcactttatagtgtaaacctggcattgatttgcctcggcctgctcacgagcctcgctctctccatcttctccatcctggcaccggccgcccgtaaactcgccgtaaccaaggtgcagaagaggggaatggtgatggccgtggcgttcgttctcgtctcctttctgctccgtatttcgatgatgcttcctgctgcatcgttggaatgggttttcctcttgatcttcctggtatttgcctgtgccgaggcggcctacctgtcgctggtatatatgagacatgttgtggatgaaccaaaggcccattcaaattttggtgcgttggatctttgtgttaagatatgtgctatcgaccgaagtggtacgagacccattaaattgacgctcagatgcgtgctgttgaccgaggctgacacagacagggttaatcctatcggttag

SEQ ID NO: 71616 - DNA, 2649 bp, Oryza sativa
  Clone ID: PAT_MRT4530_72073C.1
tcaaggaggaaagtcaagtgctggtgcaaaaccaggtcgtctcgctagttctgcattgataaaaactgcacccatcctttttaagtgactatgattagtgctgactagaaggacaaagatgtctgatcttctgctagcctcctttaacgatgaaagagactgaaaaggtacacctcgatgtgcctgattttctggactcttgtaattgagcaaatgcggtttatccgttatgatgtttttaatatctgtccatatgatataatccgtttgctgaagatattctcgcgatgaagtagttctgtacgtgttagtgttatcatcagagttagttctgttcagttcatactcctcctatctgagtaatcaccttggtcttcgtgattactacaattttcccagttcgaaataacatataacttaggatgataataccaaaaacaaagtataaatagaaaatctttatgattccacccgaactttagattttctatacattcctaaaagtgcttttgccacttatacattagaaataaaacacatttttataatggaagcaagcagttgccttcccaaatgaatagcacaaagatcagcacaccccctcaagattcttgcaaaggtaacacggtttgcacgcaacccactctgttgcatcatggagaaaaattgaagagcttcatcactgcatctattttgaatataacccaacatcaacattgcatatgaattgatgtttcgactcctcatgctatggaaaaacctacaagcattagcaatgcacccacacttgacataaaagtttatgatagagtttccaacaacaacatccaagtattcagaaccaatcttcacaagatggccatggatttgctcaccagcctcctttgctcctatatcagcacatgccccaagaacagttgagaaggtgaaatgatcaggacgcagaccagaacgatattctctgcagaagagtagaagagctttctgtggcagtgaattccagcaatatccagagatcatggcattgattatcactagatttcgtggaaataatgtgctagagaataactgagaagcccactcaatgtgatggcattttgcatacatgtttactagggatgcactgatgaaatcaacaagtagcccaagtttaagagctaaagagtgaatctgctttcccttgtacatgtcttcaagtcctgtacaggcatttattagattagcaacacagtgctgatctaatggttctccagagtttcttaactctaaaaaataaccaaatgctctttcatattgtaggttcttgacacagcctgccatgactgcagtccatgatatgacatctcgggattgcatagttttaaagattgattccgcgtgaatcaacgatccaatttcagagtatatcgatataagagaattgcaaacattagtataagataaatccccagttctgaaagtataagcatgcatctgttgaacttcctctttggtctgacagatatttatcacagtaaccaaatccccttcccttaaattgagacccgaataaagaagaacctctgcgagtttcacagcttcaccctgacaaccatttgagtgataacctgagattgccaaagaatacaaagacgcatcatgccttctaactgcaggaacaagctttttgatgtactgagtctcacctgccttcccagctgacttgatcagttcagacacaacaaaacagtctcttcccaaccccgctttaagtgcataaacatgaatgttcctagaaagctcaaatgctcccagaatagcagcgacgctagcaactaccctcaatgtcaccacatccattgccatgccaactcgatgcatatcctgacaaagctccacggcatccatgaaacagttattctcaacaaaacctgaaatcattgcattccaagcaactgagctcttcaccggaattccattgaacatcctgaatgaatagccaacattgccacatttcgcatacatatcaacgaatccaacctccacaaacctatcagcacccaatccagacttgaccaccattccatgaaccatgagcccctgttctatgacaccagaccgagcacaggcgttcagcaccgatgagatgacgaaccgatttggcttcacctcagaagacaggagttccttgaacagcccaatggcctcgaagcagtgcccgcggctggcgtgcgccgcgatgacggtacaccatgacacgatgtccttgttcggcatttcgtcgaacaggtggcgacaggcagccatgagaccgcctttggcataagtgtccatcaggacgttggacacgagcgacacggatgcgaagccgcgcttgaggacgtgcccgtggacggcgcccgcgcccgcggcgagagcgtcgcgcgcgcagcgccgcaggaggcgcacgtagaggcgcgcctcggaggacgggaagaggagctcgatggggcccacgatctccagcaccgcggagacgatcccatgccccccgccgactcgggcaccagaagaggccgcggcgatggcggcggcggcggcggaggaggaggaggaagagaggagcctagatggtgcgggcttggagacgagcgcggaatggaggagtagcagagggagagaccgggacat

SEQ ID NO: 71617 - DNA, 325 bp, Oryza sativa
  unsure (1)..(325): unsure at all n locations
  Clone ID: PAT_MRT4530_72074C.1
accttatacgagtcggacacggagcgagcaagtcggcggagttcttggtccaactggggataagagcagccggccggaagttggaccacacgctccactccaatccaactcgtcgtcgtacgtctccctcctctcgcaccgaaccaaatccccatcgcgccgcggcggtggcgaggcgtgcgtacgtacgtgatgccgggaccgggggcgcacctgctgtacgcgctgtcaggcggggcggcgctgtcgcggatggccggggcggcgcggttcgggcccgaccactgcgccgtntacgccgccaacgcctttctcgggccggacc

SEQ ID NO: 71618 - DNA, 735 bp, Oryza sativa
  Clone ID: PAT_MRT4530_72075C.1
atggtgtccttgcagtcggcgctgctgctcccggaggccagcaggcggccgccacggccgacgtgcctcccgctcgtcgattccgtcgcctccaccgccaccagcaagaagcggaagcgggccggcgtcgacgacgtcggcgagggcgagagcggggaggtcgggatcgagctctgcttcgacgccgcgcctctgcccctcgagtggcaacgctgcctcgacatcaagtcggggcagatccactactacaacacgaggacgcacaagaggacgtccagggacccgagggcggaggcgccgccggcgccggcgccggagtcgcaccaccgccgcgccgcgcccgccgaggaggaggaggaggaggaggccgcgaattattgcgcgccgccgctaggcctggacctggagctcaacctcacgttcgagccgcgccgggtacctatccaggaggccaagaagcacaggtcgtcggccgtggagacgacgacgaagccagcggcagcggtggcagcggagaagttagcgctcgagttgccggccggcggcgcgtccagggagatggtcgccgccgtttgcgcgcggtgccacatgctggtgatgatgtgccgcgagtggccggcctgccccaactgcaagttcgtgcacccaacagcgaaccagagctcgccgccgccgccgccgccggagccggcgccgctcaagctcgggctccagctgctctgctgcaaggactaa

SEQ ID NO: 71619 - DNA, 465 bp, Oryza sativa
  Clone ID: PAT_MRT4530_72076C.1
caattgaccagttcctggtctccatttttcttttgctaattttttgctggtcagactgctcatttacaaccacttgtagtaggcagtagtacatgattcagcaagtcagctctgtcaagttggcatgttcagtaatgtttacttcagcaatgtccttatgagtatgacttttgaaaacaaaatcaaaatctcgatatgtttgatgaattcgcacagctgtttttttgtagttgtatatggctgcttgtagaagttgatctgacatgcaaaagaaaatgttcttttttaggttaaaattgtggcagtggtcatgtcagcgatttttataattcttaagaagacatcgtgatataccatattttatagtctaatttttgttttaccatctagtatactaaaactgtatataatagaggtacctggattcaggatccactatctcagtatacctaaaattcggatcgg

SEQ ID NO: 71620 - DNA, 411 bp, Oryza sativa
  Clone ID: PAT_MRT4530_72077C.1
aaggggggcctagcccaatttttttaacccttttggctttggcttactggagggaaacatttatttttaccccaggtcctaatttttttgggaggtgggcactgaaaagatggggcagttacatgcattctggcattttgatgattctggggaactgggttggtaccaagcagcacattttgctttgaaactgggacagagatagacattcaccttatccatatatatgccttgaaacgggagggttggataaggttctggtaatcctaggggaaatttttcctttttaatggcacatgatcacccgggggaatttggtggtgcactggcattggggggttttttagaaaccatattttggttcaggacaaaccttagggtggaacctttttaaagctcccattggtttgg

SEQ ID NO: 71621 - DNA, 736 bp, Oryza sativa
  Clone ID: PAT_MRT4530_72078C.1
ccccaccggcatcgatcatccgggtcagaccatagaagatcacacattggtccctcatgagggacctcttgaacacgatctaagctgcgaacactatcaagattgtcgattgatggcgataaaccaccatggaggcagaaaatctctgattcaaccaatgctgtcaatggaaaatagtcaaaaagatcggtgaagatcttccagacatttgcacttccatactttcgtaggcattcgtcgtagaatccatacacctgtgtgatctgccgactctcatggtttccacgaaggattgtaatccgctgtgggtagcgcaccttcagtgcaaccaaaagtgtaacagtctcaacagaatagtagccacgatctacataatctcccataaacaaataatttgtatctggacacttcccaccaatccgaaagagctctactagatcatggaattgcccatggatatcaccacaaattgtgactgggctcttaactggctgaacgttgctttcttccatcaatatctccttcgccttctcgcacaacgtcttgacctcgggctcggagagcgggcggcactccatgagctgctcgatctgggcgtccaggccgccgccgccgccgccgcgcgagcccacggactcctccatccttcctcccacctcctccgccgcagacaagaggggcacctggtctaaccctagccgggggagagctcgtcgccggcgagggggaggcgagc

SEQ ID NO: 71622 - DNA, 1181 bp, Oryza sativa
  Clone ID: PAT_MRT4530_72079C.1
cctgtcctgcttgccgttaccgccacattctatgaatcccacgcaaatcaatcccagtctgcatgaaaagcaataacttaaaggaaataatcaggtgttctccgtgtcacatctggttcacctctcctaggagctggttcaaactgaataaatgtgtgattcctgcagtcatcaacctccaggatggatgccatgttgccacagcgataacaataattaggtgcactgaatatggtcacgaccttttgttcgtgcgcccagttatatccttccataactaattgatgagcccgggctacaagtttgagattattggtatggttaaactgctccgatatgtcctggccaaaagtgtagccagcaccacgaggagatatgccccaaccgcatcgatcatccgggtcagaccatagaagatcacacattggtccctcatgagggacctcttgaacacgatctaagctgcgaacactatcaagattgtcgattgatggcgataaaccaccatggaggcagaaaatctctgattcaaccaatgctgtcaatggaaaatagtcaaaaagatcggtgaagatcttccagacatttgcacttccatactttcgtaggcattcgtcgtagaatccatacacctgtgtgatctgccgactctcgtggtttccgcgaaggattgtaatccgctgtgggtagcgcaccttcagtgcaaccaaaagtgtaacagtctcaacagagtaatagccacgatctacataatctcccataaacaaataatttgtatctggacacttcccaccaatccgaaagagctctactagatcatggaattgcccatggatatcaccacaaattgtgactgggctcttaactggcttcataccaatcccactcagatacttcctccgtttcatattataagactttctagcattgcccacattcatatagatgttaataaatctaggcacacatatatatctagattcattaacatctatatgaatgtgggcaatgctagaaaatcttataacctgaacgttgctttcttccatcaatatctccttcgccttctcgcacaacgtcttgacctcgggctcggagagcgggcggcactccatgagctgctcgatctgggcgtccaggccgccgccgccgccgccgcgcgagcccacggactcctccat

SEQ ID NO: 71623 - DNA, 350 bp, Oryza sativa
  Clone ID: PAT_MRT4530_7207C.1
tttctggtcatccaaaaatatcttcagtttttttttctttctcagaatttctcgtctctatttatatggatcatatgtattcaagtctcatttctgtccagtatcaattcaccaaatgctgcatttgatttgcattgccttgtttcattttgatcagaattggccactttaattccatctatgtatctatggtaaaaattaaaagctacttttaccagctacatttgtatagattaaccacaatcaaatggagtgtccaattgtccttatttgtatagattaacattcaccgaattttaaacaaacaggcaacagcggatattttgcttaaggcctaatggcctttactc

SEQ ID NO: 71624 - DNA, 488 bp, Oryza sativa
  Clone ID: PAT_MRT4530_72080C.1
agttcttgcaccaccaggttgatcagatggagactgttgcacaaggtcgggtgtggagtggccaagatgcagcttcaagaggattggttgattcactgggtggattctcacaagctcttgctattgcaaaacagaaagccaatataccccatgataggaaggttagaggtttgctataggaaatgcatatttattgaatgaactcctctcatgcatatatgcgtcattaatgtgcatttaggctttattaagggactaattgatagcagagttacctgaccataattgatagcagagttgcatttgaatctttgatggggtttgaactatttattaccttttcaatgcttcacattctgatggagtaaccaatagcagtttttttagggagaatactagaggagctatattagcttaacgcatggagtaaccaagggcagttccctatcgacaaatagtgttttgcatgtttcattcagctattgcat

SEQ ID NO: 71625 - DNA, 810 bp, Oryza sativa
  Clone ID: PAT_MRT4530_72081C.1
ttattcaaagtcatacctatacttgtggatctttgtagtgtctaccatgtagtccgccagcatgatgtgtatgtcgaaatctctcgggtacaagaaccttgtgcctttgaaggcatgatccgttgacaaaatggtgtagagacgtaggatacatctctttttgggcaaatgtgcaagtggcaactggagtggagcagcaaacgcatggacttttgtgtcgcaagacatcaaaaccaagtgtgtgatgtcggattctccgatagagtgtgttccaataccaaggatcactaaagtgtacagtgatgtagctaccatgttcttaggcatcgcatgaccctcgttcttaatctcaacctcctcgaacggctcatgcttgggatgagccttcgttttgctggaataattcagggtgtttccataatcttcataaagatcatccttgaattggaatggaatttctggaggatgaatttcctcttcctctggctccagcaaccggaatgaggattcggcagttgagttgggttccaactcctcgtgcagaggatcttcataaataatcttgacctccgggacggcttcgcttcggccgaaagaatcgttctcgctgtagcacttcaccttcgggaaccccaaaaggatatcgaactcagggaacgtgtttaatcgccctagccatatccaaagctcgagctcatccatggtgatgacggtgctcgagctcatccattcctcccagcccatcacccatcggtcgaacaccttgtgcgcgatcgactccacacctctctctccatcctccgcccccat

SEQ ID NO: 71626 - DNA, 1050 bp, Oryza sativa
  Clone ID: PAT_MRT4530_72082C.1
atggtaactgatcgatcagctcgatcggacaataaacccactgccactaccactagtactaggagcatttttcgaaaaaaagaacatgggcaggagcaatcacccaacttcctggaagttgcagccttgcaggtgacgcggctagatgggcccggagggagcacgcggcgcagcctctcgtggacgaacggcccatcgcacgaccagagcccacagggatacccggcgcgcaggccggttaacagagatgcctcgaacgcaggtgcaggcctggacttgtgttgtagccctgcagcccgcaccggaggactagcgattagcgaagccgcgataagcataacgtacgtgtgccgcttcggtgctgctgcgttcgcgaaaaatcattgcgttcgtttcggtgctatgctgtgtacggccattacggtgtaccgtcgccgcacatatccacccacccagcacacagacagcagcgacacaagttacaacaatatccagcgccgcgacaaccacccaagtttggctagcttcccaaccctgacgtcacacaaaaacatcgtgcacgttggttgcgtgtcaatggcggctcgttgtccggtcggtgtggcctctgtgctgctgctgatcgtcttggtcacggtggcgtccgcggcgtctggcgcgcgatccggcggcggcggcggcgggggcatacgggagttgcggggcggcggcgcggggaggagggtggggggaaggacggaggtgagggacgtggagggggacagggaggtgcaggagctggggcgcttctccgtcgaggagcacaaccgccggcgccgcagccgggactgcggcgacgtccggctggagttcggcagggtggtcgccgcgcagcgccaggtggtgtccgggctcaagtactacctccgcgtcgccgccgccgaggagggcgccgcgggtcagaacggcggcgagccccgcgtgttcgacgccgtcgtggtggtcaagccctggctcgagtcgcgcacgctgctcacgttcgccccggccgcggactcgccgaacgagtcg

SEQ ID NO: 71627 - DNA, 2811 bp, Oryza sativa
  Clone ID: PAT_MRT4530_72083C.1
tcaggtttctagatggggcagagctttgaagaagccgtggttgtaggtcgcgtggtcgtcgcagtctgggttgtcgccgcctgctgtcgtgctagcagcgaggctgtcgctgcccgggtccgcgcctgcgaccgcgtccgtcgccgtgggggctgtcgccgcttgcgtctgcgtcgcctgtgtggccgcgttggccgaggggccgtccccacctgcatttgcgtcgaccatggccgagccgtcgcctcccgcgaggtcttcgccgcctctcgcagccgcgccgcctatggggtctccatcgactgtggtgccgcaacccgtgtggtcgtcgcctcctacagccgcaccgctcacggggtctccttctcccgcggctgcgccactcaagtggctcctgcctcccacggtcacgccgcccacgaggctattgccgcttgtggcttcgtcgccgttcgggttgagcaatttttgctcctcagatttaacggcagactccgtggaacctctatgcttcttcctatttctccgattgacgacgtgactaacccaatcagtcccaactggcttcttcctgtttctccgattgacgacgtgactaacccaatcagtcccaactggcctaggcatccccatggattctccaagctcgccctcatcttgaagttgctggaagaaggtgttagtgtgcaaggataagatcattttgaagcgaagagcaatggcaattgctaatcgggaaacagcaaattgacaatatttacttgcgtcagtgaagcagctttttcttttgacagacttcacactaggcaccagcagcatggccacgttagatttacttgcgccggtgagtactaattctttagaaaggcgcatccttatctgatctacgttataaactatgaactcattgtacagcaagctacccctttttgaaggctctgccttaggttttccaagtggaacaaccacaccatcatccgtgatcttcgactctgctgtgttcggttctgtttggccaactcctttcgtgcttagctttccctttggcaggttattggcatcataatctgcatttagtagctcattcatctcaccgagtgcaacctcacatagaagcagcacaccggacctgcaggcttctgaagcatagcaataatttgcactcttggaaaacatatcagcaaagtatactcctttcccaaacatgtagccagtaacaggtgcttcaggaggagcaattcgcaaaccttgagacagaatgccggcccagttagtcaaccgagaaccatgccataaaagcatcctattgcctgcagtagcaaatttctgaaaccgttccatttcaccatgccttgacaccttaaatatttgcactacgtcaacagtatagcttgtgtgcgtttttccatgggtatttgccaaatatgtttttatcatagagtattcttcagaaccaacttccaaaggtgtaaagtcacagctaagttgcttgtatcgagcatacaatggatcatcctggtcggttgaatcatcctccagaagcttggttgcaatctcaatctcaccaagggcttcaaccatttccagcttagcttttagcttctgaggagtgtcaataataaattcacgcattttcttaaaaccgaagtcatgagggatcacagtgtagaattccccagtcaattgttcaagctgtctcctgtctgccctcgaaataacattggaaatcctctttaaaacatcataacccttaaatattgtggatttacttagctttccaagaggaagtttatcagaattgtaacctatttccaccatttgctgcttcatcatgcttatgttgcagatgagggatatgaaacttgcaattcgagtttcaagtttcgtttcttttatctgatcagtgctgggactgactttcttgtttgtttccctgtctgcttcaccatagtccatctcaagccaggtgtatttccttgcatagcattcaaagctcttgcgatctgaccaatggttattggttttgccatggaactttccctcaaattcatatattgcttgttctcgtgatgaaaagggaccatgtagcttgtcttgaccccgtgcccctaccctcccccatctattgtaaaccatgaagcttcctccagcatcagattctaaggcttggatgatatagaacttattattgttgtctccaacattagtctggttcatggtggcatcatagatctcatcacccttcaataaaaaccacacttgcaagacatgataggtcatttttatatggtcagggatgtgctggtccaaaaccgcagcacctttccttgtggctgtaacaatcttctcctttctacactcctcaactctgtcgtcaccatcagcaaaaccttttgcgattttcttcttgtcctgaactccaccatccgtatcagaaggggcgcagagcagcctctcaataacctccttcttgctcccatttgctgcgagtcccctcgacttggccagtgcctggagctcacgatagctcatcccctccagcttcgccgcgtccgattcactgttatccacatcctctccatcaccgcgtcttttcctcttcctcttgtcctcgccattcccttcgccgtccaccacgccacctgcatctgcttcttccttcgctgctgcggacaccgcagcctcctcctcctcctctttccggatggcggcgtccagcctccgcacgagcactggcttgttgccggaggcgtcgaggccgcggcgctgcagctcggcgcggagctcctccacccgcagcctcgccgacat

SEQ ID NO: 71628 - DNA, 388 bp, Oryza sativa
  Clone ID: PAT_MRT4530_72084C.1
tttttttttttgaggactgctgtgtttgatgggttaagacttaatattgtgtgaaacaaactgatggaaagcataatgctaataagcaaatgaccttttcttcatggcaaactaattcttttttcccaagtggcaaactcctagaattgacctcttattgagttcaacaagcaaatgagaaatggccttatctatctgtcacatcccaattttcaattgcaaacatcattttcaattatacatatattactcacctctatgtctgcccagtgcttcattacctagaaaaaagaaaagaaaatgtcggcgagtgcttgtacgggtagcaactattatgcaaggggacatggagagctgttcctctgtgtttttttcctgaccaaagctt

SEQ ID NO: 71629 - DNA, 488 bp, Oryza sativa
  Clone ID: PAT_MRT4530_72085C.1
ttttcgagttcttaatgctcatgacatgcacaactattcgcaacagcagatccttcaagtttacacatgtacctataaatacagtttttggtcattctggcagaaaaagtttggatactggatgatcattgaaatgttgaattcatatccgcgtgagctactggataattttcaggtcatggacagctctgctgcaggagtaacatattcactgttatgctttttcatgactgacagtgtgataagatgcaatggctactgttcacattgttactgtcaaatggaaagtcaaaggatttcaggaatatatggtgatggaaaacaaggagaaggtttgtgacaagggtgttgtttgttccttgttgtctcattttatctagctaatgagaaacaattgtaaatgaactgactgatactgataggctgctggcaagaatctttttaagatgttgcctgcttacaggagatgcagatatcatgttggcagt

SEQ ID NO: 71630 - DNA, 1484 bp, Oryza sativa
  Clone ID: PAT_MRT4530_72086C.1
aaattcaatttagaaataacgaaaatcagcgtcgccggcaacttcacctatgccgacgcgagcagcgagggcagcatggtgaccgcctccgtgctcatgttcgtcctcgccggattcttcttcatcctcaacctcttcggcggcctctccaacgtgggcgccatactcagcccgcgtgtccgcctcctcttcacctccctgctctccctcttcctcctcgtcatgtcctacctcttatccgaggccaagaacacggccaaggagctcgaccaggtcaccaccgtcatcggcatcggccgcgcatcgtcgacggacctcccgttcatggcaggggtcatcctcacctggatgctcctcgtcgagctcatccgcaagaaggtggacgagatcgccatgaaaggctactcgggcaccatccaccgtgccggccgtgtcgtctggctcggcagcctcgtcttcgtcaacatccgcagcgccggccggaaggccgtgttcggcgtcctctgggttctctgcgccaccaaggtggtgcaacggatcgccttcaccgaggtcggcaaacgctcctacgcctgcgagtactaccactccgtcgtccccgtcgtcctggcctccccattcttcttcgtcgccaactacttcctcctccccgtcgtcgtcctgtgcgtctgcgtcatgaccatcatcctctgcggcggcggcgacgtgctgtacgcgttccggagcatcaagacggacaacttcaccatctcctcgggcatattcgacaccaccatgtgcctcctcctgaccgcgcatcactcggccgccgccttcttcgccaccatcaacttcgccgtcaccttcctcctctacatcatctacatctacgaggaggtgtgggagttgttcgtcttcctcctctccaactggttcgcggtctcgctgctctccgcctacgtcgccaagacccgcttctgcgacaactccgccttccgtgctttcgcccgctgcatcctctccgtccggacatggctgggcttccatctccatccccaagatatgatcaaccaattctccgcgctcgacctccgttggccgccgctcaccctcgccatgcccatccctctcatcaccttgctcgtctccaccaagcccgtccccgtccccgtcccagtcaagcactccatcctcctcagctccctcgcctccgcctccgcctccgcctccaccaagtctgcatccgtggtcatccgaggcggtgtctcctcggcgccctcgtcggcgccatcgccgccaccgccctcgtcatcgccgcctccttcgtcctccgcccgccgccgctcgccttctcctacgaggcgctggacgtcatgctctggtacggcaccaccgactacatcgagaccaacaccagcctcctcctcgtcggcctcgccgccgccgacgaggcggcgctgctcctgcagccgccgcgcaacgcgacggccgtggaggtgacggcg

SEQ ID NO: 71631 - DNA, 2103 bp, Oryza sativa
  unsure (1)..(2103): unsure at all n locations
  Clone ID: PAT_MRT4530_72087C.1
cagtaatttgacgccgcgagggcgggtggtttncgggccatttagatctccggtgcggcgcattgagcccagcgtgcgagggggcatggatctggaggccgcgcatggcgcggctgcggcgccagggaagaggaggaggagggccgtggcctgtgcttgtgctgccaattttgcatcgtcgtcggaagccaagcaatcaacagcggaacattctcgataatcatatagtgacatctactcagtttcctgcaagatgtgattatggttgagaaatgggtcatgattcatggagagacatggctcctcgaaagagagagccatggcgggcgacgctgctgctggcgtaccagagcctcggggtggtgtacggcgacctgagcagctcgccgctgtacgtgtacaagagcaccttcgcggaggacatcgcccaactcggagtgcaacgaggcagatcttcggcgtgctctccttcgtcttctggacgcttaccctcatccctctcgtcaagtacgttgccatcgtcctccgcgccgacgacagcggcgagggaggcacgcttgcgctctactctctgatctgccgccacgcccatgcgggcctcctcccaaagcatgaaggtcgccgacgaggtgctctatgcataaaggctgggggacccgcctgaagaggctgagaggactcgaatcatggcgatgcttgagatgcacagggcgctgcagagtcttctgctcctgctcgggctgctcgggacctttggcacaatcgaagtactctacttctcagcttcccttgtcaagtttcatgaaggcgcatgggtcccaattaccctctcctttatatttatgatagtcatgtgcgtgtggcattatggcactataaagaagtatgagttcgatttccaaaacaaggtttcagtaaactggctcttgaaccttggtccttcattggggattgtccgtgttcgaggcattggactgatacatacagaactggtatctggaattccagccatcttctcccacttcgtcactaatctgcctgcatttcaccaggtactggtttttctgtgtgttaaatcagttccagtgccacatgttcaacctgaagaacggtttctagtgggtcgcattggtccaaaagagtacaggctatacagggtcatcgtgaggtatgggtaccgtgatgtgcagaaggatgacatagagtttgaaaaggacctagtcagcagcattgcagagttcatccgcagtggggattctcaccacaacggtgttttggaggacacagacaagtcgtgtgagaaactgtcttccatcagtaatggtattccattgtggatggaggatggagaggtcgatgcttcagcatcccctcataaggagacagatacacagatcatatcaccaaaccgaaagaaagcaaggttcgtgctgccaaagaatgcccaggtggacagcgaagtgcgccgtgagctggagcaggtcccgcaggcaaggggggctggaaggtcctccagcttaggacactattgcaagaaggcgaggagcggctgtggtttcggaaagcgagtcgtgagcagccggacctctggctctgacgcggggcaggccggagtccccgcggcactcgtcttcttcctctcttccactgcatggaggtgtgtcacttctcggcggccctgccctcgtccgtcgacggcaacttccccctcctgcgcgctcatccccatggcccgccgagctgcaggagctcatggatgcaagggaggctggaatgtccttcatcttaggacactcctacatgaaggcgaagagcgggtctagtttcataaagcgaatcgtgataaacttcttctacgagttcttgaggagaaacagccgcggaccatcttatgctgctaccatacctcatgcctccacactggagaaacctttcgctgttgtggataccactgcgaaactggggaagttgcatcgccaaagggaagccttgcgtgtcctcagatttagcagtagcttcgtttttcctgtgtcttgggccaagcccaacagggccgacgggaaatcgaaatatgcagttatagccgtctgtcctcttttgtga

SEQ ID NO: 71632 - DNA, 250 bp, Oryza sativa
  Clone ID: PAT_MRT4530_72088C.1
gtgggaaacgaataaaatgggtatggcgaaaacatcatactctgctcaatcttcttagcgtgcacatgacccactcgatcgtcatctgggcgcactaagccctagttgcccaacccaaagacgacgaactcgctggccacaaatccatgcaaccacaattgaccgactggaagctactgtgccccacttcacttggccgagactaagttggtggcgcacgcccaggcgttggtgttgacggtgcttgcca

SEQ ID NO: 71633 - DNA, 600 bp, Oryza sativa
  Clone ID: PAT_MRT4530_72089C.1
atggccaagatccatggtcatccgaggcggtgtctcctcggtgctctcgtcggagccatcgccgccaccgccctcgtcatcgccgcctcgttcatcctccgcccgccgccgctcgccttctccgtcgccgacgcgaggagcggcgccactgacgagaacaaggcggcgttcctcaacctgaccctggtagccggcaaccctagcgggcgcgccgccgtggagtacgaggcgctggacgtcatgctctggtacggcaccaccgactacatcgagaccaacaccagcctcctcctcgtcggcctcgccgccgccgacgaggcggcgctgctcctgcagccgccgcgcaacgcgacggccgtggaggtgacggcgcggacgctggacgacaggtttgtgcaggagatcgtcgccggcgaagggaggagaaccgggctgtcgaaacatgaattcggcaataataaaagggggtaggtcgccggcgtcgtgtacaccaggccgtacaacgtcagggtgtcctgcagcgacgtctacttcgtcgtcgccgacaacaagagcgccgccgccgccgcttcgtctacgcccattgattgccatggctga

SEQ ID NO: 71634 - DNA, 281 bp, Oryza sativa
  Clone ID: PAT_MRT4530_7208C.1
agtatagggtgagcggcctggcctgcacgtaccggaattgaagtatcgagccagaccttactgctacgcgtccggaggacgtggactgcatcgactgatccggccacgagagcgtggtcctggatagatggacctctgtgtgaatggcgtcccagttgctagtgcaacatgctgattttcggcttcggactgctacgtgcgaatccgcaactgctccggccacagtcaaagcggcaacccgctgttactgtagccgtattgtaagcgccacgccgctgtca

SEQ ID NO: 71635 - DNA, 2045 bp, Oryza sativa
  Clone ID: PAT_MRT4530_72090C.1
ttttttgtcttgcttatggtggtctttcccccatcgtgctactcgcacgctaactcgagcgtaaacttgcccaggcagagggaataataacggatggtactacttgtactcaaactagagcgtagcacttgctcaagcagaggtgttttcttccttctgtggctgattgactactgtatagtatggatgtcaatttatgtcacagggaggagggcagaacagcctgatataccatgaagcaaaagaatccgcatctctatcctggaacttcctttccttgatctacagattctacagataaccttctcaatgcctacaacaagcaaaagaataaactagcaggaattaagggttcttggcctttatcctaagcttcctggcaatggcagccgctctcgggtgactgggcttcctgctgctgccatcgccactctgctccatctctacccagttgatcaccctcagtatcagcgactgcgggcagcagcagctactctgcttccgcccatccgccgtcgccgacgccttgctcttcttcttcaggccagtctccagcgcagcctccacgaagtccataaaccagctcgacgcctcacattgcatctgcttcgccagcctcaacgacgacccgagagcaccggtggtagtactaccagaagaagatcgcttctcgtcgccgtcttctccgatcttgtctagtacaaggcactttctgctggcgttggagctccggttcttgccgccgccgtcatccagcgtgcccggcgcgaacgacaccgacttggacacgcccagggctcctctcctcttggacaacgacgacctgttctgcgcaatctcctgcaagaccggcggctcatcggctgccacggcgccggccatcgaggtggccgcctggatcgactcgatgtcggtcacggcctgcacggcctcctggtggaagctgaggaagctctcgaagcaggtggccggtgcgtcgggcctcgccgtcttgctcaattcagcgaacatcttgtagatcctgactacgttgtccgtggcggaggcgttgcgcagcgcctcgagggcggccttctgagcttgctccctctgctccatggcttccggaacgcgagtgctcgtggacggcctcttcttggacgacgtcgcggagctgcagagctcatcatccgaagacggtgaggagggttcttcctccttgggcggcgctcttctgctcatcgcccgcgaagctgtgtagcagctcattgagatcttctcggcggggaatgggctcttggggatcttggggtggtcaggagccctgtcggcgacgaagctcttgctcctggtgatcctggggaggacgctgctgctcttcctgagggaggaggcggtgctccgcgccggcgagggcgcgggcggtctctccttgacgggcgtcctgtcttcgaagttgagcgtggtgggcttgatgaccctgggggaggcgaggattccggcatggttctcagggccccaggagcccctcctgggcgcggcgggcttggcgcgggtggccgggtcgggggtgccgacgacgagcgggtggcggccgggaaggggcctggcgccgacgatgacggggacgggggagcccgggtcgaggcggtcgaggtggacgaactggccgagctggagcttgttgctgaggacgagatcggcctgggggagcgggagggtggcgtagatggagtgggaggagtcggagaccttgacgtagaacttgccatggcgggggaggaggtccttgtcgtcgaggtcggcggggacgatgtcggtgacctggagcagcgcggtgcggtgctccccgacgggcttggctgcgccggccttcatgccgtcgagcagcttgaggaggaccccggcggatagcgtgctcatggcgggcggatcgatctgatcgtgattctgatcttgatccgatcgagcagaggtggagccgtggaggagagaattgggcgaggtggaggaggaagaagctggttgtgaggaggaggagcccgggtgccgatggcctcgtgccg

SEQ ID NO: 71636 - DNA, 2544 bp, Oryza sativa
  Clone ID: PAT_MRT4530_72091C.1
aataaacggaagggagggatcgagatgagcaattattactgcaactcatcctcaatcggaacaagcagcgtcgccggcaacttcacctatgccgacgcgagcagcgagggcagcatggtgaccgcctccgtgctcatgttcgtcctcgccggattcttcttcatcctcaacctcttcggcggcctctccaacgtgggcgccatactcagcccgcgtgtccgcctcctcttcacctccctgctctccctcttcctcctcgtcatgtcctacctcttatccgaggccaagaacacggccaaggagctcgaccaggtcaccaccgtcatcggcatcggccgcgcatcgtcgacggacctcccgttcatggcaggggtcatcctcacctggatgctcctcgtcgagctcatccgcaagaaggtggacgagatcgccatgaaaggctactcgggcaccatccaccgtgccggccgtgtcgtctggctcggcagcctcgtcttcgtcaacatccgcagcgccggccggaaggccgtgttcggcgtcctctgggttctctgcgccaccaaggtggtgcaacggatcgccttcaccgaggtcggcaaacgctcctacgcctgcggcaagaacccttggattatcacctcctacatgatgtccacctcgccgtcgctgccggcccaaggcgacgccatgctaaagggttgcaggtacatcgtgacgggagaggaagatgcgcgtgttgaagccaccgccgacggctacaagttgaaggaggacagcaagtcgtccctcgtcaccgtcggcaaaatctgggtggagcaagggctacctggaacgggaaataatggtggcgacgagaaggcggagctcaagaggctgtgcctctctttcgcgctatccaaactgctgcgacggaggctggagcagctgccggtgccggagccggagatgagcagcgcggagaccagcgagtgccgcgacgtcatcttcaacggcctctacaagagcggcgacgcggtggcggtgttcgaggtgatgaacagcgagatcaacttcctgagcgagtactaccactccgtcgtccccgtcgtcctggcctccccattcttcttcgtcgccaactacttcctcctccccgtcgtcgtcctgtgcgtctgcgtcatgaccatcatcctctgcggcggcggcgacgtgctgtacgcgttccggagcatcaagacggacaacttcaccatctcctcgggcatattcgacaccaccatgtgcctcctcctgaccgcgcatcactcggccgccgccttcttcgccaccatcaacttcgccgtcaccttcctcctctacatcatctacatctacgaggaggtgtgggagttgttcgtcttcctcctctccaactggttcgcggtctcgctgctctccgcctacgtcgccaagacccgcttctgcgacaactccgccttccgtgctttcgcccgctgcatcctctccgtccggacatggctgggcttccatctccatccccaagatatgatcaaccaattctccgcgctcgacctccgttggccgccgctcaccctcgccatgcccatccctctcatcaccttgctcgtctccaccaagcccgtccccgtccccgtcccagtcaagcactccatcctcctcagctccctcgcctccgcctccgcctccgcctccaccaagtctgctctagcgagcttcgacgagctcaagacggcgtgcgagaacggcagcatcgcggaggtgatcctcatatgccacatcgccaccggtctcctggaacgcctcaatcctccgcctgatccggaggtgatgatcaccgagtccgacagcaagcggatgagctgctgcggctgtccgaacaagaagaagaagaacactagtagtgacaatttcaccgtcgcgacgacgctgtccagatactgcgcgtacctggtggcgttccaaccggagctccttccggactaccatgagaaggcggaggatctgttcaaggccatgaaaatggagctcaaagacaggctcggatgttaccactactacttctcgtgcggccgtgagcgagccgacgccatcatcaacaacatcaacagcaagaataacaacaaggagggaaccgtggacaagggcgcagagttggccaacaagttgctagaaaaatacacgaatgatcatgattcgatgtggacgcttctggcggaggtgtggacggagatcatcgtgtacgtggctccgtccaacgaggagcgtactatcatggcgcacaagaatgtgctatggcagggaggcgagttcatcaccgtgctttgggctctcatgactcacaccggcattacccgacaccgccgcctccgcgaaatcgctctcaaaatttcccaagacgacgccagcacgtcgtcgtcccaacaaaaatccgcaccggaccggatcgataagcagcacgaaatcgatatccatcgtcactagctaatgtgtgtaaatttgcttgcttgcttgatcgattgattgcgtttggatgcgtgaatgtgt

SEQ ID NO: 71637 - DNA, 618 bp, Oryza sativa
  unsure (1)..(618): unsure at all n locations
  Clone ID: PAT_MRT4530_72092C.1
ccgccggccgggaccgtgtgctcagtgttcatcttctccaaaacttcaatcaggttgtccctctgatctcctgaagaagaatggattcaatccagaggcaggactcctttgatgacttgattaacctcgccgacgatgtggttgtggaggcgcctactctctccagcgaggagatggaccgtgcaaggagggaggctctggagatactgagaaacaactcccctgaagaggctttcaggattttcacccagggtttaatagggcaggtggttcagagccctgtggtgggcaatgctactactcctcctactaccaatcaggccgtgaccgtgagcgtccctcccaaggccggcgacggcgagcccaagaccgcaccccgtcctccgaacaactgaccgagatcgactcgcggccggtcgggtcgagaagcctacctgctcctgcggtgcgtgcgccgtccagctcctctacccgctctgtgcctgagaataatcgtgtctagtgtgctgaacaccagccgtttcctttagagaagttaaaccatgtttgcttgttttggccgccccaaaaaaaaaaaaaaaaaacccgcggccnnnnnnnnnnnnnnnnnnnnnnnnn

SEQ ID NO: 71638 - DNA, 463 bp, Oryza sativa
  Clone ID: PAT_MRT4530_72093C.1
atggagggatatataaacctaaccctagtttctcccacacctcccaatctcctcccagccgccaccctttcctcccggctcccgcgaccaccacgggggcggggcccgcgtgcggcggacggcgacggcgacgacgggggcggggccgcgtgcggcggacggcgacggcgacgtcgggggcagggcctcgtgcggcggacggcaggggctcggcggcgcgaggcgacgacgtgcagcgaacggcgacaagcggaaccagccgcgccggcctcggggcggccgggtcgtggcgacggcgggaactcgacagcacgaggcgacggcgtgtggcggacggcgacgccggactcggggcggccggatccggggtcgacagcccagcagttgcgggattcgacgtcgtgaggcgacggcgacggatggggctcggcggcgcgaggggacgacgtgcggcgaacggtga

SEQ ID NO: 71639 - DNA, 1472 bp, Oryza sativa
  Clone ID: PAT_MRT4530_72094C.1
tttcttttctagcagaagaagataattaacctgctcatttttgtatgtgcagaaaaatcaaaacaccgaccaaaagcaaaaaaaacaacgtccgcgggtgtagagagttgttgagttgggtccgcgaatcgtggtttcccactagcaagcgcaagcgcaggcgcaaacgcaaacgccgccgccggtatgccggagcacgggtcgaagcccgacatctccttcgccggccgcttcaccgcaagcgccatcgctgcatgcttcgctgaggtgtgcacgatccccctggatacggccaaggtgaggcttcagctgcagaagaacgtggccgccgatgccgcccccaagtaccgcggcctcctcggcaccgccgccaccatcgcgcgcgaggaaggcgccgccgctctctggaagggcatcgtcccgggactccaccgccagtgcatctacggcggcctccgcatcggcctctacgagcccgtgaaatccttctacgttggcaaagaccatgtcggggatgtgcctctcaccaagaagatcgctgccggcttcaccactggtgccattgcgatcagtatcgccaaccccactgaccttgtcaaggttaggcttcaggcggagggcaagctggcgcccggcgccccgcgccgatatgctggggccatggatgcctatgccaagattgttaggcaggaagggtttgctgctttgtggactggcattggacccaatgttgcgcgcaatgccatcatcaatgctgccgagttggccagctatgatcaagtcaagcagactattttgaagcttcctgggttcaaagatgatgtggtcactcacctcttatctggtctgggcgcgggcttcttcgctgtctgtgttggttctccagtggatgtggtcaagtcaagaatgatgggtgactcggcctacacaagtactattgattgtttcgtgaagacgctgaagaatgatggacctctggcattttacaaaggcttcctcccaaactttgctagactgggatcatggaatgtgataatgttcttgacactggagcaggtccagaagctgtttgtgaggaaacctggtagttgaagattataacacatggtttttgccatcgtggaaaaagaggatgcgtacattttttttttcttaatcttctcttacacaagaagcaacggttaacatcctccctgagaattggggaacaaggaagaaacttgaatgctcaattgtgagaacgctgttgagtaataaatcttagcgggcctttgcatgacccctgacagaattggtgtagtgccttttttttgtggagaacctctcaatttgtggaaaatgatgaaagatgagctgcagaattgagctcggttgagactttttttttcttttccgattggaatatggcctggttggttctctgttgtctacatcgtaaaatgttggtttactggcaaaaaaaaaaaaaaaaa

SEQ ID NO: 71640 - DNA, 600 bp, Oryza sativa
  Clone ID: PAT_MRT4530_72095C.1
atggcgccagaagagcagtcaccaacggccttctttgtcgtggttgcgtggggagacgaggaggccggcgaggggaagaccctgacagcggcgtgggccaagctggagctcaagctggatcggatgtcatccagtccatcagtggcgacgcgcggctttgcggtgtacagcgtgaggagcaagatggtcagcggtgtcgccgacgtcgagtgctccggcgtgccgtgcgcgcgcaccctggatcccatggagcaggaggcagtcaagctgtctccgtcgggccgcatccgcaaccgcacgccctcctcccccgacctcctcatcccgggcgccgacagcgatgccaagaacatgaggtggggccccgtcgacgccaacaagtgcaccgtcatattcgacgccgggagctccgggagccgcatccacgtctttcgattcgactccaacctggatctgctcgccttgaggaggaaggggaaggtgaccaccctcttttcccctctctttcaatcctctccggtggctcccacgcacgtgcgcgcccgagcaggatgcggcaggcgtacgatggcgcgggccaaggcgacggcggcggcctga

SEQ ID NO: 71641 - DNA, 105 bp, Oryza sativa
  Clone ID: PAT_MRT4530_72096C.1
atgatgttaaaccctgaaggtgggaggaaaatcagacaaagtgaggagaaacatgtatccatacaagaatcggttgtgaacttcatcaaaatatctgtgaattag

SEQ ID NO: 71642 - DNA, 539 bp, Oryza sativa
  Clone ID: PAT_MRT4530_72097C.1
agtggatccccgggctgcaggatggaactgggcgagcaagaatcctttcgggtacgcctcgcccgactccaccaagcagaatggtcattcagagtgatcaacgccgattggtctgtgtgaactcagttgtacatgcaacgtagaactacaggtcgagatcgatgtagatctagtcggtcagtcatacagagaaagcttagaaaagatttgttctcttcttttggaccagtattggtataggtctacccttctgcatatagatcaaaattgttgtaggcgcatggctatagtcagtcagctaattcaattctttttcttgctaatttagtggcattgccttgcacagtacttgatgcagattcctgcatcaccaagaatgcagctgtatacggattttgtatctgaaatatgaatggatagaaccacagttatacattaaaaaaaaaaaaaaacaaacaaacaattaataatactgcgctcccgtattttgaaaaaaaaaaagaacttacgtctgtgcaacaaacttttgcatattgctt

SEQ ID NO: 71643 - DNA, 293 bp, Oryza sativa
  Clone ID: PAT_MRT4530_72098C.1
cagcaaccccccatatataatgacaggttaaggaggctttataaataagtctcgggggttccagacgagttatgaaattagttttttcattcatgtacgaaaacccctttctacatccgatggggcacttaaaaatttttttttcgcgaactaaacacacccccaatttacagggagagattgggaatgaaatgggatcccagcatttttctgactaaaaggtggggaagaccttagaaaaaacatatagggatttgcttcgtttatgtcattaggcaagaacggcctgttat

SEQ ID NO: 71644 - DNA, 633 bp, Oryza sativa
  Clone ID: PAT_MRT4530_72099C.1
atggagtgtgagatctgggagggagcaggggaggaggaggaggcggatctggctgggaaggaggagaggctacagccctgcctgagccccagaggatatgacgaattgaagaagtctgaaatggtggagacggttggcaagtctgtgaggctaattgaaaaatggagctctggcttcctggagacctggacggagtacttttctcaggacaaggaaatgctagctgaaggcctgcctgaagctgcactacagacttttccttacgatcactcatgggcattagcagaacagcaggccaggaaagcatgtaaaggccacgatatcttgttcgatggagtgctactagactacgacatacacgccgtcgctacctggggtcccggcatctcgggccgtcgggcgcccggcgttgcaacctgcacgggccaaggacgaggcggcagcggccacatttccttcgcgtggcgaggatggagacaggatcgaggggacgacggtgtcaacagggatgatcagtcctcctctgcacaaaagcgtgggcggggtggcgatggcggtggaggggcgaagatgacagggtcccacttcctccacatgattcccgcacggtggagcggcgggtcctgtcgctag

SEQ ID NO: 71645 - DNA, 234 bp, Oryza sativa
  Clone ID: PAT_MRT4530_7209C.1
actaggaattaagaaacaccatctttgtatgtcgaaagtacagcgggcgcgatcgaagggcacaatgtgcaactgtaaatgacggctaggctacatggatagcacggctacccattctgaacatatccggcatgaggcaagtgctgttattgaatcgctcttcatatgcaaggattacttgtacaggcgcaaagctcataatcatgtagctggagattcacatccgctgtgtag

SEQ ID NO: 71646 - DNA, 382 bp, Oryza sativa
  Clone ID: PAT_MRT4530_720C.1
aagaacacttgttgatttcgcaatcagttgcgagttgcaactgggtacattttccggacgaacatccgtcgaccgctttacgaacacagggtttaacaccagcgagcacgttaattacgtacccctaatgaatactttagaacccactagtgctcttgttttgctttggcactggggtccccaaatcacaattactacccactaaatttaacctgcccccaaatccaccgactaattagattaagacgacgtcgaaatagtgatgctattatctgggacgatttgtttgatcaaatctcccaaaagaaggtagtagagcctagagctggccgtaggagtgggcgaggtaggcgagcgctccgacgagcggcgcgtttgatgt

SEQ ID NO: 71647 - DNA, 1491 bp, Oryza sativa
  Clone ID: PAT_MRT4530_72100C.1
atggatcgcgcccgcctcgccgtgctctccgcccacctcgcctcccccgccgccgcctgcggggaggcggacgcggcggggccgctggagaggtcggcggcgtctgcgggggcgcgaggcggcgcgctggcggtggtggatgggaggacggggaagaggtacgaggtcaaggtgtcggacgaggggaccgtgcgcgccaccgacttcaagaaggtgtggcgatttctaattgttatcctggttgacttcgatgaggtcgcagcttacccattaccacttggaaaggacgacaagggtcttaagatctatgatcctggttatctcaacacagccccagttcgctcatccatctgctacattgatggggatgagggaattcttcgttacaggggatacccaattgaagagttggctgaaagcagctcatttgttgaggtggcctacctcctgatgtacggaagtttgcctacccagagccaattggctggatgggaatttgcgatttctcagcactctgctgttccccagggactcttggatatcatacaagcaatgcctcatgacgctcatcccatgggtgcccttgccagtgcaatgagcacgctttctgtcttccatccggatgcaaaccctgctcttagaggtcaagatctttacaagtcgaagcaggttagggataagcagattgtgcgagtacttgggaaggcaccaacaattgcagctgcagcgtacttgagattagctggaagacctcctatccttcctacaaatagtctctcttattcagagaacttcttgtatatgctagactctttgggtgacaaagaatacaagccaaatcctagacttgctagggttctagatatcctttttattctccatgctgaacatgaaatgaactgctctacagctgctgctaggcaccttgcttcaagtggtgttgatgtcttcactgctctttctggtgctgttggagctctatatggtccactgcatggtggtgcaaatgaggcggtacttaaaatgttaaatgaaattggaagtgtggagaatattccagatttcatcgagggagtgaaaaacaggaagagaaagatgtcaggttttgggcaccgtgtttacaagaattatgatcccgttgctgttgcgttggagaaggcagcattgtcagatgattattttgtcaagaggaagctgtatccaaatgtggatttttactctggcttaatatatagggcaatgggattccctacagagttcttccctgttctgtttgcaattcctcgcatggctggttggttagcacattggaaagagtcacttgatgatccagacactaagattatgaggcctcagcaggtatacactggtgtttggctgaggcattacacacctgtcagagaacgagtcccagcaagccagggcgaacagcttggtcagattgctacctctaacgcaacaaggcgtcggcgtgcaggttctgccctgtaa

SEQ ID NO: 71648 - DNA, 249 bp, Oryza sativa
  Clone ID: PAT_MRT4530_72101C.1
atgcaaggattccttgacgtccccgccgcccaagcgccagactcgaccacccaggacaacttgccgccccggcatgcctggccgctcacccctgtgccgcccgctagtcactgctcaaccccgctctggaggatgcacccccgtaggaggatgcgtcccagcttgacgacaggggagcatgagccgcctccacgacacggcggacttcgatggatgctgaggcggggtgccgatgcggctacggaatag

SEQ ID NO: 71649 - DNA, 1997 bp, Oryza sativa
  Clone ID: PAT_MRT4530_72102C.1
gatcgactgaactggaaaatcttcttcaaattttgcattttcatagtttctgcccagagatatcctttcattctccatgcttgggagaattcaagttaaagagaaaatgtacattgggtgagcacgattacaacgcacgcctcagtgctctctggtgtggcattattagtttattacccatatatacgtgaacttgacaacttaagacttacagctcccagattcatgcagatatgtagacttgttagcacagggatgaagctttgcttttattttgtacgctggatgctgtaccttgaagctatcttacagggcagaacctgcacgccgacgccttgttgcgttagaggtagcaatctgaccaagctgttcgccctggcttgctgggactcgttctctgacaggtgtgtaatgcctcagccaaacaccagtgtatacctgctgaggcctcataatcttagtgtctggatcatcaagtgactctttccaatgtgctaaccaaccagccatgcgaggaattgcaaacagaacagggaagaactctgtagggaatcccattgccctatatattaagccagagtaaaaatccacatttggatacagcttcctcttgacaaaataatcatctgacaatgctgccttctccaacgcaacagcaacctcgataagaggatcccgtccgacaatagagaagacctcctctgctagctttcggatgactttagcacggggatcataattcttgtaaacacggtgcccaaaacctgacatctttctcttcctgtttttcactccctcgatgaaatctggaatattctccacacttccaatttcatttaacattttaagtaccgcctcatttgcaccaccatgcagtggaccatatagagctccaacagcaccagaaagagcagtgaagacatcaacaccacttgaagcaaggtgcctagcagcagctgtagagcagttcatttcatgttcagcatggagaataaaaaggatatctagaaccctagcaagtctaggatttggcttgtattctttgtcacccaaagagtctagcatatacaagaagttctctgaataagagagactatttgtaggaaggataggaggtcttccagctaatctcaagtacgctgcagctgcaattgttggtgccttcccaagtactcgcacaatctgcttatccctaacctgcttcgacttgtaaagatcttgacctctaagagcagggtttgcatccggatgaagacagaaagcgtgctcattgcactggcaagggcacccatgggatgagcgtcatgaggcattgcttgtatgatatccaagagtccctggggaacagcagagtgctgagaaatcgcaaattcccatccagccaattggctctgggtaggcaaacttccgtacatcaggaggtaggccacctcaacaaatgagctgctttcagccaactcttcaattgggtatcccctgtaacgaagaattccctcatccccatcaatgtagcagatggatgagcgaactggggctgtgttgagataaccaggatcatagatcttaagacccttgtcgtcctttccagtggtaatcttcttgaagtcggtggcgcgcacggtcccctcgtccgacaccttgacctcgtacctcttccccgtcctcccatccaccaccgccagcgcgccgcctcgcgcccccgcagacgccgccgacctctccagcggccccgccgcgtccgcctccccgcaggcggcggcgggggaggcgaggtgggcggagagcacggcgaggcgggcgcgatccatcggcgaggagagcagagcagagcagaggtgggcgcgggtggtggttgcttggacgactcgtctgcgttgggttgcaggttggggtttgtttgggtttggcttccgctttgcgggaattatcgagtcgtggatgctgctgctgttattattgtgggcggacggcgtgggtcgacccgggaatccggaccg

SEQ ID NO: 71650 - DNA, 458 bp, Oryza sativa
  Clone ID: PAT_MRT4530_72103C.1
gaactggaaaatcttcttcaaattttgcattttcatagtttctgcccagagatatcctttcattctccatgcttgggagaattcaagttaaagagaaaatgtacattgggtgagcacgattacaacgcacgcctcagtgctctctggtgtggcattattagtttattacccatatatacgtgaacttgacaacttaagacttacagctcccagattcatgcagatatgtagacttgttagcacagggatgaagctttgcttttattttgtacgctggatgctgtaccttgaagctatcttacagggcagaacctgcacgccgacgccttgttgcgttagaggtagcaatctgaccaagctgttcgccctggcttgctgggactcgttctctgacaggtgtgtaatgcctcagccaaacaccagtgtatacctgaagaaagaagaagcggacgcgtggg

SEQ ID NO: 71651 - DNA, 265 bp, Oryza sativa
  Clone ID: PAT_MRT4530_72104C.1
cagccgccgccgcctcgtcgccatgagcacaaaccgagaatccgtcacgcctccgacggtctctccccgcggctctgttgcgtcctgattgggggacgtcaagtacgagtcatgcaagaacgcagagcggcagagagagaagaaagtcaacatttcagaaaggacgggcgtggaggccaaggaacggaagggcggctggcgattacgttccgacaaaccgtggtggggcccggcttttgttgaatatcagtccatatgccactag

SEQ ID NO: 71652 - DNA, 1488 bp, Oryza sativa
  unsure (1)..(1488): unsure at all n locations
  Clone ID: PAT_MRT4530_72105C.1
ttttttttttngnttttggttttttttttttttttttttttcactgggatttttggtggctaggtgggggttattccttttgttctaaacagtttcattttgttcatttcacttttgttatacacaaacatttttcatatggactagaattaccatgtaatatagtgaccttttcggtatttacattctcctatcatttcatccatgcatcttcctaatttttttcaccttgctatgatgctccgaaagctccaatgctaagtgtctatatgttgcagaaatgtgttgtagacagtgaagactactactccagcgtgaagtcgtttaaccatatcagcacctcattcctcattataaagctctgtgttctaggatcattgtagcgtgcaagcaaacaaccatgttgaggcttcaacacatctttgagtaattgggagcgcagctccttttctttctggatcacaatttcctcttttggtctcccactgaattttttcactgcagcaatgccaccttctacctttcgcaagttgacagcttccgtgtttggagctggtaagctgtccaagtctttgttcatcggcaaaactatctggatggatacatctgagagtttgtcatcagaagcctgagtgaagacaggtgtagtcattgcaatcgtttctgaagaagcattcttgccaaaaatatacccagttacattattaaaacctgatgatccggttagtttatctccttttgcttcaactattaagaatggtggataactcctaatctcatagtttgccgtccttttcaggataaggtactttggtgtttctatatcaggggtcttgtaaatccgtagctgcttgaagacatcccccagtccttcaaaagaaaaatattcattattctgtattgagtcccaaatatccacgtggctacagaacttgagattctgagggttgacgcccatgatcgagaggccagtgaagaccagctccggcttccacggcagtagaacgaacttcatcaccatggtccacctcgtggtgatctcgtacggccctgtctgctcgacgtggtggaggtagaagtcgggacggaagaggagcttgaggaggcggatgttgaggaggtagccgtcgatggtgtcgtggcgggtgatggggtcgcggaagcggacgcggtcgtcgtacgccgagcggtcgacgccgacgtcgtcgaacaggtgggggaggtcctcccgcaggaactccgccagcctctccgcctccgccgccggcagcccgcccttctcctcctccgccgccgcgggggctaccgcctgtaccgcgaggcggggcctccgccccctggaggatagggagtgcgctgcggcgggtttccgctgccggagagaggcggcggcggccggcgccggtggtgggaggatgaggaggcgggagaggagggatgtggccgccattgtgccccccgtgccgaattcctgcagcccggggatcc

SEQ ID NO: 71653 - DNA, 3188 bp, Oryza sativa
  Clone ID: PAT_MRT4530_72106C.1
ctgtgaaggtccgtgtatgaggtccttccatgcaaaaataagagatggtgaagattcttactgtgcaaccctagggtacacaaaggcagaagtcaaggcactaaaaaattttgtgtgcaagaattgtgaccataagcagcaccaatgctttgtctgtggagagttggagccttcggatgggccaaatgccaaggtatttctctgtaataatgcaacctgtgggcatttctaccctacacagaatcatgatgtcaataataagaactacacatctggaaacgggaacttcactgctgagaaaccagtacaagcagacgccttccctccagaaaagctagtagaagttgcatacgaggaaatgaaggttgcttctaacggaagcagtatgtatcaatcagatcaaattagtgttcatgatgagagagatgcacattctgacttgccgatgtctcggcacaacagtatgaaagcaaaagaggtttcaaatagctcaagagacagaaggaaatcagataacacaggacaggaagcagataccgatctgagtatctggaccccagattccaggaattttctgctccaaccaggcaaaattgaacctcaaatatcaaagaaaaatggaaataacttggagaggtagagatgtcatgatagtcattacgaacatgttgttggaccatcactcatcatctagccttcaaatgccaatctttgtggaaagggagacaaatctaataaatcaggttggaaaagtgaatttgaagaagttctttaccctgaaaagaaaaaaacaaggagcctgaaaaagagaacacagcctgaagaacctttggttgagtgtgctgctggtgcttctgcaaacaatgcaaatcgccgtatgaaggagcgacagtaggagttagggactgcagcattggatatgggaatgatacctcttagctctttacctattgtggatagtgaaacttacaagaggatatcagctttggtagaaaaggacatctcttccttaccacaggctgaaatgtctagaaagcgtgttattacttcaacttatccttgctcttgccggcaacttgacaatattgttgtaggaggctcgcgtgagagtacaattcaggcactataaactgatttacaaatactggaagatggcagagcagttgatgtcgtcaacacggtacctccgatcacaagcttgcgagtatttactcttcggggtctccagatgcgagatttgcgcaccacccttctttcacttcatatggaatgccttcttgggggtcgacagggaggtcgatgatggataggtatagtccctccattgatgaaacaagctataggactggccaaagaggcccatacaatgcttctgactttcggagggatcggcatcctgatgacatgaattttgctctccataaccagtatccatacccacatccaggttcctctggtggctggcacgactagtaactgaacttttgatgttcacacagaattatggtctggcatcctctggcagatgtaatataaacaagataataaagagatgatctagaggatgcaaagttttaaaaggtaaaccatgtgtaggaatgtttatgtaggttataccatttgtcgttctttgagcttttggaatacccattttgtttgcatttaatgtacaaaaacttaccttttgttttgaaatggaacctttttcgtgatatgatttggtatgggaagatgatcaaagactttctgggaagtcattctatttacctggttctttggatgtgagtgacaaacaaattgaccaatggaacaaatctccacccccactctatttgtggagtcgccctgattggacacagaagcacaagagaatagcagaacagcatgggcacaccaaagccaatgttttctcccataatgaagaagatttggtttatctttttgaggatagagctacacagaatcatgatgtcaataataagaactacacatctggaaacgggaacttcactgctgagaaaccagtacaagcagacgccttccctccagaaaagctagtagaagttgcatacgaggaaatgaaggttgcttctaacagaagcagtatgtatcaatcagatcaaattagtgttcatgatgagagagatgcacattctgacttgccgatgtctcggcacaacagtatgaaagcaaaagaggtttcaaatagctcaagagacagaaggaaatcagataagacaggacatgaagcagattccgatatgagtatcttgccctcagattccaggaattttctacacaaatcaggcaaccttgaacctccaatatcaagtagaagtggatataccttggagaggttgagatatcatgataatcatttcgatcatcttgtaggagagcactcatcatctagccttcagatgccaatctttgaggacagctatttcagatctgtgaatgaatatggagttgcatctgtagaaaataacattgccctttcgactgataatgttggtgccggctcaaggatgtatagtcctgatccagagctgaacgggtatgctgttgatcctactgttaatgcttatggttcagtatctggtggaaccggtggcagcttttacaggaggcagaacctcgaggattacaccatggacagtagtgagtctgctcagatgaatccagttcctggtagagatgtgcaggaatatgcaagaacatactatggacacaacagggatgaggttccccaaacagcaattaacacaccttccatggatattcgaacacacataagaatgtacggcaggcacatcagggatgatcatacccaaacaaccatgaacccacctgccaatgatattcgggcacagataagaatgtatggtcaacacgctacctccgatcaccagcatgcaagtagatactcttctgggtctccagatgctagatttgagcagcaaccttctttcacttcatatggaatgccttctttgggttcgacagggaggtcgatgatggataggtatagtccctccattgatgaaacaagctataggactggccaaagaggcccatacaatgcttctgactttcggagggatcggcatcctgatgacatgaattttgctctccataaccagtatccatacccacatccaggttcctctggtggctggcacgactag

SEQ ID NO: 71654 - DNA, 175 bp, Oryza sativa
  Clone ID: PAT_MRT4530_72107C.1
ttgctttgtgaaggaaaagagaccgagcgtaaggaatgcatggatgatcaaagaagttgattggggggcaaaccaagaccttctccaagtccactcttacctcaccacgtcaattttggtccataaaaggcaagagataaagttctacacgttttggattcggattcgggccacc

SEQ ID NO: 71655 - DNA, 495 bp, Oryza sativa
  Clone ID: PAT_MRT4530_72108C.1
cccacgcgtccgcccacgcgtccggcacccaggactgttaagaatgcatccccctgggccatgtcggtagcatcggccacaatagaccgtgctttccccactgttatcacactttccgacagcaccagtagctttgtgggtcaatctttgttctatgatacagatgataagattgacaactggtatgaagtctatcagtctagctgcctttttgggactccggaaacgtcaaatgtaactcttgctgtggggaagattgtgctttgcaacagtcctaactctgtgagcctaatttcaccaacaattcaaccggtttggaacattttgcttgctgtaaatgctttgaaggaggctggagcaaagggaattatttttgccgcatatgcttttgatatattggacgttgttgaaagttgtggcagcatgccttgtgttttggtggactttgaagttgcacaacagataaaacaatctgctgatgaaaacaccgcactg

SEQ ID NO: 71656 - DNA, 1176 bp, Oryza sativa
  Clone ID: PAT_MRT4530_72109C.1
ctcggacttcttgttctttgtggtgctgccaattatggttaggcagagcgagctatgctagcgtgtgctcattctgtgctggcgttttgcagtacaaggtcgcgctgctgcagctgccggtgtcgccgcgcaaggaggagaacatcgcccgctcgcgcgcccgcctcgacgccgccgccgccgccggcgccacgctcgtcgtcctcccggagatatggaactgcccgtactcgatggagacgctgccgagccacggcgaggacatcgacggcggcgcgtcgccgtcggtctcgatgctgtcggaggtcgccgcccggaggaggatcaccatcgtgggcgggtcgatcccggagagatcatccgggcggctgttcaacacttgctgcgtgatcgggccggatggacagataaaagccaagcacaggaaactgcatttgttcgagattgatatcccaggagacatcactttcagagaatctgacacattcactgctggtcaagagcctaccatagttgacactgatgttggacggattggcattggaatatgtcatgacatccgatttccagaattggcaatgctgtatcgatcaagaggtgcacacttgatatgctatccttctgcgtttaacatgagcaccgggcagcttctatgggaccttatgcagaagtccagggctgttgacaatcagttgtttgtggtgacctgctcgccagctagagaccctaatgcagaatcggactacatgatctggggccattcaagtcttattggaccatttggggaagtcattgcaacagcagggcacgaggaagcaactgtcgtaggtgaaatcgaccattctatgatccaaacaataagggataacctccctttggaaatgcagaggagagaggacctgtactccacccattggttgatgtcaggagagaatctgcaggccacaagacatgcgccgcttgaccaaatgcacaactgcaatgaggtgaaaatggctttacaaccgtggaaatgacgaccagcttagctgtttgggacccgtcagtgcatgctgctgttttgaagctttttctgaaagatttcttttgacgttgtaattttttgaaagattatgtaacaagattgtactgtcatgatgacatgcgcataatctttcaaaaaaatgattttgtttc

SEQ ID NO: 71657 - DNA, 273 bp, Oryza sativa
  Clone ID: PAT_MRT4530_7210C.1
atggcggccgggcgcgggctggcggcggctaggcgcgggatggaggacggccggcggaggcccggtgcgggccggcgggatggaggccgatcaccggcggcctcgccctcccctcccccagatccggctggaggggaagcggcgggatgggtggctggccggcggcgggatgggaggccggccgtacgtcatattatcatcttaccgcaaaagatgtgcccacaatctagggacggtttcgttgcttgccaaatattgccacactacaattag

SEQ ID NO: 71658 - DNA, 1421 bp, Oryza sativa
  Clone ID: PAT_MRT4530_72110C.1
gctccagcacgcggcagtacgagtacaccaagcccgatcgatctccattgaaatcaaggcaccttaataatttctagtaccatattaagctaagaacagtagtgtacatggcttctcgtagaagtgcagcagctagtccggccatggcagcagcagctgcggtagtagctgtatctgtatacttgctggtgtgcagtgctccggcggcggcgacggcggcggcggtggcgaagaagccgtcgtacccgccggtggcgaaggggctatcgttcgaccactacaagaagagttgcccgcaggcggaggccatcgtgttcagcttcctgcgcgacgccatcggcaaggacgtcggcctcgccgcggcgctgatccggctccacttccacgactgcttcgtccagggctgcgacgcctccatcctcctcaccaagacgcccggcgggcccgacggcgagcagcaggcgatacccaacgagtcgctgcggccggcggcgttcaaggccgtcaacgacatccgcgccctgctcgacagggcgtgcggccgcgtcgtctcctgctccgacatcgtcaccctcgccgcccgcgattccgtcaaactggccggtgggccgtcgtacaaggtgccgctcggccgccgtgacggcctcacatcggcgacgccgtcacaggtgctgggcgcgctcccgccgccgacctcccacgtccccgagctcatcgccgcgctggccaagctcaacctcgacgccgccgacctcatcgcgctctccggcgcccacaccgtcggcatcgcccactgcacctccttcaccgggcggctgtacccgaagcaggacggcaccatggacaagtggttcgccggccagctcaagctgacgtgcccgaagaacgacacggccaacaccaccgtcaacgacatccggacgcccaacgccttcgacaacaagtactacgtcgacctgcaaaaccgccagggcctcttcacctccgaccaggacctcttcgtcaacgccaccaccaggccgctcgtcgccgagttcgccgtcgaccagtcggcgttcttccaccagttcgtcttctccgtcgtcaagatgggccagatccaggtgctcaccggctcgcagggacagatccgggcaaactgctccgtccgcaaccccggcgccgcctccgccgacgaggagctcccgtggtccgccgccgtggagaccgtcgtcgaggcggccgagagcatcgtgctctagacacacaattgtgcgcgccatggacgcgtacgtcagtacgtgtaccgtacgttgaatgtggaaagagacgacgacgactgtggatatatgttggttactgccatgtcgaataaatgcatgacgtcatgacaacctcctttatgatcaatatatatggatgtggattttcatcttgcagga

SEQ ID NO: 71659 - DNA, 123 bp, Oryza sativa
  Clone ID: PAT_MRT4530_72111C.1
atggtggatgcagcagcagtaggcatcgatgataagtcagaacggcctcagcaaatacctttgctagagatgaagagaggatggttagcttaccgctacagagaacgaggagtactggaataa

SEQ ID NO: 71660 - DNA, 392 bp, Oryza sativa
  Clone ID: PAT_MRT4530_72112C.1
aaactattcccaaaaatgtataattagtttacactttacagtccaattcatgtactctagcaattcaatagccaatttgtttggattatagcctacatctctcacatttctggttgcattctgattggcatactgatttcagcatatactttgttttaatttttttttgctggcctgtaaattcactgcacgcctcttttcatttagtagttatttagtttaccatttggctgcaatttaatacatgctatgctgtgcaccatcttgcaattctgaatctgagtaacccaattgagcaattcactcttcaacttgtgtttgggacatacaatttaaatttgaaagagattcatacgcaacaattttattcactactggttgacagataagat

SEQ ID NO: 71661 - DNA, 324 bp, Oryza sativa
  Clone ID: PAT_MRT4530_72113C.1
ctagtggatccccgggcgcaggaagaatggagagtcctgcattaaatccgagaaagttattaagaggataggttgttggattgaaatatgcctatcaaaaataaattttttatatttagaaatatgcctatcaaaaatagatggagggagtatcacataggctaatcatggattaattatgcttaataaatttgtctcgcaaactagtctaggattatggaatggattttgtcattagtatacgtttaatacttctaattagcgtcaaacatcagatgtgacgggaactaaaatttagttcttgatccaatcagggcctcaatt

SEQ ID NO: 71662 - DNA, 558 bp, Oryza sativa
  Clone ID: PAT_MRT4530_72114C.1
ttcaccgagaccaaattgcacgtcggcgctgacatggccctagcactcctcggtgggttcccttttattgctgcaccgacgccgctacaagatcatggttgggccctcggtgacgacggcgagagctcccctgctcccgcgtcgtcgtcgtcgtcgccgtcgccgccaccgccgccacgtcgccggccgccagacctcctctcccgcgtcgcccaggtagtcttcctcctcgagttcgtgctcggcgagatcaaagataacgctttcgtctctcctgacagtatccggagataccgtaggggactagtcgtgcttatctccgaaatcgatatctggcgtcttgtcttggcttctcccggcattgaccccctcccgacggcctccgcgttggtcggaccatatagcggcgccgacgaccatccccaccgctgcactccggccccctaccatgttgtcattgacactacttgcatccggcgtggccgctggcctccccgccacctccctctcctcccggtgtcggcgtcgagcttcctcccccgccttcctctctggtag

SEQ ID NO: 71663 - DNA, 535 bp, Oryza sativa
  Clone ID: PAT_MRT4530_72115C.1
cggcacgaggctagtctcgagttttttttttttttttttttcgaaaaagaaaatgatcgtattttattgactgatcctaatgttttctttaaaatataaacaagctacaagcgaaagaaaatacatgcacctgaaccaggtctatgggttaatctgggtgtatgaagcatatgtttcactgatcaacagactgatacgaacaacactgtactaaacctgatgcctcagggctagctccttcccaagcagtttcagcatctccctaaccccgagatagtgttctaaaaccggtgaatagcgatccaacgctttatatgtcttcctgagaagtccaagaagcagttccacctcatcaccaagcagatccacctctgcttccgcagtttggagatcgtggcatcgcctgatgaaagctatctgataactctgttcgctcattttaagagagcgcatctgttcaatcagatttccctgttgctttttcaaataattcaatctgcatattgatgcctactacttttcgcaagtaacagct

SEQ ID NO: 71664 - DNA, 960 bp, Oryza sativa
  Clone ID: PAT_MRT4530_72116C.1
atggatctgagcccaactaggtggcatgcgattttcatggagtttgaagacgaagacgtcgacccgaccgccgaggagtatctccaggagcaagccaaggggaagagcatagctgctcacgtattcttctcctcgtcgtcaagatccagaaagttggatggcaaagtggccgtgataaccggcgcagcgagcggcatcggcgaggccacggcgaaggagttcgtcaggaatggcgccaaggttatcattgccgatatcaaggatgatctcggccgcgccgtggccggcgagctcggcgccgacgccgcgtcgtacacgcactgcgacgtcaccgtcgagaaggatgtcgcctcggccgtcgacctcgccgtggcgcgacacggccgcctcgacgtcgtgtacagcaacgccgccatcgcgggtggcgcgcctccggccacgctcgcggcgctcgacctcgacgagtacgaccgcgtcatggccgtcaacgccaggtccatgttggcgtgcgtcaagcacgcggcgcgcgtcatggcgccccgccgcgccggttgcatcctctgcacggccagcacggcggcggtgctcggcggcatggcggcgccggcgtactccatgtcgaaggcggccgtcgtcggcatggtgcggacggtggcgaggcagctggcgcgcgacggcgtgcgggtgaacgccatctcgccgcacgcagtcccgacgccgatggcgataggtctcttctccgagacgttcccggcggcgaccgcggaggaggtgaggaggatggtgacgagggagatgcaggagctggaaggggcgtcgctggaggtggaagacgtggcgagggcggccgtcttcttggcgtccgacgaggccaagttcatcaccggccacaacctcgtcgtcgacggcgggttcacggcaggcaaggtgctcgtccgggatcctccgggctctgcttga

SEQ ID NO: 71665 - DNA, 525 bp, Oryza sativa
  unsure (1)..(525): unsure at all n locations
  Clone ID: PAT_MRT4530_72117C.1
gaaacatggaagttatctgtcacaattttatgctgattactgaatttacaagatgaagcttgcacgagattctcagccctggtttaccacaagctccagaaaatgacttgggtccacatttataaataataggcactatcatgatggcaaaagttattaacacgaaagttattggagtaatcagttcaaccagaagcaaaagttccccttgtaccaccggatggtccagagtatccaagcaaaatgagacatccaccatcacaatttacagccaggaatatgtgatctttagcattgaatagtcaccggtgcacagtccatatgcatcaagggattcaggggcaagccagcgcataagctcacctttgctaccccggcaagccgccgggccaaaattatgactttttactgtccgagacaagagtggttcaccacatatatcgacaggnattttactgtggtctcgcagaaggaagagggttcagtgtgtttcttcaagtgtacaaaagtggtgttgacaggacc

SEQ ID NO: 71666 - DNA, 252 bp, Oryza sativa
  Clone ID: PAT_MRT4530_72118C.1
ccatttcatccatttcccctttcacttttccaccactttgaaccatcccccaacctctctctcctcccggttaacggccttgcactcgccgttccgaccatttccctcactccctcgacctactaccaccctcccttgttgcgccgcactcgggaacatactccgccgccggggttgtcgtctcccagccaccggagcaccggcgccattctctacctcctctcggttccctggaaagaggcagagaagtag

SEQ ID NO: 71667 - DNA, 335 bp, Oryza sativa
  Clone ID: PAT_MRT4530_72119C.1
atctaaaacactactactaccatgttggtggtttattctcatacaagaactccacatcacaaattcaccacttaactcaccccattaaccattcatacaaatccattcacacacgaaacaattaccacaacacacacaataactcttaatcttatcacatccatccatttctctctcctccccccaatttattaacatcttatacattcatactacacaaaaaaacaacacactaatcaacaaaacaacatcttacatttcccaatcatttgattcaccacccttaactcattaacctcctttctataccccttccctcattaaatccatcacac

SEQ ID NO: 71668 - DNA, 1670 bp, Oryza sativa
  unsure (1)..(1670): unsure at all n locations
  Clone ID: PAT_MRT4530_7211C.1
attctacttctagtttatttannnnnnnnnnnnnnnnnnnnnnnnnnnnnnnnnnnnnnnnnnnnnnnncgccccccccctctcctccccccccgcccccgcccccccccaccccccgcctgcccctcgccccccgcaggccccccgtccccccccccaccccccccccccccgcgcacccccccccgcccgcccccacccccccccccccccccactgcgaccccccaccccccctcctccacccccccccacacccacccacaccggcggccgccccgtacgccccccgcccggccccaccccccaccgccccccggcccccgcgcccggccacccgcggactccccccccccccccacgcccccccaacgtccaccaaaatcccccccccgccgcacccctccccccaccagcccccccccccaccccccccaccccgcccctcgcaaagcaccccccccccataccccagtaaccctgaatagtattcccccccctgcccaccctcgccacggggcccgccacgactgcgccgccgccgaccactgcgcctccctcccgtcagcccgtcgacaacgcaaccgccgtccgccacgaccgtgtctccctcctgtcagcttgtcgacgacgccaccgccacccgccatgaccgctcgtggtcaccctccgagccctccgcggcccccaccgctgccgccgccgccgccgcccccaccccccccccccccgggcccgcacccgctgtcaccgccgcccacagcttcgcccgcgccacccgtagcttcgccccgccgctccaccgtctcagccatcgccaccgcccgcagcttcaccccgctgctccgacgtcctagccatcgccgccgcccgcagcttcgcccgcgccgctccgtcgtcctagtcgtccccgccacccccgcagcttcgcccgcgccgctctgccgtcccagccatcgccgccgcccgcagcttcccacgcgtcgcttcgctatcgcggccgtccccgcatcctacagctttgcccgcaccgctccgtcgtcccggccgtccccaccgcctgccacttcgcccgcgcccccgccgctccaccttcggccctcctcctccaccgggcccaccaccgcctccttcccccaaccagcgtgagcccaccaccgcccattgccgccgcgacaatggcgtcgccgccggagccggagccgccgccgagctctccgccatcatccagctctcgcgcccccccaccaagaagcagcagccccgcgcgcgcccccgcgccgcgcccgccgtcgtgcgccgctcccttcgcacgcagggccttcctcccaccttccgcctccgggccagcgccagcgccacctcgccgcagcacccggatcaccccgtccctcgcctccgccatcctcgacgccacctctccccccgcgtccgaggccaagcccatcgccggagccgcggagagccccaccgccgcgccgtcgtcaccgtggagagccccaccaccgcactgtggccgcgccgtccccgtcgccacgacctcgccgtagccgcgacctcgccgtcccgccgccatcgtcgccacgcccgcgccggggcgagatggagccgatgaggatggccctgccgccgccatcccagctttgcgtaacatggatctattcttgatga

SEQ ID NO: 71669 - DNA, 411 bp, Oryza sativa
  Clone ID: PAT_MRT4530_72120C.1
ctacgtcctccacccaatcctctctcttgtctgtgtatcctggctagggctggacgcatagttcgttatggctaacaggacgaaaagctcgtggccataacgagccatctcgagcacgggcagcttgctgcagcccatcaagattgggagcactccacggcccagctggccttctgcctccacacccttccttcgcgtgtccatggccctcttcctccattctcgctgccttggttctggccgccttctgctcgcacatggagaagatcctctattctcgctgcgctggttctggctgccttctgctcgctcacgctcgtggggtgccttctgctcgctcacgctcgtggaggagaggggcatgatgctctgccagtaagagccgagccgagctagctcgatatccaccat

SEQ ID NO: 71670 - DNA, 465 bp, Oryza sativa
  Clone ID: PAT_MRT4530_72121C.1
atgcttctggaggagatcagccgtccagcggcattgctggaatgtaaaccaaaggaagaacctacatttagcaagaccctttgcgtaccaaaaatgattagcacaggcaaagtaatgctggccatagaagaaagcctagtacacccaacgcgcttaccgctggtcagacatccaacgccaaacgagacaatcctcgacacccggcgagtgctgtacgtgaagcaccgcatcccaaataaggagaaactaggagatgaccaggacagtgaggtcaccgtggatgtcagagacccacaagttgttcaccaggccagaagcaaccgtgctcaaacctcggagatgctagggaacggcgaagaagagatctggaaccaaggatgccatcgagcggtcgtcgatccattggtttcgggacgacagacgttcgtccaggacacccgacactgccccccctccccccaatga

SEQ ID NO: 71671 - DNA, 171 bp, Oryza sativa
  Clone ID: PAT_MRT4530_72122C.1
gcgtcgtgcgcgcgtgggacgtgggcgccatctgcagcacccacccaccagcaggaagtcgtccaccggcgtggaacgctccaggtttcggctgggcgacgcacgccgcggagccaaaaaaaccaacgcgcgcgccgcgcgcctgctggggagtacggcggcaaggcgtga

SEQ ID NO: 71672 - DNA, 371 bp, Oryza sativa
  Clone ID: PAT_MRT4530_72123C.1
ggggaaagcccttactcggccattgccttcacgagagtaaaggcaattctcacatacaatagatggcttacgagaagggatcttcaagtttttggggaagtaccaaacagataagtaacagctcattatacaagcatcgcagtgcagaaagcatgtaacaatgtttctaagttgtttacttgggggattctttaccagtattatcttttcctaacacaccagcccgaaggacagtctccaacattccacgcgtctggatccctaaagcaaatgcctttttcttttgaaagaaacctacctactaaacaacacccgtcatttaaaaaccctagaactacccaattttttaaaaaaggcagagagaacattaa

SEQ ID NO: 71673 - DNA, 1450 bp, Oryza sativa
  Clone ID: PAT_MRT4530_72124C.1
ttacaccccctcccctccaccacctccctgtacacgtgtcccgagccacgtcatctgcaccacgctccccgctcctctcctccccgttgccgctgccgccgccgctgctctgggcaacgtcagcggcgcggtgtaccacgccgatcctgctgctgccgtgtacgcgtctctagtccctggcatggctgtggtccccgggcgtgctccgccgtccgccgtgcagatcgaggcggcgaggcggtggaaggagctggagaagatggccctgcggtcggtgaatctcatggtgacgtgcgccggcgccatccaggcgggcgactacgcggcggcggccgggagcctgtccgacgcgcgcgagatcttcgccaagatgcccaccacccgcaccgggatcggccgcgtcctcacccacttcgccgacgcgctcgccgagcgcctgttcccggcgttcccgcagtccgcgccgccgccgcccccgccacgcggggagcagcgcgagctcttccgcgggttctacgaggcggggccgtacctcaagttcgcccacctcgcggcgaaccaggccatcctcgaggcgttcgaggggtgcaacagcgtgcacgtgatcgacttcgccctcaccgatggcatccagtggccgtcgctcatacaggccttggccgtccgccccgggggcccgccgttcctccgcatcaccgggatcggcccccacgccgccggcaaccgcgacgagctccgcgacgtgggcctccgcctcgccgagttcgcgagatcttgcagcgtccccttcgccttccgcgggatcgccgcggaccagctcgacgggctccgcccgtggatgttccaggtcgcgcccggtgaggcagtcgccatcaactccgtgctccagctccaccgcctcctggtcgaccaggacgccgccgccgcggcgtcgttcccggcgcccatcgacggcgtgctagactgggtcgcgtccatgaaccccagggtcttcacggctatcagccgccatggcggcggcgacggggcgggcaacccgctcgccgaggcgtacctgcagggggagatcgccgacatcgtgagccgcgaggggagcagccgggtggagcgccacgagcagatgccgcggtgggtggagaggctgcggcgcggggggatgacgcagctgccgctcggcgccaccggcctctggcaggcggcgatgcagctccgcgagttctccggcgccggcttcggcgtccaggagaacggcggcttcctcacgctcacctggcatagccagaggctgtactcggcgtcggcgtggcgcgcgaccgcggggaagaagatgacgatgatggctagcggcgccgccgacgccatggaggagagtcagaacagcaacaccaacggcggcggcggcggaagcagtggtggtggccatggtgctctcaaccaaatcatgcagtga

SEQ ID NO: 71674 - DNA, 437 bp, Oryza sativa
  Clone ID: PAT_MRT4530_72125C.1
gtgtttttttttttgaaaggaaaaagggctgatacattacttatcccattaaaaccatcaaactccggttcttggtgaaacccatacagctaaaaaacacacacaggtgctgtagcgagcggccccattcgcttagacatacactagcgcgcgtgggagggcgtgacaacgagctgcagcatgcctataccacacgctatacggtaaacggagaggctgccgcctccatctcctgccgaatccattcctctcccatatgtgtcgtacacattcgttagggcacccccgcgagcgaacagcattcggctctaggcggatcgacagtgatgaccctatgacgctgtacactactatatggatggatggcttttaattacgtcaccctaaatcaaggtcgctcgcataacgctcgggcggacactctggccaattgatcg

SEQ ID NO: 71675 - DNA, 2501 bp, Oryza sativa
  Clone ID: PAT_MRT4530_72126C.1
gatagttcgtcggatttgcggttagatccgagttaaccaaacagaagccgatcagagaccctaccctccgccgatgcgtcgagaagaagcctccgccgccgccgccgccgccgaggctgggaccccgcgctcaccggacctccacgacctctccgacgactccgactacgccgccgccgccgccgcgtcctccagtcactcggcgatgcggagcgatctggtggatcaagggtcgggcgagacggcgaaggtggatgtggtgtacgagaaggagcgtgtgacgatccacccgacgcagtatggctccggccggatcagcgggaagctgcgcctctacttgcagcagggctccctgttcctgagttgggagccaaatgagggagttgattctttatcaagcaattcagctaccatggaaatagaaaaatatagaaacctgtacactataaaggccttgccattaagtgatgtacgcttcatccgtaagcacaccccgacatttggattcgagtacataatcattgttctctcatcaggattggcttttcctccattctatttctacaatggtgggcttcgtgaattgtttgcgacactaaagaagcatgtttttattatcaggtcggacgatgatcctaatgtatttcttgtcaacgactttcaagatcctctacagaaaagtttgtcatcactggagcttcctggtgttgccaccgtagcaaatgccatgtcacgacagaactcactcagtttcactagttcagttgatgaagccggacatgggagtgatgccaaacatggggcatcttctagcatgactgaatatgtctcaaagcaaaagccacagatcgaatgcatcccggtcgtgatctttctatctaaggactggattatttttgtttagtaagtttgcacgagataccacgtcaagtctttttcgggaaaaccacagtagtggtggtcatacttatggaaggcagcagcaagaatatgttttggacaacagagcaaatgataagtacaaagatcagcaaataacaccagataaggattctttgctgtcagattcaatggagtctaataaaattctagcgtggggaaaagcaaaccaagagaacaaccgttgagtgttgatgagtggagatccttcttagatcctgaaggtagagttatggattcgaaggcgctgaggaaaaaggttttctatggagggattgaccatgttctagagaaaagaggtctggaaattcctgtttggggtatcatgaatacgattcaacatatgccgagagggaatatcttgctgtcatgaaaagaacagaatatgaagccataaaatcccagtggaagagtatttcgtccacacaagctaaaagatttaccaagtttagggaaagaaaaggccttatcgacaaagatgtggtgaggacagatagatcagttccatattatgaaggagatgacaatcaaaatgttcttgtgctacgggatatcctgttgacgtattccttctataatttcgaccttggctattgccaaggaatgagtgattttctggcacctatactttatgtgatggaggatgagtctgagtcattttggtgctttgcaattttgatgggacgactaggagccaattttaaccgtgatcagaatggcatgcatgctcagttacttgcattatccaagctcgtggagcttcttgatcctcagttacataactattttcggaagaacgactgcttaaactactttttctgttttcgttgggtccttatacaattcaaacgttgggttcttatacaattcaaaagggagttcagtttcgatcaaatcatgctgctgtgggaagttctgtggacacattattggtcagaacatttccacctgaacttatgcgtcgcgatcctgaaaaggtaccggtcgcggataataggagagcagatggatttcgacacccttctcaagttcatcaatgagctcagtggaattataaatcttgaccgagcaagtgatgacgcggaggcttactgtgaccaggcaggccctaaccgggctgcccgccttcctccgggaaccgcgactgacggtggccctctacgtgacaagaagacgaggtcatgtgagataccggcgattcagtggtcacctcatacgacaactgccatagaaagcattgcactggtttccataattccattgggtgcttggtacgttggtatatataaattatgaaggtgatcaaaataatgaaatctggctgttgtatatatgtacgttgaaatatcagttctcgatgaacccaacaatagttaacacaagtctcttttttttgcttaatggaaatggattgtcttttagacgcctatgtttggcttcactgcgtaaatatataatattatgtcacgtgatacttatcaactggcaaaaaaaaaaaaaaaagtatttggataccagtaaaatcgactgtctgagtacgattaaaaaaaaaaaaaaaaaaa

SEQ ID NO: 71676 - DNA, 862 bp, Oryza sativa
  Clone ID: PAT_MRT4530_72127C.1
tttttggttttttttatttttttttttttttttttttttttttaataccaagaaaagggtggtaattattaatctctttatagtttgtttgatgagtcttacatattataaccagatgagctacatggattcctgcgtttttattccctcacagtagctcatgaatttctggattctacatttgtacaacagcagaaaacaaatactagcacatgaaacaggcaaagcttgaattcgtcttcggctgatttggcttccactaatgcatcttcagctggaatttcgctcattcatcttcagctggaatgacatccgagcgctccacttcatccggaaagtgtccatcgatgaagtaggtcgtgcaggggaatccgcgggaggcggcgtcgacggcgcgcgcctcgtcggcggaaagcgcgcggggcaccggccccatcctcgcggcggcgtggctgacgagcgccagcaacccgcgggcggcgccggcgggccgcggcggcgcgtagtacgacgtcccgggccggaacggcgcccactcgggctccgacatccgcgccatggcgccgtcgatggcctcctccatccgccgcgccatcgcgctcgacgacgacccggcttcctccgacgtcgacgcgccccccgccgcggaggcggcgccgccgccctcgaccacctccgccgccgtgagcggcagccggcgccgggtgtggtagccgcaccgggcggcggcgaggatcccgatcccgccgcgccgcgccaggaaccccgcccgggagagcgcgcgcgacgacgccgacatggacacgcgacgcggcggtggccggagagctcgcaaaccggtggcgctcgccgcggacgcgtg

SEQ ID NO: 71677 - DNA, 238 bp, Oryza sativa
  Clone ID: PAT_MRT4530_72128C.1
cggacgcgtgggcggactcgtgggtctagatcgggagcggccgaccatttgtggtgtttagatgaaacggcggtacgacagcggtaaaccgactgaaggaagcacaggacagagatctaaagcatcattgcagatagaacaagatgagtacataatactatatgaatgaagactcagaccaagcaagggtttttagatctgagcatgatagatgccatggcagagtaccatgatgtag

SEQ ID NO: 71678 - DNA, 362 bp, Oryza sativa
  Clone ID: PAT_MRT4530_72129C.1
atgggggacagggcgtgcggcgggggttcgctccgtgcgcgccgcatcaccgggtgtgcgacgactagtgggtgtgggcggccgccctccttcggcttcgccccctactccccgctcatctccaactcctcccgccgcgccagcgcccaccgaagcaccaaccttctcacggtcgccgcgggggcgggggaggaagccgccatcgcgtgccctagctgcgccaaaccgttcccctccgagctggcggtgtcggaccacctcgtcagctacctcgtggcgacggggggagcccgtctcgggtggcgaaaaagcctgcctgcgcccgcgccctcgctgaatccagtacagtgaaaagagaatag

SEQ ID NO: 71679 - DNA, 531 bp, Oryza sativa
  Clone ID: PAT_MRT4530_7212C.1
atggcggaggcgagggacggggtgatccgggtgctgcggcgaggtggcgctggcgctggcccggaggcggaaggtgggaggaaggccctgcgtgcgaagggagcggcgcacgacggcgggcgcggcgcgggggcgcgcgcggggctgctgcttcttggtgggggggcgcgagagctggatgatggcggagagctcggcggccttgcggcggagggagtcgaggatgacgccgttgcgccggatgttctccgcacggcggcgctcgtagtcggtgaggccgccggcgtccggctccggctccggcggcgacgccattgtcgcggcggcaatgggcggtggtgggctcacgctggttgggggaaggaggcggtggtgggcccggctgttgcaggcaacttctgctgctactggagctcctggagcggaagcattgaagaaggcacacgacgagtagttggggactatggaggcacgaggaccaaagcgcgccagaagattaaaaagcgcccctttgaaatgaggggaatttaa

SEQ ID NO: 71680 - DNA, 504 bp, Oryza sativa
  Clone ID: PAT_MRT4530_72130C.1
atgaactacatgtctctagttaagggtggtctggctggagacggaggcgacgcggtggcggcgttgaggcagaggcaggctcgcggaggacggaccggcggaggcggcgtcgacgcgatagaggtcgaggacgggctggcgcccggcggaggtggcgcgatgcaggcggacgggcggagagcgaaggcgacgctgtggaggcagaaggcggagccgcggaggtggaggcggcgccgccgcggtggaggcataggcgacacggtggaggcggaaaggcagagtcggcatggtggaggcggaaggcggaggcggcagaggcgagggaggcgccgtggaagcggaggcggcgccatggaggcggaaggcggaggcggcgtgaccgagccgatgacacgggctttggttgtggtggagtcccacaggtcgaccactgtgatttatgccaacaaaaatacaaactttgtagcacaatctaagttcattcttagaccaaagccatggtag

SEQ ID NO: 71681 - DNA, 345 bp, Oryza sativa
  Clone ID: PAT_MRT4530_72131C.1
ccacacgcgtccgagcggcactctcctcggacccagacgcgttcgcgaggaacaggtcgctgcacgtgattcactgacgccgggcgatgctcggaacgctgggctgcatcacgccagaggtgctctagaagtgagtgcgcgtccacttaaatgagcccgcgtgggtcaaggctagctcccagatcttatcctacggcaggctcaaatacttctgcaaccgcaacctggtgcacgcccagagcatgctctccgtgctgggattccaagtaatcctcatgggcctcgtcgagggctaccgcatcaactgcctcgccggcgttagttacagccactacctctaccccg

SEQ ID NO: 71682 - DNA, 165 bp, Oryza sativa
  Clone ID: PAT_MRT4530_72132C.1
ctagtcgttccaccggaggaggttcatcttcttctcaatggcatgaagccagtcattggcttccattgggttgatggtgctggagaaagtgggtggcaatggtatatccatgcgcttgcggatgaactctgtaaccataatataccagaaatatttctgcgccat

SEQ ID NO: 71683 - DNA, 1912 bp, Oryza sativa
  unsure (1)..(1912): unsure at all n locations
  Clone ID: PAT_MRT4530_72133C.1
cattgtttttttttttttttttttttgggcaagaagagagcaatccttatattaaacatcggtggctaacttgcaccactcactttgtacactatacaacatcctaacctacgcttgtatgaagaacagagcatgttcctctaactctaaccaaaatgatccagggcggcaattcttcaaaaaccaggcagagaagatccgctgtcgaagctctctagatcatcctccagcgactccgtcctctgaatctgctctgtcttgcacactcctagctcatctgatagcctctcacatagctgtctatacaatataggatctccatgggatttcttcaattcgacaacatataaggatggcccgagctcgactacctcagtacagaccaagaatgatgatggattcctgaggttctttgaacccctgccatttttcatgacctttagcttgctattacccctctggacttggaatcccatctccgtcacaacattctcaatcttgtcgaataaatcttttggtgaatgtgttgatgtgaaccttatctttctttgagacgcatcctcttcctcaaagaaacctgaaagatcaagggcagaagccattccaatcaactgaaaagcattgatatgagtaggcttttcctgctttgcttcatcaatttgctctttgattggaagaactgagtcaagataattgtcatcatcgtcgtcatatggaacaacaggagtgtaatccttctgaaaccactcatgctctttgatccctgctatgttgatcctcttcatcgggttcggttcaagaatccttcgaagaagatcccgtgcactaggtgaaagccactttgggatttgagtgtcccccttgaaaatcttctggtacaggacaacaagatttcggtcatcaaagggaaggtatccgacgagcattacatagagaattactccacaagaccagatatctgacaatgagccatcgtaacctcggttctgcaaaacctcaggagcaatataattggggctgccacatgttgtgtgcagcaatccatcattcccaagatgttgaggcaaagcacttaggccaaagtcagagatcttgatattgcctcttcgatccacaagaacattttcgggcttaaggtctctgtggtagacacctttatcatggcaatagctcacagcatcgattaactgctggaaaagtctccttccttcatgttcagagagttttccttttacggcaatcttgtcaaagagctcgcctccattgacatattcaagcaccatgtaaatcttagttttgctagcagccacctcgtgcaggcggacgacgttggggtgcttgagcagcttgagcgtcccaatctccctccttatctggtcgtcgaagcggagggagaggatcttgttgcggtcgaggatcttgatggcgaagtgggcgccggtggcgaggtggcgcgcgtacttgaccttgccgaagttgccctccccgagcgtgcgcccgatctcatacctccccagcagcgacgcccgcgtgcactccgcctccgcctctccgttcaccattcacgagctcctccccgcccgccgcacccaacaaacgcccgccgcgccggcaagaaaacgaaactgacctgatctcctacaataaatccgcaagccggcaacaaaaaactacctctccctctctatctttatactgtctcacacgctatctatgtctctctcgccggagttggccgggttcagggggggggggggagaggaatgaacggggagggagggagggaaacgggggtgggnacttatagtagctccctcgccgctcgttgcctctctgctgctattgtctgcttgcgttgctctgcttccttccttcgttcgtnttttgggcttggctggtctctcaggaggtt

SEQ ID NO: 71684 - DNA, 2061 bp, Oryza sativa
  Clone ID: PAT_MRT4530_72134C.1
atgggcgagtggtgcggcgaggtgggggacgaggctgggagcgcgcgggagaggcgggcagcagttgaggaggccgctccttcggcggctagagatgaatgcaaagaagctacagaattgatgtttttacgtgggctttacaaagaaattcaggacatgcttgattgtcaaagatatacatctctttcttatttgatacaacttgcttgcaatgctgaaagtcaaatagaggaggacatgaaaaagcaatacgctatgtttctgccttctattactaaccatttgcaggaagtgcataatgatagaaaagaggacaaaggcatggatgaaccgccaatcccattgttcacactcaaagtcgaggcacctccaccatctgaagagggcatcaaaggtaaacttaatggtgctaaaattaatcaagtggagcaaccattagtggaaccaactgctgagattcctttgtcacaaactgatttgtttgctgttccttgtgataaagaagtgttgtgtgataatgcttcacttatatcaatgccacaactagtgaacgaacatgctatttctcatactagttctttatgtgatgattttaagcatgttattcacattgctaatgaagtagaggaacgtgaattgacatcttctttaaatactttgggctatattcagtgtgatgatttttatgagcaccatatggaaaaatcgaggacggttttctatgaagaaggggaggatgatgtgatcatggctactatggatacaaccattgcttacatcatggatgaacaacaagatatcaagttcaagccctccaagaataaggttgatctgcactggcaagatcaacaacccacggaaaggtgtatcgatcgggagtcagccgtggttcaactttggccttctacatcggccttgacgtctttgcaagaggaggttggcgggaccttgactttgctagaggaggtggtgttgcttgccaactcttcgaaggtgcctgcggaggaggtggtgcagcttggcgagtcttggagggtgcaggcggaggaggtggcggaggagcacgcgaagacggtgcaggcggagacggaggaggcggaggagatggaggagtcagaggagccggaggagatgcaggaggtggaggagccggaggcgatggtgcaggaggaggggatcgagaatcgggaaacacgatgtagcgcttgcaccatagtatctccaactcgagatcctcctaggtggcttccacttgctcgatttcgaccttggagtacccaggtggaatcggcctgcaatgctcagaagcactacacttctgaaaagggggaaataatagcaagactgagtacaaccaccatactcagcaagccacaccaacgatgcagacgtgcaaggggaacacaaggacgggaaaattttggtcgcccgtttaagtgggatttgccaaatcagatggccgatcacccactcaaccatcgcggagaaggcatggatgactttgtggcagagttggctcgcatgacactggtggtggactaccccaatgcgccagagtattcgactgttccgccgctcagtggcgagttccctctcggccggggccttcctctcccggccgccctctcccccgacgacctccggccggccttttccgctcgctgggactgtctcccgccccggcgtcgcctcctccggcttcgccgcagcgccgtcgaccccgtccaccccctcgccgagctcgccgaccgctggagcgccgtcgtccccatccacccgagctgcgccgccgccttcctccgctccggccgccttttttgtcgtcgccgtcgacccagggtaagccgtggaccgccgcctcttttcctccttctcttcccctctctcggccgccgctccgctgtgcctatggccgccgccggcgaccataggggcgcgggtgccgcctcccgccgactgcgccgtcgtggccgcctccgggcgcgccgtgtggctgccgcgtggggcccagccgtcagccgcccgcgccctcgggtgcggcgtgttcgcctggaggttcat

SEQ ID NO: 71685 - DNA, 737 bp, Oryza sativa
  Clone ID: PAT_MRT4530_72135C.1
ccggccgggaaaacccgggtcgtcctctccctctcctccgccgcttcgccgccggcgtccgtcgccgccgagctcaccgcccttcgccgcctccacggcggggcgccgccgtagaatctccacaccgaggctcacattctacatctttggaaatgcatccccctctaaccttacacaggcatcctatgtgtgccgagattattgaagcattccagaagtgccatgtggaccatcccgtcaagaagttttttggcgaatgcacagatcttaagattaagctagatcagtgcttccggcaagagaaagctttgaagagaaaggcaaactttgaagagagcaagaagttcaaagaacagttgctggcctataaaaaggaaatggctgaacaagacaaggaatcataacgtgagacagaggacaagaacctgaatcaaatgttttcccctacaatgcaatgactccaactttgtgaagaagttgcaaattgtctttacttggcatgcgcttttactatctttactgtttaaaaggttgccattgatgaactatagccagataataaattgcagtttagaacttaaaattccctcatgtgtccacgttacttatgtttggtcattttcttcagtactgttggaagccctatagcagatatagactgcaagtcttgctctaggtgtgatataacatttttttaaaataaatgagatccttcagcttctagcattatttgtaga

SEQ ID NO: 71686 - DNA, 146 bp, Oryza sativa
  Clone ID: PAT_MRT4530_72136C.1
taagcctccgcgtaccgatttggattgacattatgtgtgttctttcaaatactagtagctagtattttgtacgatgggccgcgaaaattaaccatgacccgtgttgatgaatggaaaattttaagttgttcaaaaaaaaaaaaaaa

SEQ ID NO: 71687 - DNA, 330 bp, Oryza sativa
  Clone ID: PAT_MRT4530_72137C.1
ggtttaaacacttatcaactagccgttctctaaacctgactttgcagcaagttttggtgatgctctttttgtatgatttattactgtaatgatttgatttgcattctaatgaattcaggagggtggcaaaatcaattgcaaggattattgcccttgctctaaacctagaagaggacttctttgataaaccagaaatgcttggcgagcccatagccacattaaggctcctgcattatgaaggtggacaaaaaacaggtcatgcattcttgccgttcagtattttattacacaagaaacataacgaattcttgtcgttgatgttcctttttt

SEQ ID NO: 71688 - DNA, 390 bp, Oryza sativa
  Clone ID: PAT_MRT4530_72138C.1
gtttgcataccagtatgagggggctaccggtgaagatggtaggagcccaagcgggtgggacactttcactcatgcagggaagatgccggacaagagcaccgccgacatgggctgccggtggctaccacatatacaaggaggacgttaagttaatgagtgatactagcctggaggcataccggctctccatttattggtctacgcttattccaagaggaagaggacccgtcaatcctaagggactcgagtactacaatagcctgatagatgagctagtcgaacgggggatcgagatacatgtgactgtctaccacctggattgccctcaaattcttgaagatgagtaccatggctggctcaaccaagggtcattgacgatttcacggtgta

SEQ ID NO: 71689 - DNA, 1380 bp, Oryza sativa
  Clone ID: PAT_MRT4530_72139C.1
atggccgcctggaggctctctctctagctactacctcaccatggccgtctcctcttctacctctacctgctccagcttctctctcctcctcctcctcctgctcctcgccgcggcgccatggcggtcaggcgaggcggcggcggcggcggcgagagctctcaacttcacaaggcaggatttccccggggagttcgtcttcggcgccggcacgtcggcataccagtatgagggggctaccgatgaagatggaaggagcccaagcatctgggacactttcactcatgcagggaagatgccggacaagagcaccggcgacatgggcgccggcggctaccacaaatacaaggaggacgtcaagttaatgagtgatactagcctggaggcataccggttctccatttcttggtctaggcttattccaagaggaagaggacccgtcaatccgaaggcacatcgagtactacaatagcctgagttaagttgatgagtgatactggattggaggcctacaggttctccatctcttggtctaggcttattccgagaggaagaggacccatcaatcctaaaggactcgagtactacaatgacctgatagataagctagtcaaaaggggtgcacaaatcttttgcgcaatccctaagaaaggagaaatttgtgattgttctatggggattgagatacatgtgactctctaccacctcgatttccctcaagctcttcaagatgagtacaatggctggctcagcccaaggatcattgaggatttcacggcgtatgcggacgtgtgcttcagggagttcggcgacctggtgaggcactggaccaccgtgggcgagcccaacgtgctgtccatcgccggctacgacagcggtgtcatcccgccgtgccgctgctcgccgccgttcgggaccagctgcgccgccggcgactccaccgtggagccgtacttcgccgcacacaactccatcttggctcatgcctccgctgtcaggctgtactgggacaagtaccaggctaagcagaagggcgtcgttggcacgaacatctacagcttctggccctatccgctctcccgcagctgtgcagacattgacgcagttcagagagtattggacttcacgattggttggatactggaccccttggtgtatggagactaccctgaaatcatgaagaagcaagccggttcccggattccatccttcacaaaagaacaatctgagttgatccgtgggagtgccgatttcattggtataaaccattacaaatcgttgtatgttagcgatggatcgaaccgcgaaaaggcaggacttcgggattataatgctgatatggctgcacacttcagaggtactgctatctccgtcccaaattaa

SEQ ID NO: 71690 - DNA, 231 bp, Oryza sativa
  Clone ID: PAT_MRT4530_7213C.1
tctctatactttgtgtgccgggcctggccttccggcccgaccgtgccgggccagcccagcatgccggttgggaggcccaggcacggcccggcggtcaggccgggccggcatggacccgaccccagtcgagccatgccgtgcttgggccgagccaaaatgccgtgccgtgggccggtccttcgggcctcgggttttatgtccatctatacttaacggcgaggagtacacggc

SEQ ID NO: 71691 - DNA, 468 bp, Oryza sativa
  Clone ID: PAT_MRT4530_72140C.1
atgggagcggaggtccctgacctccccgcggcgatagagctcggtgaagttattgctgccggtcagctcttctccaccaaccgtcgcccttctaccaaccagcaaccgccccccgtcagttttgcacgccggagaactggagagatggggaagagagaggagaatgttgagttatttttgggacggagggagtaccgccttgggactatatttgtaccggctttaaaaaatgaggggcatgttttgtctggtttcgtggttcaaggaaacttattcaaattcgacgtcaaggtggctgctatggctgtgagattgaagggtttaatctggtgcaccctgacaccgaagatttctatgggcacctggctcaacatgaaggtgatgcctatttctgtaagagaattcctgctcaagagttcagcaatccattatatgaggattgtgtactctttgagccttgaacactaa

SEQ ID NO: 71692 - DNA, 224 bp, Oryza sativa
  Clone ID: PAT_MRT4530_72141C.1
ggcaaaagagagattctctgcatatatagtaattcccatgtggcctgagggtaatccaacaggtgctcctacacaaagaattctttactggcaggttagatcaacatgtctgctttgtgtcttgtttaatgtttatatagattatacccagttagttcatttgacatgatcgcatgttttttttggtgctcctgtagcacaagacaatgcaaatgatgtacgaa

SEQ ID NO: 71693 - DNA, 198 bp, Oryza sativa
  Clone ID: PAT_MRT4530_72142C.1
atggcgggcgaaagggcggtggactcgcgcgaagggcagatggcgagcttgcgacgagacacgcacgcaagggcggcaaatgcggcgcaccagcgctatcgcgtgggccggtttcgcccggtgcgctgcggcgaagtcagcgtgcgcgtgactggtggctgggccacttcggccttgctgccggtctggaccagttag

SEQ ID NO: 71694 - DNA, 390 bp, Oryza sativa
  Clone ID: PAT_MRT4530_72143C.1
atggcggagcgcatgggcggaagacagctcaagccctctcctggagtcttctcgtctgcctccacgaccaacacgcgcgccattggacatggagacgccggccaaccacgaccacggcgccgccccgccgctgccggcggtagcccactcgagacttccagcggcgtcgacggcgggacaacgacgccggtggtggcgaaagaggaggagaagaagagggaggagggacgatcagcggcagggcagagagcttacggcgagggcgtgatcgcgccgccggtgaggaggggggaggaggggaaggcggcgccggcgacggcgaggccgctgccgcacgagcaggtgccgcagcccgcggacgtgtacaacccgcagctggagcgcctctga

SEQ ID NO: 71695 - DNA, 288 bp, Oryza sativa
  unsure (1)..(288): unsure at all n locations
  Clone ID: PAT_MRT4530_72144C.1
gtgcgcaccaaaaccatcaattacgatggactcgatatgaaagtgcatagaataaaaccttaccatgcatccgaaaacatgactctgatcctgnacatcatcactcatagacaacatgagtgcatcagaatctcagttctctgtacgcaaccactgttaactcattgaacttgaaacgtccatgcatgctacacaacactttggcatataacgcctgctagcacgtattaaagcttacattgaacagcatgcctacacaatgaccttgtgacgaatagtacagcatgc

SEQ ID NO: 71696 - DNA, 102 bp, Oryza sativa
  Clone ID: PAT_MRT4530_72145C.1
atggcagatgctcttgtcgtgattattggtgattgggaacaaagcatggtaggaatttcttttgcatcttctgaggggaacaacatcaacataccttacctg

SEQ ID NO: 71697 - DNA, 1088 bp, Oryza sativa
  Clone ID: PAT_MRT4530_72146C.1
cctcctaacaagcgcacgagagcttcactgcccccttgtctgcaatggcgtctcgagctttcccacgagctccccgccgctgctgctcgccctaggggccccgacgctccagcggtaaaccctacctcctcctcctcctccgtcgccgggatggggtccacctcctcgccgtccccgccgccgccgccgatgatcgggagggccgggaacctcaccgtcttcatcacgccgccgtcgccggcgagcacgccgcgctcctcgcgcccgtccgagtcccctcggtcgggcttctcgaccccggcgacggccccgcgcacggccgcctcgccgtcgccgccgtctccggctccctcgccgcagcagcagagggtggccagcccgccgcccacgatcccggtgaagttctccccgcctgcggctccggtgaaggtccctcctccgcctccggtgcaggtgcccccgccgcagtacgagaaggcctccgcggggggcaagcacgacggatcggcgtttggtttcttctgggacgccgtcgcgcgcgtgcaggaagcccacgcgagcctcgacgagtacgtggcgaactggtttgggctggatcaatccaagtaccaatgggcgctcaacgactactacgagagcaccggcaaggaagtggagtgtggcaaagctggcaagccaaaggagcttactactagcaaagtgcagaaagtttagaaggtctgttcacatgataaaaccagcagttcttttctggaattacgctgaggagcattttgcagcgacttctttctgggttgaatgtgtagctaagcaaatgtgtggagaagttcgatttgttagatcttgggggcgtaaaggtggttgtctgtttttcaactgcatggagtctcttggcaggtttacgggctgcgctggaagggaattgagactgctaggcgttttgttcactcctgccaggatctctattgtaatcctatgttatgacaaaattgcatattcgcaatgcctaatagtgtttttttttttgccacctagaaaaaaaaaaaaaaaatgcatattcttctgagctctttaaaaaaaaaaaaaaa

SEQ ID NO: 71698 - DNA, 303 bp, Oryza sativa
  Clone ID: PAT_MRT4530_72147C.1
atggcgatgacgccgcgagcggcgcggcgcgacccaccgctcgcgttctcgtgggcgacgcggccgggtcggaggatggagcggccgagacgtcacctcaccgtgcggcgcgtgcggtgggacggccgcaccgacggggcccgagtcgcggtcacgcggggtcgcgtgccgatcgggatcggggcagagtcgagagacccacgccatcacggcgttgccgcccacgtcgtcgacgtgccttggggtagggtgtggctggtgcgggccgcgggcgtggagctccgcccacttgcccatcagtag

SEQ ID NO: 71699 - DNA, 537 bp, Oryza sativa
  Clone ID: PAT_MRT4530_72148C.1
atgggtccctcaactgttaaaccagtcggcgggacggcggcgggccacaacaggcggagcggcggcaatccgccgccggcaccgatctccataacagaggtgtgcgtcctcctcctcttcgaacccgtcgccatcttcgtggtcttcggcgaccgcgatggtggggaagcgggtggggaaatgggagctctcccgccactgctcatggtgacgacgccatcgaggtcggaggatggcgggaacgggggcgggggccacaatggtgaggtgcgcgtcatcctcctcctcgaacctgtcgccatcgttgtcgtcgtcatctttggcggtgacaggagaggaagcaaagggagaagttggtcggctgccgcaacacctcttgccgtcgaccttgcgggggcgggagaggagacgcgagtggcggccggtgggagaggagctacgggcagcagccagcgggagagaagcggcgcacagtggccggtggccgccgcgtgtggcgcccgctccaaggaggagatgccgggagacgtcacgtga

SEQ ID NO: 71700 - DNA, 715 bp, Oryza sativa
  Clone ID: PAT_MRT4530_72149C.1
atgtaatactgctccagtaggcagcatcctctcctctcctatatcatcatcatatccaatccttggttggttggttcgttcacaaggaggaaagcctcgagcatcatcatcagtaggaagaagaagaagaagaagaagaagaagagcaacaggaagaagcaagcaagaagaggaagaagaagaaagcaaggagaagaagatgcaggactggggtccggtgctgatatcttgggtgctgttcatcctgctgtcgccggggcttctgttccagataccaggcaagtgcaggttgatcgagttcggcaagttccagaccagcgtcgtctccatcctcgtccacaccatcctcttcttcgccctcgacgccatcttcctcgtcgccatcggcgtccagatcaaccttggctcctctccctgattctctctctttgtttcttctaggtaatctcaattgcatatgtatagcagtatatatgcacctccatccatcatctctactcaccttagctcgttaatttgtactactatttgtgtgttccttccaattcttggcataatattgtgactcaaaggaattgatttcagagttactcattacttagtttcttcctccacatatatatgtagcaaaatcaaaagtgcaccattcatagcatttcaagtaaattacaactagcaaatttcccagcggccgcgcattcgatatcagctatcg

SEQ ID NO: 71701 - DNA, 817 bp, Oryza sativa
  Clone ID: PAT_MRT4530_7214C.1
ccggccgggtccgtgtccggtttcacatcccatcccacgctgtcgacacagcttccgccgcatccctcccctcgccgtcgcaaaatcccccccgccgctcgcgccgccgccgccgagagcgagacccgcacgaggagccaagcatctctgcgttctacagctccgggccaccggcgatgaagctcgtctaccgcaacctcgcccgcaacggccccggctccgtcaagctggtgccggaggaggaggacgacctgtggcatgcctacaaccttattgttccgggggataccctccagtccgtcactgtgaggaaagttctgagagagatggcatctggaggacgtgatgctgagcgtgtgaggttaaagttggaaattgtagtcgagtctgtagattatgataaggagggatctgtcttgcgtgtatgtggaaaaaataactgagaacgatcatgtgaagattggacagtttcatactgtggagcttgagctgaagagacaatttactttgacgaaggaactttgggattggttagctcttgataccatccaacaagcatgtgacccaactgcaagtgctgatctagcagttattctcatgcaagaaggacttgcacatttgttcctcattggtagaagcataacagtaaccagagcacgtattgaaacatctattcctcggaagcatggccctgcgattgctggttatgagtcggccctcaagaagttctttgaacatgttttgcaagctttccttgaacatattgatttttgaagtagtccaatgtgctgtaattgcaagcccaggttttactaag

SEQ ID NO: 71702 - DNA, 295 bp, Oryza sativa
  Clone ID: PAT_MRT4530_72150C.1
tttttttaaccatgtttatattttgcaaatttacacacactgcactggctgcctgtgtggcaccttgtgacttcctaaaagagttactggtgcgactatgcccctagttgatatatctagaagagtatgttgtagttgtagtaggtatatttcttttgtttagcatttacttattgcttagttccaaaggcttaagtaatcagtgtaaaattcccccctggttgtgtcggttggaatatgagattacagcccatcatccatcttactgggatttcaaaaaaaaaaaaaaaaaaaa

SEQ ID NO: 71703 - DNA, 378 bp, Oryza sativa
  Clone ID: PAT_MRT4530_72151C.1
gacgaggctcccctctcctattccaatcttggtggcggcgcagtgctggctctaaggacgacggtggaagcgggcgacggcgattgctctgagggcgacgcggccgaggcggactcaggcggtgagtggcgcgtcagcggtggcggcgggagtccgactcatcaccgccgtcgagcttcgcttcctcgcttcctcatcgccgccagcctcctcatccaccatcgcccggcagctggcgacgcggcagcgcatcagcgcgggcggcggctggcgacaaggcggcgcgggtggaggccggcgaagtggctgcgcacaggcggcgactgtggcatggcggcacacggcaggggcgcggctggcgacacggcggcgcgggcg

SEQ ID NO: 71704 - DNA, 135 bp, Oryza sativa
  Clone ID: PAT_MRT4530_72152C.1
atggcggcggacagaaacatgctaggaactcgatacaagcagggaaagaaggtcgacgagagctgcgcggttacgagctcggggcggcacatggagcagcgcaggcaggagcgaggctgcacgcgacccgactag

SEQ ID NO: 71705 - DNA, 1599 bp, Oryza sativa
  Clone ID: PAT_MRT4530_72153C.1
atggtcgccgtcttcaacaaggacgtcctgagctggtacctgatcacggtcaagctcaaggagaccgtcgatgccaacctcaacaagtccgcgccgccgcccggcgcgctgccgctgtggcaggcgctgaaccgcaacctgccgctgctcaccaacggcgaggccgccggagcgggaggcgacgcgctgccgccgcgccaggagcgggagcgggaggtgaaggtccaggtgcagtcgccggcgcacagcccgaagccgcaggacccggaatgggtggtggccatccgcgggaagctggcgcaggcgcgcgccgaggaggcagcgtgcccgtgggcgcggctgtccgtgtaccgcgtgcccaagtcgctccgcgacggcgacgagcgcgcgtacatgccgcaggtggtgtccatcggcccgctccaccgcggccggcggcggctgcgggagatggagcggcacaagtggcgcgcgctgcaccacgtcctgaagcgcacggggcacgacgtcaccgcctacctcgacgcgctgcggccgatggaggagcgggcgcgcgcctgctacgacggccgcgtcgccgggatgcaggggaacgagctcgtcgagtgcctggtgctggacgggaccttcgtgctggagctcttccgcggcgcgcacgacggcgggaaggggtctcggcgacgacctgggatacccctgttcgtgctcgacctcctgctcggcctccagctcggcaacccggagcagaccggcgccgtcgccggcctcgctgtgcgcttcttcgacccgctcatgccgaccgacgagccgctgctccgcaaggaccggtccaagctggagtcctccatcggcgcctcaccggcggcggcggcgttcgagttcgacccgctgtccggcccgatgctccattgcctcgacgtgttccggcgcagcctcctccgcgcggggctgcagcccaccccgccgccccccgcgcggctgtggctcaagaagtggtcggggctccggcgcgtggcggacaagcggcggcagcagttcgtccactgcgtgtcggagctccgggaggccggcatccggtgccggcggcggaacacggaccgcttctgggacatcaggttccacgacggcgtgctccagatcccgcgcatcctcatccacgacggcaccaagtccctcttcctcaacctgatcgcgttcgagcaatgccacatggacatcgccaccccgggcggcaacaacatcacctcctacgccatcttcatggacaacctcatcaactccgccgacgacgtcaagtacctccacgaccgcggcatcatcgagcactggctgggcagcgacgccgaggtggccgacctcttcaaccggctgtgccaggaggtggtgttcgacatcaacgacagctacctctcggggctctcggaccaggtgaacaggtactacgaccacaagtggagcacctggatcgccagcctcaagcacaactacttcagcaacccatgggcgatcgtctcggtggtcgccggtgtcttgttgctgctgctcaccatgacgcagaccttctacggcacctacagctactacaggccgatgcattga

SEQ ID NO: 71706 - DNA, 1956 bp, Oryza sativa
  Clone ID: PAT_MRT4530_72154C.1
gatcgcaagaggaaactttatttaattttgtcaaagaccacacaatattttacaacaagcaagcaatcccaaaaattccactatcaatcatcatcagctgataaaattatcgttctaagatattcataggtacattgcttgcctcgcctccctctcgagttggcttgctctctctgtcccggggccactgatcttggcaaccacgagacgctactgcggcgagccccacgccgccggcgaagccgctgcacctgccactgccagcctccatctcgatggtcgccgtcttcaacaaggacgtcctgagctggtacctgatcacggtcaagctcaaggagaccgtcgatgccaacctcaacaagtccgcgccgccgcccggcgcgctgccgctgtggcaggcgctgaaccgcaacctgccgctgctcaccaacggcgaggccgccggagcgggaggcgacgcgctgccgccgcgccaggagcgggagcgggaggtgaaggtccaggtgcagtcgccggcgcacagcccgaagccgcaggacccggaatgggtggtggccatccgcgggaagctggcgcaggcgcgcgccgaggaggcagcgtgcccgtgggcgcggctgtccgtgtaccgcgtgcccaagtcgctccgcgacggcgacgagcgcgcgtacatgccgcaggtggtgtccatcggcccgctccaccgcggccggcggcggctgcgggagatggagcggcacaagtggcgcgcgctgcaccacgtcctgaagcgcacggggcacgacgtcaccgcctacctcgacgcgctgcggccgatggaggagcgggcgcgcgcctgctacgacggccgcgtcgccgggatgcaggggaacgagctcgtcgagtgcctggtgctggacgggaccttcgtgctggagctcttccgcggcgcgcaggacggcgggaaggggttcggcgacgacctggggtactcgcggcacgaccccatcttcgccatgcgcggcgcgatgcacgccatccgcaacgacatgatcctgctcgagaaccagatacccctgttcgtgctcgacctcctgctcggcctccagctcggcaacccggagcagaccggcgccgtcgccggcctcgctgtgcgcttcttcgacccgctcatgccgaccgacgagccgctgctccgcaaggaccggtccaagctggagtcctccatcggcgcctcaccggcggcggcggcgttcgagttcgacccgctgtccggcccgatgctccattgcctcgacgtgttccggcgcagcctcctccgcgcggggctgcagcccaccccgccgccccccgcgcggctgtggctcaagaagtggtcggggctccggcgcgtggcggacaagcggcggcagcagttcgtccactgcgtgtcggagctccgggaggccggcatccggtgccggcggcggaacacggaccgcttctgggacatcaggttccacgacggcgtgctccagatcccgcgcatcctcatccacgacggcaccaagtccctcttcctcaacctgatcgcgttcgagcaatgccacatggacatcgccaccccgggcggcaacaacatcacctcctacgccatcttcatggacaacctcatcaactccgccgacgacgtcaagtacctccacgaccgcggcatcatcgagcactggctgggcagcgacgccgaggtggccgacctcttcaaccggctgtgccaggaggtggtgttcgacatcaacgacagctacctctcggggctctcggaccaggtgaacaggtactacgaccacaagtggagcacctggatcgccagcctcaagcacaactacttcagcaacccatgggcgatcgtctcggtggtcgccggtgtcttgttgctgctgctcaccatgacgcagaccttctacggcacctacagctactacaggccgatgcattgat

SEQ ID NO: 71707 - DNA, 289 bp, Oryza sativa
  Clone ID: PAT_MRT4530_72155C.1
tcgttaccctcctctcctcccctcctcgtcgcggggctagggttacgccccctgctcctcctactcctcctcctactagtgtgggggcatggccgggagcgaggcggtggctgcccacgaggcggagatggacccggacttctcgggcgggggcggggggggccccagctacgagtacgccttcaactcggtcaacatctttcgaccgggtgcatacggatccaggtccttcgcgggggacgacaacgacgaccacgaccacgcgcccgggttcagccgggaccgctgg

SEQ ID NO: 71708 - DNA, 123 bp, Oryza sativa
  Clone ID: PAT_MRT4530_72156C.1
tttgtttttttaccaagttgtggctttaatattcgggttgaaaagagattacacatttggagcttgaaaaaagggggtccaccgccaaaagatgtaggggtggtgcactatgctagagatata

SEQ ID NO: 71709 - DNA, 153 bp, Oryza sativa
  Clone ID: PAT_MRT4530_72157C.1
tcctgcggccctgaccagcttgaccttgcttatagaagtctgaaccttcttgatgatctagacgctgagagtggccatgacctcaagactttgatgtctcttaacgataaagctccattaagcccacctgtggaagcttcatcactacgaact

SEQ ID NO: 71710 - DNA, 275 bp, Oryza sativa
  Clone ID: PAT_MRT4530_72158C.1
tcttatactcaactcaaaccaaccaaattggaggggtttatttaacatactcggggacacaaccaacacctgcccaaacatctgctcaccaatctcaaaaactacataacgcaacgcgtacatctgttactaacatcgcacccgaaatagaaccaccaaactcactactcctaccacaatatttcaagactctaacaattctatcaacacttgaaatgaaacatttcatccatctgcccgatttcacgatgctattgttgactcttcaaaaacta

SEQ ID NO: 71711 - DNA, 1543 bp, Oryza sativa
  Clone ID: PAT_MRT4530_72159C.1
atttgctcggggagttcgatgaggagaagaggagctgcacgaagcggctcgacgggcacaacaagcggcgtcggaagccgcagcctgatcctctgaaccccggcaaccttttcgccaatcaccacggagcggcatgattcacctcgtacccgcagatcttctcgacggcacgcgggggcgcgggcgtctatttgttgcgcgggcgcgggagggggacggcgccgccgctactgctataaggagcgcgccgtgcaccgcctctcacaatgtcgaccgccgccgccgccgccgctgcccagagctggtgcttcgccactgtcaccccgcgctcccgcgccacagtcgtcgccagcctcgcctccccatcaccgtcctcctcctcctcctcctccaacagcagcaacctcccggcccccttccgcccccgcctcatccgcaacacccccgtcttcgccgcccccgtcgcccccgccgcgatggacgccgccgtcgaccgcctcaaggatgggttcgccaagttcaagaccgagttctatgacaagaagccggagctcttcgagccgctcaaggccggccaggcacccaagtacatggtgttctcgtgcgccgactctcgcgtgtgcccgtcggtgaccatgggcctggagcccggcgaggccttcaccgtccgcaacatcgccaacatggtcccagcttactgcaagatcaagcacgctggcgtcgggtcggccatcgagtacgccgtctgcgccctcaaggtcgaactcatcgtggtgattggccacagccgctgcggtggaatcaaggccctcctctcactcaaggatggagcaccagactccttccacttcgtcgaggactgggtcaggaccggtttccccgccaagaagaaggttcagaccgagcacgcctcgctgcctttcgatgaccaatgcgccatcttggagaaggaggccgtgaaccaatccctggagaacctcaagacctacccgttcgtcaaggaggggatcgccaacggcaccctcaagctcgtcggcggccactacgacttcgtctccggcaacttggacttatgggagccctaaatccgaccgtccgtccgttcagttcgtcagtttacgccaacgcttttgcataagtactacctgaggatatcgtccccgatcatcgatgtgaacgcgtggagtactactacgtacgtaccggatggttcgatatatgtgaatgctgtattaagtaataacaagaaatatatctcctctactttttcctgacgcggagttgtactgcctatgatgcataatttgatcgcagtgtgatcaaaagacatcagctataatgtcttaataatattattatgaagagtttacctttttactaccttttaaaaaaaaaaaaaaaaaaaagagaactaaaactagatgtagatcgcgagtccgtgcgccgactctcccccgtgcccgtcggcgaccatgggcctggagcccggcgaggccttcaccgtgcgtaacatgggcaacatggtcccagcttactgcaagat

SEQ ID NO: 71712 - DNA, 2970 bp, Oryza sativa
  Clone ID: PAT_MRT4530_7215C.1
atggcgcaagacggcaagctcgacctcttgctcaagacgattgaggagaatgagaagcggagggtggaagccgaggagcgctcgcgtgcagatctgatggaactcaagaagaacctagaggtacgcatcccactggtggagaagaaggtggatgaattggggggtacgttccaagatctcaacaagaaggttgatctgttggagagcagtatcacgaagaagtatgaagaaattccatcaggaattccgctccaggggtcaccaagtcaagacacctcctggttggttgtctgttcacgattcactagagacagacaggaaggcctaattcgccagtggttccatgtgcagcaaactggtactgtagaagagtatgtagagaagtttgacagtttgatgcaccagcttattgcttatgatggcactctgaaacctgtttactttgtgacaagttttgttgagggactcaaggatgaaatcaggggtgtggttttagttcagagaccttcagatatggactctgcttgtgcaatagcattgttacaggaggaagctcttgttggtactaaaccaagtggcatccgtagagtggaagttaacccaggctataaacatgttactagaattaacaatcctgtctctgctcctaatacccctagaactggaacatcttattcacctgaagacaggaggaacagtgatgccaacaaggcaaaggaagagagaatttcagctcttaaggcctatagaaaatctaagggtctctgctttgtttgtggtgaaagatggggaagggatcataaatgtgccacttcagttcagatacattttgtgcaagaattgttggaagctatccatgatgactctgaactaaaattcagtccaatgcacattgattgggttcacaaatggatggaattccaatcaaatgatcagtctatcaagctccaaggcatggctaaggaaggagccctcatgtacatggtacaactattcatgaatgaagaagaacagatagtacccacttctgagctcattttaccactgctgcaaaagtttaaggatgtatttgaggaaccaaaaggactgccaccacagagatactgtgatcatagtattcctttaattcctggttctaaacctgttaatttgagaccttacaggttcaatcctgcacttaaggatgagattgaagctcaaatccaggagatgcttcaaacaggagttattcaaccaagccaaagtgcattttcatcaccagctcttttggttaggaagaaggatgctggtgcaaaatggttcacaaagctaaatttaagggcaggctatcaccaaataagaatgaaggctggtgaagaatacaagactgcatttcagactcatacagggcattatgagtataaggtgatgtcctttgggttaactggagccctagctactttccaaggtgctatgaatgatacattgaaattagtactaagaaaatttgcacttgtattttttgatgacattctcatctatagcccagacctagaaactcatctgtcacatatagatcaagtcctttcactgctcagggaacacaattggaaggtgaaattatcaaagtgctactttgcacaacaacagttaacttatttggggcatgtaatcagtgctgctggggtatcaactgatccagacaagatctactatagaaaggggactagtaatgcagcagctgatgcactctccaggaaatatcaagaagatggtgaattagccctgatttccagttgtactccactatggatacaagatgtcataaaaggatatgaaggagatgagtactcaacaaaattgataacagctctggctattaatcctgaatctagtcctcagtactccttgcatgatggtttaattaaatataagggaagaatatggattggacacaatcctgagttacaactcaagttgctgcaagagatgcactctagtcctatgggtgggcattcaggttttccagtgacatacagaaaacttaaaagattgtttgcctggttaggaatgaagaagatggcaaaagattttgtgcatcagtgtcaaatctgtctacaagctaaacctgatagaaatcggtacccaggactattgcaacctttacctgtgccagaaggggcatggcaaatcatttccatggacttcattgaaggacttcctcgatccttcagatatgattgtattctggtcattgtggacaaattttccaagtatgcccatttccttcctctatctcatccctatactgcaattgatgtagcaaagctattcatggtcaatgtctacaagttacatggcttgcctcagaccattatttcagatagggatagagttttcactagccagttatgggagcagctattcaagggagctggaacacaattgcacatgagcacagcctatcacccacaatcagatgggcaaactgaaagagttaaccaatgtttggaaatctatctcaaaagttttgttcatgctactcctactaagtggttttcttggcttcatttggcagaattctggtataaaactagttatcattcttccctgtcatcatcaccttttgatgttttgtatggtcatcctcctagacatttcggcatcagttcagctgattgcgctatacctgacctggctctcaagggtgctaaggatttccaaccaccagtgttgtccgacctgcctggccctaaccaagacctgcaattcccagctcgtctcctggattcctgtacttacatgaaagccaattgtcaaggaaaggggattgtcagtgaacctgaagggatgacgaagccaagcattgtcgatgacggtgaacagttcactgaagaagaaggagatgctgatacaagagtgggccggatatatccaagacgcgcaagaaagaagaacccattgtatactgggccagattgggccatgtaa

SEQ ID NO: 71713 - DNA, 125 bp, Oryza sativa
  unsure (1)..(125): unsure at all n locations
  Clone ID: PAT_MRT4530_72160C.1
gagctgcccaccttcttttctgtnctggaattcattaccctgtgcatgcgcacatccagctagctaagatgagtcctaggctacagcatctggccgatgtgcagttggagtctgactctttagtt

SEQ ID NO: 71714 - DNA, 1597 bp, Oryza sativa
  Clone ID: PAT_MRT4530_72161C.1
cggacgcgtgggcggacgcgtgggcggacgcgtgggcggacgcgtgggcggacgcgagcgcgccgtgcaccgcctctcacaatgtcgaccgccgccgccgccgccgctgcccagagctggtgcttcgccactgtcaccccgcgctcccgcgccacagtcgtcgccagcctcgcctccccatcaccgtcctcctcctcctcctcctccaacagcagcaacctcccggcccccttccgcccccgcctcatccgcaacacccccgtcttcgccgcccccgtcgcccccgccgcgtgatccgggaggccgcgacgaccgccagcgaacggaagggaaaaaaaaaagtcaaaaactagagccgatcgtttgatccattcgatatagggaagatgagtggatgcctctgcctcccccgctataaaaaggccccaaacgggacgccatcgccaccaccaccagcagcagcggccgaagcggaagcagcagcagcagcagcggcgacgaagccgtccatagattcttcttcctccccgtcactcctcaccaacaaccatcccccaccctccaagatggacgccgccgtcgaccgcctcaaggatgggttcgccaagttcaagaccgagttctatgacaagaagccggagctcttcgagccgctcaaggccggtcaagtaaccctgattcaccccaaaaaaggcgccctcggcgacgaactgggctgatcgttctgacggacagtcgagatcttgagctccagatcaggtggctggagttgcagttgcacctgaggctttgccaccatcagagaaggatggattgttcttggttgttcgctgctgctgctgctcactgctggtgatgaacagcttggcgtcagggttaaggatggaggaggcagcagcatggcttctggctgtgccatgctgctgatacccagtgacagtgcagggaatcccatttcagcaggcacagaggctgtctcgtgtctcagtttcagacgttcattcacactcggagccttttctgcatcctcaatcacgtcaaagaggctggatcttctcttcttctgcgtgaggctgctctgcctgaggaaatacttctgggcatggctggccacctgcgtcggtgttcttgtcgtgacgaagtgccgggaaatgccgcgccagtcgcctttcccgagcttctcgagccctaccaggaatttcctgtgctcctcttcagtccatggaacacccttcttcctctcctgagctctcgccatgaggccatcggagaggtacccgttggccatcttctcgccggcctcctccaccgacaccagcgacgacgacgacgacacggtcggcgacgagttggaggcggcggcggcgaccgcggcgtagtacgccggcgacggcgacggcgacggcgacgataggcactccatgctgaagcacttcttcagaggcgcaccgccgacgtgcaactgcaccccgaacaacctcacgccaccggcgccaccgccgccataaccgccgccactctcctgcaggctcctttggccggtgcaagtcctggagttgtggccattgttcccgcagctggagcatttcctggccat

SEQ ID NO: 71715 - DNA, 736 bp, Oryza sativa
  Clone ID: PAT_MRT4530_72162C.1
attagttctcttcgtctgttgggggtaggctggttttgattaattctgttcttttaagtttagctatgtttatgatatctttttttgagattctgaagggggtttttcaaacgattgattattatagatcacgcttcttttggcagggggatgatcatgagaaaaaatatagactttctagatgtgattttatttgccaacccaaagaccaaggtggtttgggggtatataatctagagattcaaaataaatatcttttgagtaagtgattgtataagttaataaatgggaatggtgtttggcaagacttattgaagagaaattatctttataataagtatataactcaaattgataagaaacaaggtgattctcatttttgttaggactcatgaaagtcaaaaatactttcttaagtatggattcttgaattgtgaataatggggaatagacaagattttaggaagataaatagctaggaaacttggcctttagagattaatatccatctttatatgctattgtcagaaggagaagttcttctattactagtgttataggttctgttctatttaacgtttcttttaggagagctttagttggtcagaatctaacatattggtatgaattgtatgcttcaattgttcatatccaattgaataactcttctgattattttagataaagttatcatcagaatggtcagttttctgttaggttaatgaactttcatatt

SEQ ID NO: 71716 - DNA, 750 bp, Oryza sativa
  Clone ID: PAT_MRT4530_72163C.1
atgggaggagctacaaacttacctccaggtttccacttcttcccctcggatgaagagctcgtcgtccatttcctccgtcgcaaggtctccctcctcccatgccaccctgacatcatcccgacgctgcttccgcatcggtacaatccatgggagctgaatggcaaagcactgcaagctgggaaccagtggtacttcttctgccatctaacacaaagtaggacctcatccaatgggcactggagccccattggagttgatgaaacagtaagaagcggcggccgcaatgttggcttgaagaaaacgctgctattctccattggagagccctctgaaggcatcagaaccaactggatcatgcatgagtaccatctgctagacggggattgcgtcgctggcggtagcagcaacttgactagctcgagctctaacaggaggtctcataggaagagaggccactcaagcatggagtccaacaactgggtgctgtgccgagtgttcgaatcgagctgcggttcacaagtgagcttccacggtgagggcaccgagctttcatgcttagatgaggtgtttttgtcactagatgactacgatgaattgcttgctacatcaaactatcttcgcatctgtatggacattgtgttctatcaccacaaagaaaaaaggaaggtgggtggagcttacgcgatcatatggccatctatgctgtcaatggaaatcatgcatgcttgtgtggaaatcgcgctcagatga

SEQ ID NO: 71717 - DNA, 2953 bp, Oryza sativa
  Clone ID: PAT_MRT4530_72164C.1
tttcgtatcaaacatcatcagactgtatacctttgcatctcttaatgaatgcagtcttttttttttttttttttttttttggaaaaaaaatgtcgtaaccatcttagttgatctcggggttaaatattcacatttaaattttcacctgtcaatcagtcaatctagctaacacgtgtgaatatgtacatcatgttaacttgcacaaattaaaaaatggatatgaacaagcaggaatggctgcagaataaagaatgagaacaaaccgctactatcagggtgtaggcctgcactagatgatcaatgtacacgcacaaggcattgccaaggtaggtaggtagatagaaataagatgttgctttgctgtatatgaagtcgtcagatttcttttgatccatgcgtccggtgcctgcctagccagtctaggactgtcagtaagctcagcggaatgtagagctgtcgtcacagagatctcatgtaaacagacataactgctttccatagaaatatgctggcagcatgtgaaaattttgctccttcagtcttcagtgaagctgcattgctcctaaagtggcattcatatacattctctctatttgctttcagctgtactgagaacaactctatcctggactcctggtcagaccaaacgttctaccggtgaatcaggacaacttgctgccgtttgcgcttccagaactctctgcattgcatagtgacacctccatggtaggtgatccgtaaacatcgaaggagtaacggcaagatcagtgaagttctccctttttgcaaaaaaagctttatatggtggttcacttccctgcaagctccagcatttccaaagagggaagaggcttcttctttgccgctctatatgaacaactaggcctggaagaaacatttcaggaggctcaactggtatatccctataagatgtgtgacgctgttctgaaccagaatcgagcccatgaagggaaattgtctgggcatcacaatcagtatgtagaccctgagagctcataacatctatggatgaattagacccattatacccattgatgccattttgcaaaattgggaggtctggctcagaagtacaaggtgcatcctggtgaggaaaccgtcgttcagtagatactgccctcccatcaggaccattatcatgatacttgttaacattcaaaattctgcgagcaagtttctgtatcattgctgtatcagctggagagttatctgaaagagcccttattgcagcagaccgcagcctcagaattgagttgattgaaaggcgagaagaaaactcatcattgcacacaatggttgtaacaaattgcgaacaggcttcagctattacaaagtccacacaaggtagtggtccgtatgcatatacatgcacgtttggatacctgccaaaaagcatcattccaagaactgtagcaacagaaccccctaaagaatgcccaacaactcgaattttatatccatggcattcactgccttcccccaccagtgcaggaagaaatccaactgttagggatgacgaattatctcctgtgcagtcgttgagttgcatgaaaagctccctggcggactctagaattccaccatgtccataatgcggaaaggtagaaataactctctcccttgtagttgcaggtaactgttcacattttactagtccatccaaatcctccatagtaaatgcacattctctgcataatccatcggttatgagatcttctggtgtttcagttccacgaactccaataacaactgtctttttgtcatggaggaccacgacaaagtaagcagcttccctcttgctctggcaaacacggccccgtagaagtgctgcagctggtatgtgaacaaatcgaaggaaagcggcagcatgccctcgccaccagttgtcaccatcaagtgcagggcgccttctgcgcgaccatggagttaaaacaccttgtctgtaaacccatgcacatggaaacaaaatagggtttctcccaacatcaaggagaggtcccgtgtaacatgcttcagcaaagggatgaaggatagcagcttcttgcataaggttcagtggcgcttccgtaaggtcagtttgcaaatgaggcaaattttcatttttctgtaatagtgcaagccctgctaaaagttccaaatgtcctgtcccagaagcacgatatgcaaccaaatcacccagaagtcttgccacagagtaaacctcatcctcttccaatacggtttttgcacgccctaggcagcataaagcttctcgaattccatgatcgaacacttccctgtaatgagctttccatgccatgtcatgtgttgcatagaacgacctccaccttaatatatcagaacccgtgaagcattggacaacgaccacaacccaggaaagaataagaaacaaagcaattaatgctcgtttcgagacatgatcagcttcatcctgtccaaagaaacaggaagtggctcttctttcatttgaaatatctctgacaatgacaagcatgagataaattgccccaaccaattgcattgcacccactgccatgccgaatctagtccaccacaaccagcgtttatacctcaccctgatctcgtggcgcgcaacggcgtcagcggcgaccgacgctgcggcctcgtcgaggtggcgcctcgcgatggcatccgccgtggcgtgctgcgcgcgcgcggtgccgatcatggcgagcacgcggatccccgccagcgcgggcgccgcggcgagcgcgagccccccgccgcaccccggtgggagcacgccgtcgatgaggtagagcccgagcagcagcacggccacgttgaggcccccgacgaggaacgagaccacccgcaccatcccgagccggaaggaggcggcggccgcgccagccgacgacgacgccgccgccaccgcagcagcggccacggggtcgccggcgcccgccat

SEQ ID NO: 71718 - DNA, 1527 bp, Oryza sativa
  Clone ID: PAT_MRT4530_72165C.1
ccccggccgcggccgggccggggctcctcctcttcttcttcttccgctctctagctttgctttgcttgcttcatcaaaccccacacacgcacacaacaacaacaagagtaatcaaagtagaagaagatggtttcggccttgttgcggacgatcctggtgacgggcggcgccggctacatcggcagccacaccgtcctccagcttctccaactcggcttccgcgttgtcgtcctcgacaacctcgacaacgcctccgagctcgccatcctccgcgtcagggaactcgccggacacaacgccaacaacctcgacttccgcaaggttgacctccgcgacaagcaagcgttggaccaaatcttctcctctcaaaggtttgaggctgtcatccattttgccgggctgaaagctgttggcgagagcgtgcagaagcccctgctttactacgacaacaacctcatcggcaccatcactctcctgcaggtcatggccgcacatggctgcaccaagctggtgttctcatcatccgcaactgtctacgggtggcccaaggaggtgccctgcactgaagaatccccactttgtgcaatgaacccctacggcagaacaaagctggtaatcgaagacatgtgccgggatctgcatgcctcagacccaaactggaagatcatactgctccgatacttcaaccctgttggagctcacccaagcgggtacattggtgaggacccctgcggcatcccaaacaacctcatgcccttcgtccagcaggtcgctgttggcaggaggccggcccttaccgtctatggaaccgactacaacaccaaggatggaactggggttcgtgactatatccatgttgttgatctagcggatggtcatatcgccgcgttaaggaagctctatgaagattctgatagaataggatgtgaggtgtacaatctgggcactggaaaggggacatctgtgctggaaatggttgcagcattcgagaaagcttctggaaagaaaatcccgcttgtatttgctggacgaaggcctggagatgccgagatcgtttacgctcaaactgccaaagctgagaaggaactgaaatggaaggcaaaatacggggtagaggagatgtgcagggacctgtggaattgggcgagcaagaacccctacgggtatggatcgccggacagtagcaactgatccagctgaatataggcgtccaatcctccagtagcagcagcagcagcatgacttctatacatatatatatataatcataaagaatgaagaaacaaagaattcggacttgttgagttactactactactactactaatcccatctgatggaccgcattgtatagggggcttgtaggggtccagcagcttcatcatcagtctccttaggaggcctctaatataatctccatatttatggtagaaataaattttgcccaccgtggaagaactatataatagaatcatgatgatttgttgattcaaaaaaaaaaaaaaaaaaaaaaaaaaactcgagggg

SEQ ID NO: 71719 - DNA, 1165 bp, Oryza sativa
  unsure (1)..(1165): unsure at all n locations
  Clone ID: PAT_MRT4530_72166C.1
tagaaatatgctggcagcatgtgaaaattntgctccttcagtcttcagtgaagctgcattgctcctaaagtggcattcatatacattctctctatttgctntcagctgtactgagaacaactnctatccggactcctggtcagaccaaacgttctaccggtgaatcaggacaacttgctgccgtttgcgcttccagaactctctgcattgcatagtgacacctnccatggtaggtgatccgtaaacatcgaaggagtaacggcaagatcagtgaagttctccctttttgcaaaaaaagctttatatggtggttcacttccctgcaagctccagcatttccaaagagggaagaggcttcttctttgccgctctatatgaacaactaggcctggaagaaacatttcaggaggctcaactggtatatccctataagatgtgtgacgctgttctgaaccagaatcgagcccatgaagggaaattgtctgggcatcacaatcagtatgtagaccctgagagctcataacatctatggatgaattagacccattatacccattgatgccattttgcaaaattgggaggtctggctcagaagtacaaggtgcatcctggtgaggaaaccgtcgttcagtagatactgccctcccttcaaatgtgtggtgcctagcactatagtcctccattatgccaccatcaggaccattatcatgatacttgttaacattcaaaattctgcgagcaagtttctgtatcattgctgtatcagctggagagttatctgaaagagcccttattgcagcagaccgcagcctcagaattgagttgattgaaaggcgagaagaaaactcatcattgcacacaatggttgtaacaaattgcgaacaggcttcagctattacaaagtccacacaaggtagtggtccgtatgcatatacatgcacgtttgcgtacctgccaaaaagcatcattccaagaactgtagcaacagaaccccctaaagaatgcccaacaactcgaattttatatccatggcattcactgccttcccccaccagtgcaggaagaaatccaactgttagggatgacgaattatctcctgtgcagtcgttgagttgcatgaaaagctccctggcggactctagaattccaccattcggacgcgtgg

SEQ ID NO: 71720 - DNA, 825 bp, Oryza sativa
  Clone ID: PAT_MRT4530_72167C.1
atggcatgtcgccagcaccgtcgtcaggacgtggccacggttgggtcattggaagtccaccgcccagaagttggcaacgtcggggcaactgcattgtctctctcttgctcgcatcacgcattccctgctgcgtcccgtacccaagccaagctccgatccatcacaatcaccagccgcagctacaaccacagtgaaacgcggatcgaaagttgtgaccgagtagggggcaggagggatgaatataaagaatggcaggggttcggagatgagggaagcgatggcgggtgcgggtgcgggtacggcgccgctggcaaggcaggggttgatatagtcgttaatgttcgacaagttctagagtacactgggagggatgggagacaggctaaggaaggattttgggtccatgaacatggacgagctgctgtggagtatctggacggtggaggagagccaagcaatggcatcggtgttggggatggggagaaggatgggagggcgcgcgacaaggatgacgaacggggcgagacgggaagaagacgactcgctgaggaagacaatgctacttgccgtggaagtttgctcctccacgccgttgaccgtgccctgtggccccttcctatcagtcggcatgggttgggggacggaatggctgagctagcttctccccgccgtccactgtcctcctcgctacatgtcgtcggcgctcgtcgtcgattgtcgtcctcctcattgctcgccgcctgctgcccctccacactgtccgcagctagccaccaccctggtgagatgggaacggaggggagggagagagataaaggtcactga

SEQ ID NO: 71721 - DNA, 402 bp, Oryza sativa
  Clone ID: PAT_MRT4530_72168C.1
atggatggacaggaggctatcttgtctgggaatacgctgcctcacagacagaaccgctgcaaccacaacagccatggctgcgccgcttccacgccttcagtcaccattcaccaatgtgttgtcaccattgcccgggacctcagcctcctcgggcaggctcctcgccccccgatcatggatcagccgccagcaaccgcgagagggaccgcgccaccgctgccttccgatagcggcagacggaatgcaccggctgaggagcatgtctcctcgagctccgatgagccaccgaacgacgaaaacgacgacgaagacgcggaggagcaaatggaggaggcacgaggtgggaggcggcaggtgttggcgatgggtgtcagctgccgctgccgccggcggccgcgatag

SEQ ID NO: 71722 - DNA, 290 bp, Oryza sativa
  Clone ID: PAT_MRT4530_72169C.1
ccgacgacttcgactggagagaccacggcgccgtcggccccgtcaagaaccagggggcgtgcgggtcgtgctggtcggtcagcgcgtctggggcgctagagggagctaactacctggcgacgggcaagatggacgcgcttttcgagcagcagattgcctatctgtaccatgagcgtgatatattagaatctgattcatgtgacgttggatgcaattgtggtctgatgactaactctttttgtttttcttcgtaattctctttgcttcttttatgtgaatagtatttctcc

SEQ ID NO: 71723 - DNA, 1749 bp, Oryza sativa
  unsure (1)..(1749): unsure at all n locations
  Clone ID: PAT_MRT4530_7216C.1
ggccgttgctgcggcgaggcacccgcacgacgtgcagtccgtgccggactcgccgatgattgacaagaactcctcgttcggatcaacgtcctctgcgccatcgctgtcgaatctaccgccgatacgggtgcggcccgaggatcgcccgccggatagccgactcgccgtcgcanaatcccccccgccgctcgcgccgccgccgccgagagcgagacccgcacgaggagccaagcatctctgcgttctacagctccgggccaccggcgatgaagctcgtctaccgcaacctcgcccgcaacggccccggctccgtcaagctggtgccggaggaggaggacgacctgtggcatgcctacaaccttattgttccgggggataccctccagtccgtcactgtgaggaaagttctgagagagatggcatctggaggacgtgatgctgagcgtgtgaggttaaagttggaaattgtagtcgagtctgtagattatgataaggagggatctgtcttgcgtgtacgtggaaaaaatataactgagaacgatcatgtgaagattggacagtttcatactgtggagcttgagctgaagagacaatttactttgacgaaggcccatcgaggggttggggtcatggccactattgggacttgtcaattgtgtggggatgtggccgtggctctggagaactcgtcgcttgtgggggacattgccatcggggacatcggtgggggacatggcctctgtgaaggtctttgccgcttacctgaggagagattgctatttctacttttgcaggaactttgggattggttagctcttgataccatccaacaagcatgtgacccaactgcaagtgctgatctagcagttattctcatgcaagaaggacttgcacatttgttcctcattggtagaagcataacagtaaccagagcacgtattgaaacatctattcctcggaagcatggccctgcgattgctggttatgagtcggccctcaagaagttctttgaacatgttttgcaagctttcctgaagcatattgattttgaagtagtccaatgtgctgtaattgcaagcccaggttttactaaggatcagttccgcgattatatgcatcttgaagctgcacggcgagacttaagattaataattgagaacaaacagcgcattgttcttgcacatgcaccttcaggttacaagcatagcctgaaggaagttttggatagcccaagtgtgatgacactaataaaagatacaaaggcggcgcaggaggtccaagctttgaaggacttcttcaacatgcttacaaatgattcagctcgagcttgttatggacctaagcatgttgagattgcaaatgaacgtcttgctatccaaactcttttaataacagataatttgtttcggaactctgacattgcaacgaggcaaaattatgtgcgcttggttgaatcggtaaaaaaattcggtggcacagtgcacatcttttcttcaatgcatgtctctggtgaacagttggcgcagttgacaggaatcgcagctatacttcgatttcccttgccagatttagaggacattgagatgtgataattccaccgttcagaattggcaatatgctaacttgtaattcatgtgtaatcctattcagttgatttgatataggtaactcttaagaaatctgaaccacagtatatcctagctgtaaatggtttgcatgccatatttgttgattgtttttttacttaac

SEQ ID NO: 71724 - DNA, 969 bp, Oryza sativa
  unsure (1)..(969): unsure at all n locations
  Clone ID: PAT_MRT4530_72170C.1
cccacgcgtccgggacgttttgtgccaaatatcacaatcggacctttggttgttgatgctctgcggccagtcactgatcttccgttggatgtgcatctgatgattgtggaacctgagcaacgagttccagattttatcaaggcaggtgctgatattgttagcgttcactgtgagcaatcgtcaaccatccatctacaccgaacagtcaatcagatcaaaagtcttggagcaaaggctggagttgttttgaatcctgcaacccctctcactgcgatagattatgtacttgatgttgttgatctagtattgattatgtcggtgaatcctgngtttggtgggcagagctttattgaaagccaagtgaagaagattgcagagttgagaagattatgtgcagagaagggagtaaacccttggattgaggttgatggtggagttggtcccaaaaacgcctacaaggtcattgaagctggggaacgccattgctgcagcgttttcagactatgcagaagctatcagggaatcagaaacctgtacataatctatcgcagtgagaggggttgcctcctacgcgtccgcaccaaatcaaaagctctcgctgctcctcgagagggagttggtggagagagaaagagagagagagagatggcgtcgccgtcgtcgtcctcttcgctgtgctcgaccttcgcctcgccgcgcgccgcctccctcggccgccgcctcgccttctcctcgcccaggaaagcattccgagtgagggcatcatccagggttgacaagttctcgaagaatgacatcatcgtgtccccttccattctttctgcaaacttttccaagcttggcgagcaggtaaaagctgtggaggtggcaggatgtgactggattcatgttgatgtcatggatggacgttttgtgccaaatatcacaatcggacctttgggtggtggtgctctgcgggcagtcactgat

SEQ ID NO: 71725 - DNA, 324 bp, Oryza sativa
  unsure (1)..(324): unsure at all n locations
  Clone ID: PAT_MRT4530_72171C.1
gtttnnaaatcacaccgtccccttcctcctcctcaaanccgccnttncgggcgccgctgctcatcaccatntcggtngactcctcncaaccccatggatacgagacacattcaacacctgtttttnttnctnttcggggaaagagaaaaaatcgggantcaaaaatattttnccctgaaaccanttcttcnagggtgttgtgttnntntnganaaaaacncaanaccccgaaaanntaagggnnnagtattnttaaaaagggggggnatanatcttcatngtntcacnntgccgacaanaanntatcccnanaaacgaaaaaat

SEQ ID NO: 71726 - DNA, 218 bp, Oryza sativa
  Clone ID: PAT_MRT4530_72172C.1
tataatcactgtgtgcgcacctcaaagcttcggtggtagttttcagaattatcccccaagggtcatgagaaggcggacatcaagaccatagtctttgtcctcgtaggcacggtgacgtgcagctccacgggcctgttgacctacaagctcggaggtatctgcaagcgtgagagctagaggtcaaagaaggaagcccctgatatgaacaagttgtggat

SEQ ID NO: 71727 - DNA, 163 bp, Oryza sativa
  Clone ID: PAT_MRT4530_72173C.1
cttttcccgctgttggaaagagacgaaagccagcggggagctctatacggtgatccgaggctcgcctaccggcgagagcttgcctgtctcgggaggttctcaggtcgatctgacatcacagggatccactggggaggggagccaacggggtggcactctcata

SEQ ID NO: 71728 - DNA, 120 bp, Oryza sativa
  Clone ID: PAT_MRT4530_72174C.1
atggctgctgttgtgatcataacgttcaatctcctttctggtcggttgacgcagcagggcgtcggagacgtatactactcagtaatgatcgaggcccagatacatcattggcaagcgtga

SEQ ID NO: 71729 - DNA, 331 bp, Oryza sativa
  Clone ID: PAT_MRT4530_72175C.1
ggggaagcaacacttggatgtaaattaagcgcatgaaaattacacaccaaatatgagccttgaccaggcccaaccaatcaccatggtacaaccacaaatagttttaggttttggcggggctgaaaccatacccaatttaaaatttatttttggaagaggcttaatttacttttctctggggcaaaacacaactcccctgtgtctgcaggccttcatgaggggggctcgtctaattggtgctgggcatgggaggggtcaaggcgaacacacgggtgctggttccccatgggggggcgtgccaagccgcaaccttaaaaaacgggtagctcaa

SEQ ID NO: 71730 - DNA, 1041 bp, Oryza sativa
  Clone ID: PAT_MRT4530_72176C.1
atggctgtcttcctcctcaagtccaaggcaatacccacctccgtcatagccttcgccggcgatgtcccgctcctcgccggcggcgtagttcaggacaacggcatctcgccgcgtacgccgatgagtatattccgtacaagcccaggcgagaagatgctggagatggctggtctcattgcgggcggcctcgagaacggcatggtcgccatgtggaacccggacctgaagctccggaaactaccttcttatctacctgacgaggagatcctcaagccccacccagatggcgttcaaacttggattcgcaaggacttcgaggtcatcgaggactacctcgaccaagttcaagttgatggaaactccagggctctacatctccaagtgtcccccacttatcaggaaatgtctggaaatttgatggtggaataccaagacgacattatgtgtcgcaccagcagctctggcgttgttgctttgtttgccaaacatactggaaaggttagaggcctgtcgttcaaccccaatgcaccgaatctgctggcttcgggtgctgctgatgggcggattatgctgtatgaccttgcccatcctttggctgagacaatccctgttcagttatgtgattctcctgatgaagaaatatcttgcctctgctggaactcctataaagttcatgtcatagcatctacaaccacttgtggaagaatatgtttccatgataccagagcaaaaaccatcattggatgtaccactcttgattgcaaaactaagagcggatcaactgtgatcttttgtcctgatcctgattcagaaaagttgctggttgcacgggaagattcaccgtctgtaaagattttgaacatgggaaacacggatcataatcctgctggtgaaatccccttcagtaactcagaaggtatcgttgctatgtcttggtgcccacacaatcccaacttactgcttgcgtgtaccaagaacaacaagattttggtctggaacaagaaaactaacaagttggatggagctgatgtagctgagtga

SEQ ID NO: 71731 - DNA, 3012 bp, Oryza sativa
  Clone ID: PAT_MRT4530_72177C.1
atgtgcaattcattatatgagaacgggacagatcgactctcactgcttgaattcaaaaaggcaatcagtatggatccacagcaagccctgatgtcctggaatgacagcaattacttttgcagttgggaaggtgtcttgtgcagggttaaaactccacatcgtgtcatttctctaaaccttacaaatcgaggtttagttgggcaaatatctcctgcacttggcaacatgacattcctgaaatttctctccctatccaccaattcattcacaggagagatccatttgtcccttggtcatctgcatcgtcttgaaaccctcgacttgagcaacaacacactacaaggagacatacctgactttacaaattgttccaacctcaagtctctttggctcagtcgcaaccacttagttggacaattcaacagtaatttctcccctcggcttcaagatttgattcttgcatctaataatattactgggaccatcccttcctctcttgccaatatcacatcgctacaacggcttagcatcatggataacaatattaatgggaacatcccacatgagtttgctgggtttcccatactacagatcctctatgctgatgggaataagttggcaggtaggtttccacgagccatcttgaacatttttactattgtgggtcttgcttttagttctaattatctaaatggagaaataccgtccaatctctttgattctctgcctgaaatgcaatggtttgaagtagactataacaacttctttcaaggaggtatcccaagttctttggcaaatgcttccaagctgaaggtttttgatatatcgaggaataacttcactggggttataccttgctctattggaaaacttaccaaagtttattggctaaatcttgaaaaaaatcaactccatgcacgcaacaagcaagactgggagttcatgagctgcttagcgaactgcaccggcttgacagatttctcagtatctgataactgtctagaaggccatgtaccaagttcattaggtaacctttctgttcagcttcaacaattccttttgggaggaaatcaattatcaggggttttcccttctggtttccaataccttcgcaacttgattagcatatcaatcgatagcaataatttttcaggagtccttccagaatggctcggcagtctacaaaatttgcaattaataggcttatataacaattactttacagggattataccttcatccctttcaaatttatctcaattaggatatctctatctacagtcaaatcagttttatgggcatctaccaccaagcttgggaaatcacaaaatgcttcaagaattgactattggatataaaaatattcagggtatgataccaaaggagatattcaaaattccatcattgcttcaaattgatttatctttcaacaacctagatggaagtatcccaaaagaagtaggtgatgccaagcaactcatgtatttgaggctttcgtctaataagctatctggggatattcctaactctttaggtaattctgaaagcatggaaataataatgttggatcggaatatatttagtggaagcatccccacttcattagacaacatactcagcctaaaagttctgaacttgtctcagaacaacttgtcaggatctataccaccatctcttggcaacctccaatttcttgagaagctagatctttcattcaaccatcttaaaggtgaggtcccagtaaaaggaatattcaagaatgcaagtgccattcgaattgatggtaacgaggccctttgtggtggagtgccagagctacatttacatgcacgctctatcataccttttgattcaactaagcacaagcaatctattgtactaaaaatcgtcatcccattagctagcatgttgtcacttgctatgatcatatctatcttgttacttctgaacagaaaacagaagagaaaatctgtagatttaccctcatttggtaggaaatttgtcagagtttcttacaatgatcttgccaaagcaacagaggggttttcaacatcacatttaattggaagaggaaggtatagttctgtgtatcaagggaaatttacggacgaaaaggtggttgcagtgaaagtgttcaacttagagacaatgggagcacaaaagagcttcatcatagaatgcaatgcactaagaaaattgcgacaccgcaatatagttcctatcctaactgcatgtgcgagcactagttccaatggaaatgattttaaagctctattgtatgaattcatgccacaaggggacttgaataaattacttcattcgaccggagctgaagaattcaacagggaaaatcacggtaaccggatcacacttgctcaaagattaagcatcattgtggatgtagctgatgcaattgagtacctccaccataacaaacaagaaactattgtccattgtgatctgaagcctagcaacattcttccggatgacgatatgatagctcatgttggggactttggccttgcaaggttcaaaattgacttcatgggatccaatgactccaactcaatttactcaactgcaataaagggaaccatttggatatgttgccccagcatagtatcatttcgagtaaaccgttcccatccatggcggtccatagagtatgctgcaggtgctgaagtgtcgacctatggagatgtctttagctttggagttgttctactagaaatatttttacgaaagaaaccaaccgacgatatgttcaaggatggcctcgacattgtcaagtttgtcgaggtgaactttccagataggttaccgcagattgttgacccagaattactacaagaaacacatgtgggcacaaaagaaagagtcttgtgttgtttaaattcagtactaaacattggactcttctgcacaaagacatccccatatgagcgcatggacatgcgagaagtggctgcaaggcttagtaaaatcaaagaggtgtttctcagtggcaactaa

SEQ ID NO: 71732 - DNA, 489 bp, Oryza sativa
  Clone ID: PAT_MRT4530_72178C.1
atgccttcccctcctctggaagcctattgtggccgcgccgcgccctcctctgctccggctgcctgctgtggccacgtcgcctccgtcgccgccctcccctgccacggcaaccggcgggtggggaggaggctggtaggggaggcgggagtccggcggccggcgacggcaacgacgcgggagcaggagggcctccccccacgccgccgctaccgccactggtggaggaacaaggtgagtcacctcgagtgggctcgctggaggaagtcggtggcggtgtggcagaacactagctcatgctccacccaccgcgacagtggttcacctcgacggcacacacaaggggatctgcggatagatgacggcgacgatgcgtccctatcatcctcgctcttccccggcagcgctcccgccgccacgttgccactgttgtccccgcgtcaccggccaccggacctcctctcttgcgtcgccggcagccggcctatctag

SEQ ID NO: 71733 - DNA, 251 bp, Oryza sativa
  unsure (1)..(251): unsure at all n locations
  Clone ID: PAT_MRT4530_72179C.1
cccacgatagcncaaatataggccaaggcagangcttnccaacnccatgcctgtcgcccgtcgagtcttcacncgacgagctagatccccgttgntgtggnggtcactatatataagttgctggtggatcgntcgtccagggtgcaccgagatgnggntgatagatcatccacgatncgngngttcttctgacggctttcgcccggntgtggcggaggtcgtcgttctcgcaaagttatccaccgtctagg

SEQ ID NO: 71734 - DNA, 1677 bp, Oryza sativa
  Clone ID: PAT_MRT4530_7217C.1
ctaaccaactgccgcctcaatccaacataggaactccccaaagagaaggggaggaactccaagaagagtgagggtgcagaccggtaacgaggaagacgacccaccgccgctagctccgttagcactgccatcactccctttacacccggcctcggggcatacgaactgccatgtacaccccaacgccaccaccgctgcaccaaatggccagactgcagcctccgggcggaccacctcaccgttgccgtccgaccgcccatgccgcatcacgccgaccatgggccatgttctggccacgccctccgggaaggccaccgccgccgtctgcccaggccacgccacacttaccctaggccgtcgcccgaccgcagatggccgccgtgcgctgggccgcagcgccccaccggcgcatgcgccgtgccgcgacatacgcgccgcctccgagccccggccatcgcgccgagcatggggcggccagatccggccacagggcgttggatctaccgtcctccgcccaggacatgctgcgtcgccgccctgcgttggcccacgacgccccacagcccaccgcgcaccgccgtcgagctctggccgttgcgccgcccgaactagacgtggggcacccagatccagcggaacatcgcccgcgccgtcggcttctgccccaactccagcaacccggtgcacgagcacttcgccggcggtacgctggagctgctgacggggctgaggcaccagcatccgttcgactcggttgcgcccaagctgagggaagggaggcttcatgaggtcatcgacccgacgctcctcaccgggaagcagctgccggcgccgaacgaggaggtgaggaagatgttcgagctcgccgtgatgtacatgctgagcgcccagaacgggctctgcatgctcggcgtcgccaagtagctgatgcagatcgtgaggaacaacatcgggagcagcagcaagattgagatatccctcgaagagacatttctcgagctcgagcctgctgcagatgatctccatgtcgcccaagacgcgggttactcttccatctttatgcttccctagatcttccctctcaaccttggtgaattgggtctgcgtcgcaaatatttctcggagaaggtagctgcgtgatatgcagctactctcacttccactcaagcttgttcctggtttagtgacacactttgcaaagcatttgtttccaacagtctccaaatgatcaaatggagcgattgcgactcggtagaacaatggtggaaccttgtggtagattctcccaacaacccccgcattcccctgcgtactctggtgatcttggtctcccacaaactgataataccgtcgatccgaggaaggctccagtaatctcacctcgaggaactcctgcgcgtaggcctgcgcgagctgggccttgatctgttccatgagatgctccgtggacgcagtcgaccccgccgacgacggcgacgagaacgagtccatgatctccggcgagcggcggctccctccaactcttccgcggcaaagctgcgcgctggtcggcttcttcttcctcagcaagacatggagagagttatacgacggcgcggtgggcggtggctcaagtgtcaagaacccttgggtcttagcttgctcgacagcgaacgctgtcgccgctttaccccgcat

SEQ ID NO: 71735 - DNA, 1268 bp, Oryza sativa
  Clone ID: PAT_MRT4530_72180C.1
tccccaagaagcctttgattggctgacacaatatcctgaagtgttttcataattaatgtatgcaatggctgatcacccggataaagccggaatactatctgaaatagtacaaaaagcagaccaaaacagcgtaactttagctctcggtggcgatgtaacgaaattagcacagcgtccaactatatcatttgctaaacaattaatcattgcattgctctacttattgcaacataaattaaagataaatacccctaaaggtcctgcggatggttggtataccatagacggactttggttaatgagtaaatcgacagctgatcaaattcgggcatacttattagagcaaggtatatctgcaccatcggataaccctaaattatttagtgaaatgcaatcgctcaatgttattgagtcaacacctgatgatatggcaatttggcattgcagaaaaagcagattcaggatggtgtcccccgaaaccttttactctacttaaaataaagccggaaactatttgggaaaatgttagcgatcgcccagacttctttgctggaaaagtatctattgaaactatgactactgaggcagacttaacaaacaaacctgaacaggctgtaccatcatcagatttagaaacaacaaatagtgaagtcatattagacgagactgaaaatcaagttgaagcgaaaaaaaatgaaaatatgacagattttgttttggaattatttacaccttcagagcaaacaaccaatctaagtagtaacgatactatagagatagttaaacccattcaaatgatatctgaaaatatagaaaacggtacagtaattgatttaccggaagaagaaatggttaaccccaacatcatgtcaggacaagcgtttattgaatggttaagacaaggaattgcaacaaaaagactctctataaacgtaaaaaatgccaaacttcatatcgtgaagaatcacctatttttagtaacgcctggtatttttacagattattttaatagcaagggagttagttatacaaaaaaagatattgaaagtttgcaatatgcttttcaagatttaaaattgcacaaaagatatcatctacccaataaagatagccagaacttttggaaatgttcggtaattggcccaagaaaatcctcaaaggtaggtggatatctcattaaagatactgaatatttcttcggtaaacaggttctcattgacaatctacatttaacacttatagaggagaaacagaatgataaagcctca

SEQ ID NO: 71736 - DNA, 195 bp, Oryza sativa
  Clone ID: PAT_MRT4530_72181C.1
atggcgagaccagctatcgtggtggcctccgcgctcctgctggttctgctcctcatcttctccactgcatgcggggccaagctgttcgcagacgggcacgcacactacgtgatcctctgtgctgccatgggactgctcggtcggttgggccatgtagtccaacgaatagtggtggaggttggaccggcggggtga

SEQ ID NO: 71737 - DNA, 495 bp, Oryza sativa
  Clone ID: PAT_MRT4530_72182C.1
gaactattgggaagccattggagtaatcgcagctcacaaggcaggtatcaacccaaatgctcttagaagacaaggaattgatcatcttaaaagctctcttagactataccctgcacaaaatcgtggttctaagaaatcggcctgttcaccaccgcaggagaaactatatacacatgaactagtttaacaaatttagttgtgcaactaaaagtttatagaattcagttctggcaagatgggagccccaaattttgaagtcatttgtacatattccacaagaacaacactgcagtggaatcctagttatagctgatgtacatatacaagccaaatttcttatggcatcacgatttagaggtaacatgtaacccacatcagtagtttgagtttgctaagacagaagcacagtgtcctggctttttgcccttccattggaagtacaatttcatttcagtttacaaaaaaaaaaaaaaaaaactcgagggggggcccggt

SEQ ID NO: 71738 - DNA, 329 bp, Oryza sativa
  Clone ID: PAT_MRT4530_72183C.1
ggggcgacgacacacgtgcggattcgtcttcctcctcctcggcggacggcgacagcgccggcgccccatcatcgagaatgaagcgacagcagctcacaacggtgcccatgggccacctaggcgacggcgtcccgtggcactggcggcgtgttctgggcagagaagccgtcgctggcatctgggccatggtcgaccagggaacaggccatggctaccgtgattaccagatgaagagtgtcccttttgtttccctgataaagtctccatagcagcagagcattcattcccaaaaacgacttgcaaacattttggtttttgatgcgttgatc

SEQ ID NO: 71739 - DNA, 944 bp, Oryza sativa
  Clone ID: PAT_MRT4530_72184C.1
cataaaaaataaattgtgcatcacactgatttcgtgtaggtagtaatataaattttagggccccgcaatgttatatggttgggagttaatgaaaagtgcatatgcaagggagaaatatctataaatggatcagcactacagagttgaatggatcgaagaacccacgtcatgtatgtactgcctaaatgagctatctcatctatcgaaatacagagttcattaaggcatttcacatggctgactatttagccagactctcatctctgtcaattctcagagtacctgctatcttcacaattggtttgattccttatgagtaagcttcatgttcactgaaagtacctgagctgtaaatagcaaatgtgaaaacatgtagatatcaatgcaccagcgatttattatgagccatgaagcgtaacaacagtgattttgatatatcagtacaaattattaaaaacatcagttaatttgatatgccagtacaaattattaaaaacagtaatttgatatgccagtacaaattattaaaaacagtaaattataatttgagaagacgacatcgatttatataaatatcctccaggagcatcacatatgagcgcatcaggttaagagtaaataatctcaagctgtacattaggctccctcagaagcatcacatatgacatccggcaaaactaaaagtatataattagcaatcaagcatagtttcaacacattaacttaagtatcggagagttcaattaaaaaacctgattcagtgagctgagtacagaagccatctttcataaaataagatccgtagtttaatttcaattttcttgggtctaaaacatgcaattaattgaccatttaaagcatacaattttattaggcctgaaatcatacaattatctttatcaacctcgtccaattcatggcaaaatttggatcagtgcctgcag

SEQ ID NO: 71740 - DNA, 1305 bp, Oryza sativa
  Clone ID: PAT_MRT4530_72185C.1
acgaggctcagcttcagcttcgcttcgctacagaaaagcatctcggaaaagccaagaaccaaacggctcagcgctacgtcgcgtttgctaatggcgacaacctcctcgctcgcgctgccgctgttcgccggcggcggcggctccgaccgcctcagccaggagatcttctccatcctcgagtccaacttcctcttcggcgcgccgccgccggaggggcctgcaggttactactcctccgttggccgcgtccgcgtgctctcgattgatggcggcgccgacggcggcgcgctcgccgcggccgcgctggtccgcctcgagcgccggcttaaggagctctccgggaaccccgatgcccgcgtcgccgactactttgacctggcggccggctccggcgccggcgggttcctcgccgccgcgttgttcgcatgccggatgccggcggaggcggcgcgcgacgtcgttgccaggaaccggaaggtgttctccggccgccgtgggcgggggggtggcctgttctggaggccggagtcggtgttcaagaaggtgttcggcgacctgacggtgagggacgccgccaagccgctgctgataccctgctacgacatggcgacggcggcgccgttcgtcttctcccgcgccgacgccgtcgaggccgacgcgttcgacttcccgctgtggcaggtctgcgccgcggcgtgcggcgtgggccccgccgaggtcgcctccctcgacggccggaccaggctccgcgccgcggcggccacgggcggcggcggcgccgtgtccaacccggccgcggtggccgtcacccacgtgctccacaacaagcgcgagttccccttcgccgccggcgccggcgacctcgtcgtgctgtccctcggcgggaacaacgccgccgccggcccccgcgcgtcgtcgtcgagcctcctgcgcatcgccggagcttgccaggccgacatggtggaccaagctgtatcaatggcgttcggcgagtgcagggcaaccaactacatccgtatccagggcaatggcattgtggccggagcggcggcggcgacggcggaggcggcgatgacggagaggagcgtggagtcggtgctgttcagggggaagaaggtgatggcgcagacgaacggcgagcggctggacggcgtggcggagcagctggtgagggagcaccaccggaggatggagagcaaggcgccggtggtgctcatcaagccgtcggcgacgccgcggacgtcgtcgtcgtcggcgtccacgctcatcaccgtctccaccaacgcctcgtccgagtcgccatga

SEQ ID NO: 71741 - DNA, 149 bp, Oryza sativa
  Clone ID: PAT_MRT4530_72186C.1
agtcactaacatccgagcatccttaaggtgcagcggtggggatatatattccattattaaaaagcaccaaatctgcaatactacaaccgacgtcgcgagaacctcaacgcgtacacattagcaaaacacatttcccggtgacataacac

SEQ ID NO: 71742 - DNA, 1248 bp, Oryza sativa
  Clone ID: PAT_MRT4530_72187C.1
atggaggcgcaggcgacccaccggcgagccggagaccgcggcggcggtggcgacggcgggagctcctccgcctccatcgccaagcacctcgcaaaccagagccaggtcttgaagtggctgcaagatttctctgataaggtggaggagagagctaaaggagccgctgcagaagtcaatgtgttgttagatgaggctggggcgctggagctggatatgaagaccgcgatgatctccttcaacaacctgacccgccaaaggttcattgaacatgcaagtagtggttccaaatctaaaatttcagatgaagatagtatgcatctgaaaacaacggagagtatgcatggttctctgcaatcccaagtgccagctcaggattatgaacgtgatattttaccaagatacaaagaagcattacacataggactttcttcctgtaaggaccacttccgaagcaagggacgctctaccacctctgtgttcagggctatgtctgcatatggccctcttccacatataattggttctgaagagtacattcatgataacagctgtggtctggcagatgatatgcagcctctaagtgatgacttcagttggttgcgggagtttcaaagtgagtcttcagactcacggactgctgatatctctgagtctcaaattttcggggctcagcgaggttatgagaagggggaaactgactctgtggtttctgctgcacgagaattcaaggcaatgctggaggctgcacttgttaatccctataagttctatgatgatgcaactattacagcgcaagatgcttctgtagagaagaagataagcacaagtgaggaccaagttatgctgacagggacaagtgaagcaccgagtggaagatcagcacaagaagataactctgaacagacaggactttttgcaagcttgcaaagcgcagatgccaatcctcatgacatctattctgctttggttagagaaggcctgtttgatactggtgatgagattctgtctatggatagaggggagtctgctgatactcctatttcaggcctagcgtcaggtttagcaaatcttggcactgctgatccagctgaaaggggctactcaataaacgagactacaaatgaggagggatacttgattgaaggggatgatccatcaccatcaaacaaagacgaacaagatgaccaaactgatgcacatggtgtgtcttcgccagagccagaagatggtgtttctagaccatcctag

SEQ ID NO: 71743 - DNA, 965 bp, Oryza sativa
  unsure (1)..(965): unsure at all n locations
  Clone ID: PAT_MRT4530_72188C.1
cggacgcgtgggcggacgcgtgggcggacgcgtgggcggacgcgtgggcggcgcgagagaagaagagatcgatcgatcgatcaaccgatctcgccggagaaggaagaggagcaaagatgtcgtcggtgttcagcggcgatgagacggcgcccttcttcggcttnctcggcgccgcctccgccctcatcttctcatgcatgggtgcggcgtacgggacggcgaaaagcggcgtcggcgtggcgtccatgggcgtgatgcgcccggagctcgtgatgaagtccatcgtgcccgtggtcatggctggtgtgctcggtatctacggcctcatcattgncgtcatcatcagagggatcaaccccaaggccaagccctactacctcttcgacggctacgcgcacctctcatctggcctcgcctgtggtctcgccggtctcgctgccggaatggccattggcatcgttggtgacgccggagtcaggtataaggcactttgctatcatacacgctgatttattatttgtgattatcattaactttgttggttagttgctagtatagttaatttgcctattgtcaatctatctgcatgtgattagatcaggagatgaaaagtgcaccaaactattagtgaagtattacatttgcaagtgtatacttgtttatgtgaatatgcgaaaacaatcttttaggccgtcaagtacctaattgtatatgttttagattttatcattttagcgaacacgtcgtatatgacaaactatgcattttattttagggaacacgttgtatatgacaaactatgcatttctgggagcttctgtcttatgctttgcctattacattgatatatcaaattcacacttttgtgtgttaaaaagtgtgtgttaactagcagactttctgctatcactggcaaatgctaagcttgaatgggtgtttaatcatgggtttcaatctattaaatt

SEQ ID NO: 71744 - DNA, 735 bp, Oryza sativa
  Clone ID: PAT_MRT4530_72189C.1
atggcgaggatgaggtcggccggtggtggggatctccatggcgcggcgcattggacagcggcggcccgcgagcgccgccgtctccaaccaatatcacccgttggtcgttgcccgccattggaggatgctgccaccgtcgccgccgcctgtgccctctcccttgggagccgcgcggcacatccaggaagccatcagctcgaccgaaaaaattcgcaagaaccacagctcacagccacaggaccaagtgtccgtcctgatttccgcgaagacgagtgcaagagattgcttactcgggccgccgaaggggatgggtccggggttgagcccggcggcgatgctcggcggcggctggacgtggagcacgacgagcgcgccgtcagggcggaggcggaggttgtcggcaggaggccactgtcctcctcgccgctcgtgttgacgccggcttgcatctgcgtcggcggcggaggcggagccgccaccgcaacgtggacggctggaggagccggtcgggccgaggatgaggaacagcgcaccgacgacgaggatcaggacgacgacgaccgggccgaggcgacggcggcacggtgccccggctgggcggcggccgggcgccggtcgggcctgcgcggcggcggcctgagggagaagaggggaatcgagggagaagaaaaagtgaaagggcaggagcgacattttttctacccggcccatatgtcagagctaccaaatggttaa

SEQ ID NO: 71745 - DNA, 183 bp, Oryza sativa
  Clone ID: PAT_MRT4530_7218C.1
aaagatttgaagaccaacaataaggcaagccactctatcctcatattgctcctaggttctacaatgcgtggattgctcatttgcatgtcagttgcattatttgccggaggagacttgctgaacttaacccttggttggtacaccacagcagtacctcgatacttgcgcttttatgggcgtatg

SEQ ID NO: 71746 - DNA, 887 bp, Oryza sativa
  Clone ID: PAT_MRT4530_72190C.1
ccggcgagccggagaccgcggcggcggtggcgacggcgggagctcctccgcctccatcgccaagcacctcgcaaaccagagccaggtacctcgtgagcacgcgcccgcctttccctctccatcagatcgtttgctgcttgctgccccggaggttctgtgatgctgccgattcctgcacacgtttggctcaaattctccacgaattcgtggcttctcctctcggattttcgcccatactcatcgcaagaatcaagcgcgcgtagccaatcgcaccatcgcggttacagttcagcgattgcctcctcgattgcggctgcggctgctcttttgcgctgctagatccacctgaaccatgccggctcacagtgttctgcagaaacctgagaatgcgtgctggcatgctcgatttcgttgtctggctctgatttctggaaggctctgattgcaactgtacatctcagtatcttggctgctctcgtcatgtgttgtcgcgtttcctgctcaggtcttgaagtggctgcaagatttctctgataaggtggaggagagagctaaaggagccgctgcagaagtcaatgtgttgttagatgaggctggggcgctggagctggatatgaagaccgcgatgatctccttcaacaacctgacccgccaaaggttcattgaacatgcaagtagtggttccaaatctgtatattgcacttgtctttggatgcctctagtctagaaagatatgcttgctttgtgattgatttgtttatatcagatgacaatatacttaacttttggctgtagtacacccttctatggtcaagtgtcgtatacttgttttgattacttttgtaaaagacataaatttcaaatttacataaattcaaatttatgat

SEQ ID NO: 71747 - DNA, 1416 bp, Oryza sativa
  Clone ID: PAT_MRT4530_72191C.1
atgccgttcctatcaatcaaggcggcggcggcggcacagagagagcaagcgagcgacaagctacggcaggaaggagagaagaattctagcacccggccagccggtggtggggaggaggtcgccgaggcgaggaggtccgacagccggccggtgatgtggcggcggcggcgacgcggtggcggagacacgggagaaggggagggcgtcggtaaatgcaacaagaagttagtatttcagataaagttccagaaaaaaaaatggcgctatcaagttagttactctaacactaggcaaagttccagagaaaatgacgccaaagaccaagttacgctgacagggacaagtgaagcaccgagtggaagatcagcacaagaagataactctgaacagacaggactttttgcaagcttgcaaagtgcagatgccaatcctcatgacatctattcttctttggttagagaaggcctgtttgatactggtgatgagattctgtctatggatacaggggaatctgctgatactcctatttcaggcctagcgtcaggtttagcaaatcttggcactgctgatccagctgaaaggggctactcaataaacgagactacaaatgaggagggatacttgattgaaggggatgatccatcaccatcaaacaaagacgaacaagatgaccaaactgatgcacatggtgagtctacgccagaggcccagagccacaagatggctgctccatctcccccagctgccgcccatcttcgccaccgagcgccgccgccgcgcttctccccgtcctccccgtccgccgactccatcctcgctgccttcgtgacctgctgccgccgccgccgccgacatgcgcagcagtgggatggaggcgaagaggctagtcaaggcgcgattctcccgcggtcaggccgccgcccagctggggcaccgcgccgccgtcgcctcggcccggtcgtcgtcgtcctgatcctcgtcgtcggtgcgctgttcctcaacctcggtccaaccggctcctccagcttcaccatgccgtggatccgcatggagttcaacgaaccagtccacgttgcggtggcggctccgcctccgccgctgacgcagatgcaagccggcgtcaacacgagcggcgaggacctccggccgacaacctccgcctccgccctgacggcgcgctcgtcgtgctccacgtccagccgccgccgagcatcgccgccgggctcaaccccggacccatccccttcggcggcccgagttatcttcatgtcttcctactggctccacttatggtctacaatgctaccacaagaggagcaggatactatgcgcaatggtgctacactcttggaatcggtagccaagggtctcttattccactatgggtggcgtagtttcataagaattgctagctaa

SEQ ID NO: 71748 - DNA, 840 bp, Oryza sativa
  Clone ID: PAT_MRT4530_72192C.1
atggcgaagctgatggcacacgcggattggggaggagaaatcgtggccggacgtggcggatttgaggcggcaacggccggcgacatgggcgacatcgtgggcgaagtgggggctcgatttggcgccaaaaatttgggaaaagtgagggatttggtggaggagggtggtgaggaaccgattttacttggtttgggcgcgaaggcgcgagcgggagggcgccggatttgcggggaacatggccggcaaccgccggccatgcaggcttcggcctgggaagccgaaggtaagaggagggccctgacgggtggggtcgccgggcccacctgtccaggaaaggaaaaaggggagaaaacccagggggattggggaggagaaatcgtggccggacgtggcggatttgaggcggcaacggccggcgacatgggcgacatcgtgggcgaagtgggggctcgatttggcgccaaaaatttgggaaaagtgagggatttggtggaggaggtggtgaggaaccgattttacttggtttgggcgcgaaggcgcgagcgggagggcgccggatttggcgggacatggccggcaaccgccggccatgcaggcttcggcctgggaagccgaagggtgttctggaggaatgcacaagatgtcagcattcttccaggggagttccagaggattgctggagatgtcggcactttctccgatcttgtagctcgacggatgcttcttttatataagcactggcaacccgttgttcccagatgtcgctctactacgtacccagacagggagaacttaagtgttcttgagggctgtcaccacctctacacctacctcaaatga

SEQ ID NO: 71749 - DNA, 266 bp, Oryza sativa
  Clone ID: PAT_MRT4530_72193C.1
tgttagaacatgccagccctccccgaggggctttcaataattgccggtcatggctgcaaagctctacttgctacttaccgtgacctgcttcatgcttttagttctgcatgctgaacatgcggaggcgcgtcccaaacctgccgctataggcgactccgacaacggcatctacacgctgctcgtgttcggggatcagaacggcgacaccggccatctacgcaagcaccgactgagagagcagtgagccgaatggtactacacttacg

SEQ ID NO: 71750 - DNA, 219 bp, Oryza sativa
  Clone ID: PAT_MRT4530_72194C.1
gcggtagaggagtttgggcgagctcaagaacacggcgcaggcggaccagattgaaatggaggagaaagtgaaggcgaaagtggagcgattgaaggtgttgggtgccaagaaggctgatatggatgcgagggtggtgtttttggatgcatatctcaaagctgctgttgctaaaataggggaattggaggttgatgccgttgctaatatcgtatttttcta

SEQ ID NO: 71751 - DNA, 1147 bp, Oryza sativa
  unsure (1)..(1147): unsure at all n locations
  Clone ID: PAT_MRT4530_72195C.1
tttttttttttgtactgaaaccaggcgcgaaatgtactttatttatgcatgtaatcaagattcaaaaggtttcctgtgatgaacagttcagaaggaacctcctacaaccccaagtcaacataagtacagtggaccaacattgtctattgtgagtccagagcgaacaaggattgtattaggagttttcgacatccaaaatctgggcagtaattcaccgcacaggctgctggttgtaatggctcttctctttcttcttcgcagctgcaagcttcgcgctccttgctgcggcctcagatgcagcaatctttgctgctgtgtccatctctttgcttgacttctttttcttcattgaggctaccttctttatacgatccttgacatccatagaagctacctcttcatcaggctcagcaccagcagcttcttccaccccaccattaagttcctgtgtttctttcgcctcctttgcagacttgtctttcttagctttcttcttctttgagctcttgctctctgcaggggcaggtgcaccttctttattctctccatcagcagcttgctctgcacctttcttgccgtttgtttcattttgagcatcattgtttgatttgctagaaagttccaactcagccaaaatagcatcaagctcttccagttcctttttctttaactccttcttggagagttgtctttcagtatctttcggtggtgcaggaggagctgcagctttattcattgcaggttcagcaggggtagcatcctctgtttcatgttcgtgttcatcctcagcatcatcatcaacctcctcatcttcactttcaagttcctgttcaagggcagcttgctcgtcgtggtcgtcgtcgtgggcgtcagcggcgtggtggtgtgtcccccagacggggcgcggcggcgcggtggtggcaaagtantcgtcgtcgtcgtcgtcctcgacgtcggcccaggacctggtggtgagcggcgcgggggcccacagcacctccttctccttctccgcgtgcttcttcgacgacgacgacggcttcttcctcctcttgagcgtgtcgagcgccgctaacacgttgctggtgccgatcctcgcctcctccgccgccgccggccggcccctcctgctgcctccccccgccat

SEQ ID NO: 71752 - DNA, 1128 bp, Oryza sativa
  Clone ID: PAT_MRT4530_72196C.1
atggggcggcgaccggaggcggcggccggcgtgcgagcgaggaggcgagaccggaggcggcggccggcgtttccatcccgtataggcgcagtgcacaactgcacactccagctgctagcgtgtggtgcacgtacgggagtacttcctgacgcagaactgcagaagaagcgcccactcaaccagcgtacgaacgattacgagagcacatcaggagtagtggagtatgccagctcgtcatcctatccaacgtggcagtcctatcgtcggtgtttcagttggtattatacttgctctcaacatgccaataacaggcccacctcgcccgccaacccgtactgcgctgcgcaactgcatgccacggcggcagacgccaagcacacgcgtacggcgagcggcgcagggcagggcatgggcatggcacccaacacggcaacacccatggctcgcgtcgcctacggcctacgtaaggcacgtcggcacctgcgtttgactgcttttgtggcgcggatcggaacggatgggagggctcgtcccattactgccactgccactggtgccgcttccgcttctgtccgcatgtgcaggatctctgtgctggagcggcgacgtttatcatcggagagcgctctagctgactgccgaagggtgccaagggccacatgcgtgtacgagaatttacctggtatgtacccagtgtctggccatcttgtgccgtgcacgctggaacggaacaatgtccctcttgccctttcactctctcttctccctcgattcccctctatccacatcatccgcgtcctcctcacttccgagctcccggctggtgcccagccaagcgtgtccgaagccgctggacgcccgcggcgccacgccggggtaccgcgccgccgttcgcccacgacaagacggccgctggacgcccgcgccaccgttgccacacaacaagacagatacatatgtggaggtgctccaggacgagacggtggagggcggccagaggacgcgtgggtgcccgaccacgagaccggcgtcttcgtccctgccgacgaggccgccgtctccggcaccgaaaaccacgaccactacggagcggcggcggcggccggcggctcgtcgtcgatgctggac

SEQ ID NO: 71753 - DNA, 408 bp, Oryza sativa
  Clone ID: PAT_MRT4530_72197C.1
ttttctttacgcgtgggcgcgtgcgtggggcagtcgactgtggcggtggaggaggcgtgggggaggtacgacgctttgctggggcccggttgccacttcgtgccgtggtgcgttgagccgccgcgttgctggctacctttccctccgcgtccagcagctggacgtccgctgcgagaccaagaccagggacaacgtcttcgtcaccgtcgtcgcctccgtccagtaccgcgccctcgccgacagggcctacgacgccttctactgcctcaccaacgcccacgcccagatccagtcctacgtcttcgatgtgatcagggcgagcgtgccgaacatgaacctggacgaggtgttcgggcagaaaaaggatgtggcgcgggcggtggatgaggagctggctagggctatgac

SEQ ID NO: 71754 - DNA, 1734 bp, Oryza sativa
  Clone ID: PAT_MRT4530_72198C.1
atggatattctattttctgcattagccagtgaaattgccagtcggaccatctccttcatcgttgccaagtatcagaagcagaccaccatggataagacaattaggctacatcagctgctgcttcgagcccggacaatcatcgaagaagctgatggaaggcacatctccaaccaagcgatgcttctgcagctcaggcagctaagaaacgccatgtatgaaggccattatgtgctcgacaccttcaagggacagaccgaggtgaacaaacctttcaacaacctgagcaaaatccaggtcagcatcgagagtttggagtctaagataggtgatttgaaagaatttgttgtgtttttgatggactgccctcgcttccttcgcgaaccatacaacacatatcttttcatggagaggtgtatgtttggtcggcatgtagagaaagatcatatcattgatttcttgatgcaaccttcaagtttgtccttagaaattcttcctgtcattggccctcgagaaatcggaaagaggacgctggtagagcatgtactgaacaaggagatggtacagaaacatttctcacacattattcgtctcagcagcgatgatcttaacaatatagaaaatgacagtactagcaagggacacaacttaatttcctttactgagaggagtttacttgttgtagagcttgagcatgaagctgatttggtggcatggggaagatttcgctcctctctttcgaagataaatattatgattaaggtcttacttattagttgtgtgcagaaggtctcaacatcggggacaacaggagcactgaagctaaaacggatgcgctcagatgagttctggaatttcttcaggacactttgctttggaagtgaaaacccgtatgagcatcagttgctgttatcaatggccttgaagatggcaaaattggcgaaaggtgattttgtatgtgcaaatatagtttcaaggctattacgagctaactttagtacagaattctggagccatatgttggatcgcatgataaaaggacaacggctgcacttccatttatttggggaacacgcaaatgaccgtgttgggaaaaaccgttctcacattgtttttgatattgctgatggcaccatcattttagccaataaaatatatacctctactacaagcttggaggacacgggtgttccgaaaattacggttgaaaacttacttaataaaaccgcaattattcccaccgagggaaactttgaggtgttacggtggcaatctccaatagctccctattacagctacctgggaaattgtgtcaataggaaagcttcacaggttgtaccaaaagagaggtatctcaagagaaaaagaaagactagcgacaatatcacggttagactggtgatggtgacaagcgacgacagcgagatcgtgctattagaccggagctacaacgctggtcagataagaggtcttcaagctgttagaccggcgcatctactccgttgggatggttctaagtatgtgtgctattgtactccaaccagacaaaggccccctctccccgagaaaatggcggccgatcgagtgtatcacaaaagaaacactactatagaaaccctaattggtgccggtttggaaccccccttaggtgtcggttttcccaaccggtaccacggaggccgcactgatgacttttggtcatcagtgccggttttagaaccgacacctttgatgtct

SEQ ID NO: 71755 - DNA, 1670 bp, Oryza sativa
  Clone ID: PAT_MRT4530_72199C.1
ctcttctcctctcacctctcgcgggttattgaagttcttggttccccttgggaaggtgaaaagaggatttctggattcttgggaagtgggtgattaggtgcttaacataatcccaatcctagaaaaatacattcggagtggttgctgctgagctcaaccaatcaagcttgttggggaggcaagcagtcacaatgatgagcttcaacaagagccaagaaggatttgggcaggttgctgctgtggccaccctggcctccaatggaggaggctctctaccatggctgctgtacggcgagccactggggcaggggaagccggccatgtcgccggagggcgtggtgccgagagcacagactcctctggatcctcctcaggttccagccatggacaggggtgtccctgaaattctgaacttctccatggttccagcaaaaagtaaaggagaaaaatgttctgagcactcaactactattgctctgcagtcaccatttgcagaatataatggctgttttgagctgggccttggtcaatctgtggttccctctaattatccttatgctgaccagcactatggcctactttctccttatggagtgagaccaacgcctagcgggcgaattcttattccaccaaatatgccagctgatgcaccaatttatgtgaatgcaaaacagtgttcagccatcattcgacgtcgccatgctcgtgccaaggcagagagggagaataggctggtcaaagctagaaaaccatatcttcacgaatcacgccatcttcatgcaatgcgtcgtgcaagaggctctggtgggcgcttcctcaacacgaagaaagagaccaatgggaaaaccactggtggaggcaggaaggtgatggacatcatcatcccgcctctgtgccccgccgcatctcccagctcggagcagtgcaacccaagcagcgtttccagcctgtccgggtcagaggtgtcgagcatatatgaacacgaagacatggaccacttccatagctttgatcatctccggacacacttcttcaccccgctcccgagcctcatggatgtcgagcacggggctggtaaccccttcaagtggacagcagcctctgatggctgctgtgacctcctcaaagcatgactagaggggggatacaccgggcagccgaagctggcaaacatcagcagtttctgctggatacattgcccagctccaggtcagggattgtccctgctggtattggctgtctgtaggcaactcattcttggctgatcggttccgctcatcgcctacttgtcccggaaactccagcaccggtttctgggatcctgcggtgatcagaacaacccatcgcgtgtaaaaaaaaaaaaaatcatctatgctatgctgttactgcttgctaccattatctgaactgctactactaggtagcaagcttaatctggcaaggtaaataaagtctggaactttgaactggttccagtggtgatgattgtggtgtgcttgtatcctgataactattgtgagtttgagacctggctttgttgatctactgaactactactgtagcactatgcttgaagtttgtgtgggcttggtttgcagtttgtattgttaaaaaaaactcaaatctagtgatgtattaagaccttgtttctgtgtaaaaaaaaaaaacaa

SEQ ID NO: 71756 - DNA, 162 bp, Oryza sativa
  Clone ID: PAT_MRT4530_7219C.1
atgcagaactatggactcaagggcaatgcatcaggaattggcccggaccaggcacaatcatatagaaagagctttttaagtgtagatggaaagaagaggcggattgtgctacggagacaaaaaggaacacgagtattgcactcgcagtggctctttgcgtaa

SEQ ID NO: 71757 - DNA, 551 bp, Oryza sativa
  Clone ID: PAT_MRT4530_721C.1
tgctcgatcttataagaacttggattcctttcgtagggcattactcaataataaagcaaaagatattgcatactacactgatgaactgcggtggatcaagtcaaaatcagaaattgggttgatgcgagaatcagcatctattgtttctcagtctcttttacaaacgatgttgctatctaggacccatagggaggaaagccaactggcagctaagatcgagtatgagtgcaaaatgaggggtgcccaaagaatggcgttccatcctgtagttggtggtggagcaaatggcagtgtaatacactactcaagaaatgacggaagggtcaaagcaggtgaactactgctcatggatgttggctgtgagtatcatggctaccttagcgacctgacttgaacatggccaccctgtggcaggttttcacctgcttaggaagaactatacagcctgatattggagacaaataaggaatgcataaagctttgtaaaccaggccgcagcattaacgagatacataatcattcggtcaagatgttgataaagggtttccaag

SEQ ID NO: 71758 - DNA, 495 bp, Oryza sativa
  Clone ID: PAT_MRT4530_72200C.1
ggggccaaccaggcccggccaaggggtttttcttaccaaaaaagatccccccccttccgagcaaccacaggttcaaccccaaacattcccacatcagggcataattaaaaaccccggccaacccgcctcagggggcccagacccttaattggtcctggccccccccaattacaaaaatcaatcgggacagggcccgggctatctcattccccaccccctatctcgggacccccgggaaccccccggaaaaaccaaaccggggggccccttttcaggatccccccccagtttccaaaaaaaggccccccaaaaaccccccctggtttaccccgcggccaaatccttaaaaaggccccagaaaccaaaaaccccttggttcccctccccccccttaagtttgacaaagaccggcttcccctgcaagggtgttcaaaaaaggcttcggggtaaccggcccaccccccccttagaaggggggggaaccccccccccccc

SEQ ID NO: 71759 - DNA, 237 bp, Oryza sativa
  Clone ID: PAT_MRT4530_72201C.1
atgaagagcgtcagccttggtgccatgccggccatcctccatgacatcgacggtgcccccgcgggccgcgtggcctcgttgcctgctgcagtggttccatggataccggtggtggaagctgctccctcgctggtggtggaagtacattttgcgctcgacgtaggggagcatggatccgacgaggaggacgtctcctccaggctccaggaccaccatgtcctcggcgactccgcctga

SEQ ID NO: 71760 - DNA, 240 bp, Oryza sativa
  Clone ID: PAT_MRT4530_72202C.1
gaacggattattttggatgtcggaaatggtgcggaatcagttcgggaatggaataaatttatcggatgttacatagagatatcacatatgttgataatttcggattatccggaaagtggcctatcagataatccgacataaatatcagataatccgcattcaccggattttagagataccatatccgcatccgcatccacattatactatccgcatccacattcatatctaccggatttc

SEQ ID NO: 71761 - DNA, 426 bp, Oryza sativa
  Clone ID: PAT_MRT4530_72203C.1
atggtggattggcggagggaagctggaggctgcaggaagggtgacacgggcattcgtcaggcggagtcgccgaggacatggtggtcctggagcctggaggagacgtcctcctctgtcctccacagcaatgttctgcaactagcgcggtatgaacctctaaaggtagcgacgacctcctcatccctgaccgtcggatccatgctcccctacgtcgagcgcaaaatgtacttccaccaccagcgagggagcagcttccaccaccggtatccatggaaccactgcagcaggcaacgaggccacgcggcccgcgggggcaccgtcgatgtcatggaggatggccggcatggcaccaaggctgacgctcttcatcgatcctcctgctcatggaagttccatggcacgctcctagggagcgacatccagtga

SEQ ID NO: 71762 - DNA, 183 bp, Oryza sativa
  Clone ID: PAT_MRT4530_72204C.1
atggggaacaatctaaggtgtgttgctccagaattgtttgcatcaccaccacatggttcagaggatgatgatgtgtctgctcttgctggacctcttggtgttggtcagtatccagagaattacaagcagtccatagatggctatatccacttggaagccccacatttcttaaggaagtactag

SEQ ID NO: 71763 - DNA, 904 bp, Oryza sativa
  Clone ID: PAT_MRT4530_72205C.1
ccggccggcccagccgcccgtccggccgccgccgccgtcctccatggccgacgaccgagtagccggcggcacaaccccgccgccacctcctcctccccctcctctcgacgcctccgcgttcacgcacaccccgtactactgaaaatgttcacttgctatgtaaggaactcattagaagtggaatttctgatcctgctggcaccaacttatatgctgttttcatatcaaatgaggaaaagaaggttcctctctggtatcagaaagcaagtcatagcggtgatggttttgtcctgtgggattatcatgtaatttgtatccaggcgaaaaaatggagaagtacttgatcttgtttgggatttggactccagccttcctttcccatgttcattcatccagtacgtttctgatgccatacgaccattatcatttggcaactctacctacaggaggcttttccgtgtgattcatgctcctgtatttcttcgatcatttgcatctgatagaagccacatgaaggatcatgcagggaattggattcagttgcccccaaagtatgaatcaattgttgcagaagatggaaccaccaataatctgaatgagtacattacgatgtctatggatgatgtgaaggacctggaaagtatggctgatgatgtctactccagcaaacatggtgtggtgataaatgaaactatcctgcctgaattcttctctcgcttgcctggatgactcaacaggagctatctatcccgattcatgaagctattttgttgtccaatgagatttatgaaccaagtccagagttaaaatgatgttgtccaagcaattgttaacacaatgtttacacagttttgcttgctgagtaaatcacacttgcaatgatcaaaaaaaaaaaaaaaaaaaa

SEQ ID NO: 71764 - DNA, 180 bp, Oryza sativa
  Clone ID: PAT_MRT4530_72206C.1
atggctatggcgatggtgatggagtccgaagccatgtacgaggaaagaaagctggtgaggggattagcaagggacggccatggcgcggtcgccggcacaaagacgagcaactacttcagttgcgttgttgatgtcaatgggagtacatgcaacaccgacgaggttgccattggcgagtag

SEQ ID NO: 71765 - DNA, 340 bp, Oryza sativa
  Clone ID: PAT_MRT4530_72207C.1
cactatagggtaagccgctgccccggggggaaccacaccacaaaaacccccaagacccacccgtccggcattttactgcagcatctcgagatgccccaggggaaacaacaaaacggaaagcagcttgataaccaccaactagcaaagccagagccaagggctgcccatcggggtgaaccagcaaaacacagaaatcccacagacttaagaaccccaaatctgtgctacagaagaaaagaacaaaccaagaaaatcccagaagcatcctaaagaaacaagaagcgggaaaaaacaagcaagggcagcaccactctgaaaactcccttggggaaaaagggag

SEQ ID NO: 71766 - DNA, 678 bp, Oryza sativa
  Clone ID: PAT_MRT4530_72208C.1
cgaagccagaggcgttggtttggcgacgagctcgacggagagaacgacgatgagctcttcaatccctggccaccgtcttcaatcgtcgccgtcccgcaccttcttccgccgccggccaccagatccgggagggtagccggtagcgagcagtggggaaagagagggggctgcagcggtgaccagcgcagcgagtggaggacggtggcagccagcagagcgggtggaggacagcgacgaccagtgaccggcgcagcgggtggaggacgacgacgaccggtgcggaggaggagggttgcggcgatgaccagcgcagcgagtggaggacggtggcagccagcatagcgggtggaggacgacaacgaccggtgcggaggagggctgcggcgatgaccagcgcagcgggtggaggacggcgaccggtgcagcaacgattagtgcggcggcgggaggatgacatcgacgagaacgagatgcacattttttttcttttctttctttttatttttttccctcacctgttatagcgtatataaagcggcgaattattgatcgttggcaccatttattttttttataattcttgagaccaattcacccattacatatgcaacagattttaacaaaatttggctgattgaatagtactataactacaattccatggtacactaaaacaaa

SEQ ID NO: 71767 - DNA, 294 bp, Oryza sativa
  Clone ID: PAT_MRT4530_72209C.1
atgccgagggaggtggaggcacaggtcggggacgaccgaggtgacggcacggcgcggatggaaactcggcttggattgaagagatcggactccaaccaagaggaatcgaagccggaaaatcatcgggttgggaaccaactggggatgcgctcggatggacccaagctccacgtcacagcatcggagtctcaagctgggcaattcgccaacttcaacaacatgatgcagcaacagcacgacaaccttcaagcgtacttccgcttccagggcttcaatccttatcaagtgccctga

SEQ ID NO: 71768 - DNA, 357 bp, Oryza sativa
  Clone ID: PAT_MRT4530_7220C.1
ttgggttgttttttttttttgggttttttttttttttttttttttttttttttatctgttgggtgctctttttttttgttaaacttgttaatattccattacaaaaaaaggctggatatgacttgatctaactggaaaaagaacatgcccacaagagggacacgctgggtggttgctattcattgctgcatggaccgaaggactaatgtaaggggacatcagagggctaatacattaatccaggctggggccctgtggtggcagacagcacaatggggagaagaatatgtgaacacgggtgagcctaagaagatgccacccatttgggggggggtgttgcatacttgcattggccaa

SEQ ID NO: 71769 - DNA, 171 bp, Oryza sativa
  Clone ID: PAT_MRT4530_72210C.1
atggcgatgccgtgggagacggtggcgtgcatcctgcggaacgtgtgggcgctgctcgacggctggatcgccgtctgctgcctcgccgccgacgagctcgcgggcctcctccgctcggcgctcggttcgtcggttgctttatcattcttgctctggttgatcattgcttaa

SEQ ID NO: 71770 - DNA, 341 bp, Oryza sativa
  unsure (1)..(341): unsure at all n locations
  Clone ID: PAT_MRT4530_72211C.1
tttttntttttattttttannttttttttttttttaaaattatttttacatcgaaatgggcaatcacatcattttgttgaaaagcttcaggctggaactcagtgaacgatttacacaggttgggcacggagagaccgaaccttttttctctttccctttttttgtttgttcttaatatcgtcctggcactaagcagccttttttttttttgaactgctcgtcaggcatttgcctcaaagctaacatctccttgacctgtacaaactgaaaaaaaaaatttatttaagctgccagctaacattgggggcattttgttgtcaatggnatcactctcggctgga

SEQ ID NO: 71771 - DNA, 576 bp, Oryza sativa
  Clone ID: PAT_MRT4530_72212C.1
atgcagtttggattggcgtgcatcgagccgaggccaggtgccttgccctccaacacggctttcatgcatcgcaaggcattgtacctgatcatgaaggttaaggtttctgaggtgatggtgaacctgtatgcgaaggttgaaggagattccaagaacatgtttaggaagcactggacgctgtcctctgccatgacattgctcaagctgcgagatatttcagagaaggcatctcgcaccctctacaatattggggccacaaggcacgggtggcaacagttgatctcctccatctccaactcccgcaccatcgccaacgtcgcccgaggcaccttccgactctacgacgccaccttccgtgatgcgtggagaggactcctcccggacgcctcccatgtccacttagtccgcgcccccactgtcccagggctgccttggcctgtgaagcctttacttgaatgcacctgctctctgcaccttgaagatttagatcttgtatgtctcgatatgtatcactacgcctcagtaatccggaggaatgaggaccccagttcccatatctccgacacagtcatatag

SEQ ID NO: 71772 - DNA, 1397 bp, Oryza sativa
  Clone ID: PAT_MRT4530_72213C.1
gaaaatgtagaaaagtttttcgcagccgcgggggccggccaattaaccaacccgaccggtcaacgcggatcgcctctcgagcaccaaaccctacccggatcgccagcgcagccactcaccaagccttcccccccaccctgcttctgctgctcgcgccgggattcttggctcgtctgctcttcgcggtcggtgtcgcgccatcagcaaccatggagggcgagaggagggcggtgaggacggtgcgggtgcggaacatctcagatctggcaggggagcgggaggtgcgggagttcttctccttctccggcgaaatcgagcacgtcgacatcagatgcgatggggtggcgacggggaggacggcctacgtcacgttcaaggatcccaaggccctagagatcgcgctgctgctgtcgggagcaacaattgtggatcgggttgtcaacataacccctgctgaagactacatctacatccctgttactgaccagcaacttgtggtcagtgaggtggtcggtgaggtgacaagtacggctcctaatgcagatttggaccaacctaccgaggccaatgccagccccactactggccgtgtttatgtcagcaaggctcatgatgtcatgacaactgtgattgcaaggggttcagcaatgcgacaagatgctgtgaacaaagctaaagcattcgatgagaaacatcaattgagggcaaatgcatcggccaagatcaattcctttgataagcgtgttggaatttcagagaagataaacagcgggataacagttgtaaatgagaaagtgaaatctgtagaccaaaggctacatgtttctgacaaaacaatggctgctttgctggctgcagagcgcaagctaaatgacactggctctgctgtgaaaaccaacaggtatgtgtctgctggaacaagctggctaaatggtgccttcagcaaggttgctaaggctggtcatgttgctggctcaagaacaagagagaagttccaaatagctgtgtccaatctaacagcgaaagctacagctgataaatacttttaggctgtggtcctggttttggaagctcttcttcctgggagaaaagtcgatcataaagcatcgtgcaatcaccttcactcagagtgtatcgacagtgtggcttgtaactgtgtatttcactgttcccattttttcttcggggaggtttttccagtgagccatgtcagatttggtacatagaggatctcatgtttttggaactttagagtcgccattcttttctttgtagtgtcgatgttaaattgattataggtgatagtgatattctgggccatatgttgttgactcggtatggattattggttattgaatgtctatgcttgtgccaaataaaaaaaaaaaaaaaaaaaa

SEQ ID NO: 71773 - DNA, 268 bp, Oryza sativa
  Clone ID: PAT_MRT4530_72214C.1
aatactcaagcttgatcagctatctgagggcccgatcaagtccaatattgatcggctcgaagctcgcaagattgagctcttggcacaacttcaagaatgcaatgccgagctggatctggaacacaaaaagctatctgatctcccacaagctgtcgaagaacaaaaggcaaggctggaatcggctatcaagaatgtcgctgatctgaccaagtcattaaaagttatcctagaaccgatgctcaagatgcccaagccattgaagaagtag

SEQ ID NO: 71774 - DNA, 1239 bp, Oryza sativa
  Clone ID: PAT_MRT4530_72215C.1
atgtcggaatcgattccagacaagcaaatagtggtgagatttcccaatcatgtactgccagcaagtttgcgcgaaaatatgggcaaagaaggagcaaccgtagataacatggatccttcctgtccttttctagttcttgagaaatatgatagaaaaaagtcctatgagtggctgaatctaagagctgcttgggtcgccaagtccatgccaaatgatataattatcccagaccctactcctgagagggtgcgagatgccttctctgaaatatctcgcagcttgagcaatgtcatggcagaggacagcgtccagtgcttcctaaacatgttcttggaatctccttcaaccttcgcatacaggttcaccatcacctcagaaaccttaaccttcatgatcaggtacaatgccttgcgatgcatgaaagccgtgttggagggcaaggcacctggcctcggctcgatgcacgccaatccaaactgcatgagcccgtatggatgcttccctctccatgaggctgcagaacggtgttcgcctcggatgatcaggttgctcttcaggcacggagcttcagcaaactatcgtgaggattgcgtctacaggctcgttcatctgctgtgcctacctgatatgatagtttccttggaggtgattagactgcttgcccaaaaaacagataatgtagtcgatgagctctggaattacatgaagaacggcaagcttgcacaggccacagttttattcctggcagcccaaaaacattttcgcaagggcaaacctaatgggttttctatcatcgcgcaacgcatatttggagactatgattccctaacgtctgacaaaggtaatggagaggcacataagcagttggaggaaagaaaagcacttttgaattgccaatgtctgctttataatataatttcgcaagctggcgaggctctttatgattacgttcagacacattcagaggtgtcccacgtggaggtccttgcgcatgtctcatctattctcaaggaatttgggttttgccccaaggaagagtacattgacaccatgaacctgtctccttataacctggataatttttacagcgtcgtatttcaggaaggtcaaaccaagccagttgaacaaacgtcttctccgaatgctgcagagaaaaagggctttgcagccccatttctcttactagaaatgagcatcatcttacagagttttgttcagataacaacagcaaaagactag

SEQ ID NO: 71775 - DNA, 318 bp, Oryza sativa
  Clone ID: PAT_MRT4530_72216C.1
atggctgggctgcagcctgcagaccatagcagcagcgaggaggacgatgccatcatcggcctgttggacagatcagtttacgatcaaaggattctgaatgaggctgtgcagcactatccccatgatttcccacagattccgtatggaaggtatctatttgtggactttggttttcctagcaggatgggatttcttgcaccgtaccacatgtacggtaacacagggatcgactgggacgaagaggagcggcgccactcgaaggatgagaagagcacttcaaccattgtcactcctctttgcgaggaaggttattgttag

SEQ ID NO: 71776 - DNA, 611 bp, Oryza sativa
  Clone ID: PAT_MRT4530_72217C.1
ccacgcgtccgtatagatgtagattttttcaatacaattgggaccaccgatatgtttgctaatctggatggcataaccatgaggaataccccatgcttgtcaaatgatatgcactttattgagtttgttctgtcaagagctaggctacttactaaattttgggtttttcgagatgatagtagctcattctcaaagcctagtgaagaagcagttatcgagttagtaaaatatagaagagtgtcaccaaaagccaaggtcttctttaggagcatggatgattattgcatttgagtgccaagagcattcttggtgcggagctagaggatatcttttacatggactgtggtcaagcatgctttcgcatattacttgctaccggaacagcttgattgttaagttttctttctaccggacatgactctggtaatatttgttgtgggtatccgagagcatgtatcaattgtcactggttgattcagtgtcaattttgcagaaatggtggaggtaacagtggcttgtagtgtaatcttcttcgaagataaaaaagtgtttacagtaattgtctgtacaccaaatactagtcagacattttaattatggatgattcttgg

SEQ ID NO: 71777 - DNA, 1053 bp, Oryza sativa
  Clone ID: PAT_MRT4530_72218C.1
atggatggtccttttactgaggatgaaatatggaatgtggtgaaagggtcgccgacagagagggcacccggacctgacgatttcactggggcattcttcaaggggtgctgggacatcataaaacatgatatttctcagatgttcgatagtttctttagactcgcaggcggaaattttggatgcatcaacaaagccattttggcattgatcccaaaaaaagattcaccacaactggtgcatgatttcagaccaataagcttaattcactcagtggcaaagctcatatcgaaggtcctcgcgatgagattggatgacctggtcttgcatgcccaaagtgctttcatcaaaagacgatgcatacaagcaatctttctgaacccaagtcgagctgatgtggacagtctaatcaccttgctggaaaactttggacgtgccacagggctacaggtgaacctaagcaagagctcagtggtgcctataagatgtgaaaacatagatcttcaggacgtgctgaataatttcaatggaaatcgaactggtttccccatcacatatctaggactacctttgacaataggaagaatcaagagagcgcatctccaaccagtcatggacaagctccactctcgacttgcaggaacacctcccccttgtgacgaaatggacaaaaggctatttgcctccgccaccaaggtgacaataggtgaaggtcgcaaagcgagtttctgggaatcaaattggatcggagagcaaccattgaaggagttagccccagccttatacaaccatgccaaaaggaaaggtaggactgtctacgaaggactagcaaatgaccaatggatactagacattaggcacaatctcacggttgagctagtcaaggaattcttcgaggtgttctaccacgtgtggaatagcggcgttgcactcacagaaggtgttgaggacaccataacttggcggtggacagcaaatggaaaatacagcgcaaagtccgcctacatagcacagtttaatggcaggataagcttagcggctgcaaaactgatttag

SEQ ID NO: 71778 - DNA, 465 bp, Oryza sativa
  Clone ID: PAT_MRT4530_72219C.1
ctctgatcgcggcgaggctgccggaagcttctcggcagggggatcgaccccgtcacgcaccgccccgtcaacgccgccgccgccaccatctccttccatccccagccgccgccaacgacgaaggaggagcagctcatactcagcaagccgcccaagtgccccgacctcaacctggacctctgcatcagcccgccgtcgtgccaggaagaagacgatgactatgaggcgaagccggcgatgatcgtgagggcgccggagctgcagcgccgccgcggcggcctctgcttcggctgcagcctcggcctccagaaggagtgcaagtgcagcggcggcggcgccggcgccggcgccggcaacaacttcctcggcctcagggctggcatgctcgacttcagaagcctccccatgaaatgaaatgatcctgcaaaccaatccatgatcgttacactttctcttctcttttgg

SEQ ID NO: 71779 - DNA, 541 bp, Oryza sativa
  Clone ID: PAT_MRT4530_7221C.1
ttagcaacagggatagaaaaaattgcaaaaaaaaatgcaaaaaaaaaacaccgccgccggaggagaagagaggcggcgaagggagcgccgctgccggaaccgcccccgacgccgacggggagagggagaggaagatggagggggagggacggctgtctccgccgcaccccgccgttgctgcgccgtgccggcgagacgggaaggagagccgctgccgctgccgcagccctccatcgtcgcgccgtaccggcaagaagggagggagaagggaagggaagcggcgccggtggtgggagaggcggccggctgggggagggggagaggcgggagatggggagagggagcggcgccgccggagggagggaaggggaagcggcgccggtggtgagagggggagggggagaggcggtgtcgggagtggggtgggggacgaggcctagcggcttggggggcgggggggaggggtagggagggttagggttagggttagagttttgataaggccgtgggccgaccggaagggatggaaataagtctattt

SEQ ID NO: 71780 - DNA, 404 bp, Oryza sativa
  Clone ID: PAT_MRT4530_72220C.1
atgacgaactatgtacgcacctgccggaagagggtggagagatggcggcgagaactcgccgccgccgccgccggcgatgtgtggggcgtcatcagcacggccgccggggagcggagggcgccggcgaggatgctcgccggagatgacgtctgtcctgacgacggcggtggccggagagccgtcgtcctcgccctcatcagcatgcagcgcagcgccatgatcacctacaactacaacatcatgatcaaattaatgatgattaattatactacacagaaacagcaacgagatcaatcgaactcaataattaatcaaggcgagcgcgcggaggagttgatcgtcgggaaacctgtcgtgccagctgcattaatgaatcggccaacgcgcggggagaggcggtttgc

SEQ ID NO: 71781 - DNA, 203 bp, Oryza sativa
  Clone ID: PAT_MRT4530_72221C.1
agcctgcggccttcctgacatcaaatggtacatcgtccggcactgctctcgcccaatgtcctgctgtgggtcgcgcgcttcacgccatcacctatctgagctagatgattccgcaggtgatttgttacacactccttaccggatctcgccttccatgaccaccggcctgcagtcttcctcgacccacaccctatgtgagttct

SEQ ID NO: 71782 - DNA, 701 bp, Oryza sativa
  Clone ID: PAT_MRT4530_72222C.1
ggtttcttaggcaaacatccattcttgctcccccctgctttttggccttcgttttttcagggccacccctcggcccccacagctgcctgagctgggttcagactcaccagaaggagatgttcacggaccaccgtcaccgccgtcgtcgtgccaccgtacatcgacagcccgagatcgtgaagcacgcctggaagcaggtacaacctcagcctcagcactcaggccatcaacaaggtcagccaggcaaggtgttcaggatcgccacctcagccacactcaacgagctgcacattgatgggtgcccctgagtggagtggagatgggtgctcaaggacactcgctacccgtgaagctcggctcccggctgcagcagccgcggcggtacccttcgatttcgaccccccttcattcccttccagggattctggaagccaccaaccggaaccgaaagggaagggaaaccatttctcacccaccgatggtttcttccctccattttggccagaccgggaaccacccggccattaatccctattgccatataattggttcttctttattaaattaaatttttataccttcccatcgatccactctatcttaagaattaagaatataattttaagttccccacctttacttaattattctgaccctcaagtataccaccggaccttaattatcatcatcccctagccctc

SEQ ID NO: 71783 - DNA, 965 bp, Oryza sativa
  Clone ID: PAT_MRT4530_72223C.1
cgtcgccgcccccccccgctctcgttgcttcctcgcggggagttggaaccccctcccctcgccctctccctctcgctgactcgctcctcccggggttggcgagggctcccgcgccgcggcctcggcgatggccgccgccgccgccgtggtgaactacccgctcgtcgcggcgctcgtggcgttcgcgctcgcgcagtcctccaaattcttcaccacctggtttaaagagaagcgttgggatgccaggcaacttatagcttctggggggatgccatcatcccactcagccacagtgacagcgcttgcagtggccataggaatccaagaaggctatcgtagcgccacctttgcaacttcagtaattattgcatgtgtggtgatgcatgatgcttttggagttcgcttacatgctgggaagcaggcagaggtattgaatcaaattgtgtacgagctaccagaagagcatccattatcagagacaaagccattgcgtgaaattcttggacacacagttcctcaggttagcttagtttgcatgattctgtcgaattttagctatttctgtggccttgtaaatactgatattcaaagcagaaagaaccgtaggaagattctctaatctgcgttgtaggaggtagattgtagttcagttggtgctgtacatcgtagaaatttactgtgaattggaagctcatgtgatcaacctttgttatacaactggcaatgatcatgctgtcaacttttctttctggcacgcagtgatattttaagttctgcatcactgtccttagtttattattttactgtgctgtgcttgttagacctagaatgttactaccatacaaatgtcccaaaatttggtcctgggcagtactcagtagtgtgtgtgcctatgctgttttactgtcattcatagttcagactaatctgttttcctctgaaaaaaaaaaaaaaaaaaaaaaaaa

SEQ ID NO: 71784 - DNA, 2883 bp, Oryza sativa
  Clone ID: PAT_MRT4530_72224C.1
cagatcagggttctggatatagtgcccctgaagttgacatgactgggcagtataccctcaagagtgatgtttatagctttggagttgtcatgctggagctcttgacaggccgcaaaccatttgacagcgctagactccggacagagcagtcacttgtccggtgggcaacgccccagctgcatgacatggccgtcgtgcaccgcatcctccgccgcgggctctccgccgcctctcccctcccttctttccgcggcctcctcctcgtctcccctcaggagctcggcaggcgtccggcgagctcgtcgtcgtcggcggcggcggctgcgggggacgtggaggctgagctgcgcgccgcgcgggaggacgtcaggcagctgctcaagtccaacccctgccatcccatcctggttcggttagggtggcatgacgctggcacttacgataagaacatcactgaatggccaaagtgtggtggtgcgaatggtcttctgaaggcgttattcttggtcattcccatcaagagcaagtatgcaggtgtcacttatgcagatatatttcaacttgccagtgctacagccattgaggaagccggtggccccaagatccccatgatctatggaagggctgatgttgctgatggtgaagaatgcccacctgaggggagacttcctgctgctgacccaccttcacctgctgaacacttgcgagaagtattctacagaatgggcctgagtgacaaggaaattgttgcgttgtcaggagctcatacacttggtcgagctagaccagagcgtagtggatggggtaaaccagaaacaaaatacactgaaaatgggcctggtgctcctggagggcaatcttggacatctgagtggctcaagtttgacaacagctacttcaaggaaatcaaagaacgccgagatgaggatcttctagttctccctactgatgctgtgctctttgaggactcatcattcaagatccatgctgaaaagtatgctgaggatcaggatgcatttttcgaagactatgctgaagctcatgccaaactgagcaatcttggggcaaagtttgatcctccaaaggagctcgggaggcgtccggcgagctcgtcggcggcggcggcgggggacgcggcggctgagctgcggggcgcgcgggaggacgtcaagcagctgctcaagtccacctcctgccatcccatcctggttcggttagggtggcatgatgctggtacttatgacaagaacattactgaatggccaaagtgtggtggtgccaatggtcttgtgaatgctttgaagctgatccagcccatcaaagacaagcatgcaggtgtcacttatgcagatctgtttcagctcgccagtgctacagccattgaggaagccggtggccccaagatccccatgatctatggaagggttgatgttgctgcccctgaacaatgcccgccagaggggagacttcctgctgctggccctccttcacctgcggaacatctacgagaagtattctatagaatgggcctgagtgacaaggaaattgttgcattgtcaggagctcatacacttggacgatctagaccagagcgcagtggatggggcaaaccagaaactaaatacactgacatcaaagaacgccgagatgaggaccttctagttctgcctactgatgctgtgctctttgaggagcgacttaaaccccatcgaggaacgtctagagctgggcagtctacttcttcctactgatgctgtgctgcttaaggactcatcattcaagatctatgctgaaaagtacgccgcagatcaggatgcattttttgaagactatgctgaagctcatgccaaactgagcaatctcggagcaaagtttgatcctccaaagggtatttcactggaataagtggcgtctgctgccgatgagctgcattttggcgaatgaacaagacgataccctgttttttcttactactatagagcatattttcgctttgttcagatcgagaaatttaattcattgatcggcaaatgtgatgttggtgttttgtattgagttgtgctctccattagaaataaaaatagcggtggccattttcgtttccaggaccaaacattttggcacattacaatacaatgttttagatgatgtctgcattgagctcttacacaggatgatcaaaatatatgacataatttattactgattcaactcatcagaacatattcacaggttttgtctcgtataatgaaattacaagtttggctgcttcatgcctaatgataacaaaaaaaaaaaaaaaaaaaaaaaaaaaaaaaattccctgtcccgtttcgcagacgtcattgcgctgtgtgtccagcctgagccggagttcagaccgccgatgtctgaggtggtgcaagcgctggtccgccttgttcagagggccaacatgactaggagaatgatcgacggcgaagagggttctcgaagaccagatgaccaggaccaggagttcgtgtaacatgttgagacagatcttgtgttgaacctgcatcctatctctctggtgactgtaatatgtttggttcctagaacctgatgcagatggggaaaggggaaaaatggagggggaaatactgaactttcaactcatcagtacatattcacaggttttgtctcgtataatgaaattacaagtttggctgcttcatgcctaatgatatcagcttgctcatatctgaagctagttgcagtgatatcgatcaaatttacagtctggtagattcttaaaagtttatatactaaaattagttgcatgatatatactattttctttgtaaaaaaaaaagcaacagttgaatatactcttgtaaacataatttctttacagagttttcc

SEQ ID NO: 71785 - DNA, 555 bp, Oryza sativa
  Clone ID: PAT_MRT4530_72225C.1
atgacctctaaccgggttgacgggcttacgtggcggtccagcgtggcaacatatttgcattttgccccctccccccttttgcttcccagtgttcggtccaacgggagcaccggcgagcctgggaggctggcggcagggagcacggttgccgtcggcgggcggtgggcggcgggcgcagcggcggtgggcagcgtggcagcgggttgcgggcggagcggcaatgggcaaagcagcgggtgcagaggccggcagccgaatcaagagagaggaggaggcgacgctgcgacggcggtcgacggctgcagtggggaagcacggcggcggccaaagatgggcccgaggaggctacagacgggtggagaggagacaagtatgggcgaggggcgaggggcgaggcaggagaggaggtccggcgacgcggcggtggcgacgacgcaggagaaggggagggcggcgatgacggtagcacaggggagagcgaagaggatgggggagcacggcggctcgaacgtggcgacggcgtggctgggcgagggccgcccgtggtcgaagtag

SEQ ID NO: 71786 - DNA, 970 bp, Oryza sativa
  Clone ID: PAT_MRT4530_72226C.1
ggtggaccgcgtccaccgcgacctcgggcgcgcgtccaccacgtggacggcccagatcggccaaggccgatcggacggcttggggacagccgggtggcgcggcccggccagcgctcacacaaagcgggcggcggcggcggccgggaccgaagcgacggcggcacacgggctgggcggccaccggcggcggcacacggcgcgcgcaagcacgggaggcggccggccaaggggagaaagagggaggggagaggagtgctcaccgagggcggcgacggcgagacgaccacggagaggcgaccggcggcggaaaggatggcggcggtcggcacgggaggcgacgagaacggcgttccgatgacgcccgaccacggcggagccacggccgagggacggtgggatgcagcgaatgcggtggaggcggtggcgcggcgtgaggtagatggggatggcggcaagaggcggccgacggagggaggcgagatggcggcagcgcgagagaggtggtgcgcgaggcggcgattttccggaggcggagaggggagatggagtaggggccggggtagagcttggcacggcgttgccgacggcgcaagcggcgaggtgcggcgacgactaacgtggcggcagcggccggctgaaggcggtgtgtggcggtagtggctcggcctcgcgatgggaaggtggttccggcggtggaggagggagatggagtggatgccggggtgcggtggggtgctgtgatgctataggtggcggcggcacagcgcggcagcgacgggagcggcggtggcgggcggctggagatcgctggcgagcggcggcgaaggggatcggcgtggagagctcggtagagggcgcgaggaagaagggagccggcccgagagagggaggaggcgcgcgggccgcgggagaggaaggagggggaggaatttgggccgaaaatggcccaaagagatgaaggaggatttta

SEQ ID NO: 71787 - DNA, 490 bp, Oryza sativa
  Clone ID: PAT_MRT4530_72227C.1
ttgcacctgtagtacctccaatggggaaagccacagaaaagagtgatgtctacagctatggggttgtactgcgtagagatctgcacaggggagacgggcacttgagagtgcagcacctgacagtatgaacatggtgaatgttgttgattgggtttggaatttgcactcgaaaggcaaggttttggatgctgtggatccaacgctgaatggggaatatgatgcagggcaaatgatgaggtttctccttgtcggtttgagctgtgtgaacccattttcagaagagaggcctgtcatgaggaccgttctggatatgctggagggcaatagtgggctgctgtctgttccaagaaagaagccactgctggtatttgttccaaatgcccctattgatcttgagggaatagtctcggagtgcaaccagagtacagtttcaagtggtctctatgaattacaaattgatctaaactaggtaagatgctttctgtatcat

SEQ ID NO: 71788 - DNA, 237 bp, Oryza sativa
  Clone ID: PAT_MRT4530_72228C.1
atgggtggcgttcttagaggtttagatgggttgcatgcctatcaaaggacaacaatgggagggcgggagcgtgcagctgatagtgaagccaaagttgaagctgcggatgccgacgtggatgatggtggggacctcgatcttgaagccgacgatgaaggtgtagtacacgaggtcgagaaaggccatgactcgaggatgaagaggttgcggatggggaagacaaggttggacaagtga

SEQ ID NO: 71789 - DNA, 534 bp, Oryza sativa
  Clone ID: PAT_MRT4530_72229C.1
cgtgtcacgccccgagctagcaccgaccggaactagcccgtgacgctccaaattaacagtcatgttgggctgcggacaggtcccgagctcacaatcatcgtagccggcttgctcctggaagaactcctcatcagcaggatccgcttcatcttcttcagcaaccggatcacccagcccgtggggatcagccacgtcgggagacctccaagctttcatgacaaggcatttccaaagccgacacaggcttaccatatgccgacgagaggggtcccagaccaacaacaggaatcggtccttaagtgcgggagtgggaaaaccgtacacccgattttaagtttgaaggcgaccgtcgatactcgcacagagtgcacgaatatcgaggcgcaattgggtggttacaaggggacatggtggcttgccttgctcgagatctggagcttgatcctcgaaatcctcgcactgcgggtcttcgggctccgaaactacacgcgaaacgggacaactcaacaaacggcgaaaacaaagccttattaa

SEQ ID NO: 71790 - DNA, 146 bp, Oryza sativa
  Clone ID: PAT_MRT4530_7222C.1
cccacgcgtccgctcttataccaattcaaacttaagaatttttggcaaccaaaaggcattggtttcaaccagggagtggtcttgggggtggttcttaatattggcttcgtggttggcgggaccgggaacattggggaacaacacaa

SEQ ID NO: 71791 - DNA, 863 bp, Oryza sativa
  Clone ID: PAT_MRT4530_72230C.1
catctggcgcgccaggtaggcggtgcgttccaatccccgatctatcgtcgagtccaattccgaatccaaatccttccaaatcaatccctccgcaaaagtctattttgcctcccccggggtcgatgggccgaatctctctcggcccatctaccccggggtccccgcgctctgctctctctgtgctgtgtctgctcttgcctgcgccctccgctccgcccgcgccccgcctggcgcgtgctctagccacgcgccctagcgccctccgctcccgccgcctctttgcgtctacgaccccctcccgcctgcgcccttccgtcgccccccccccgcccctcctcctgtccaccgcgccgcgcccccatcttcgcccttctaaaccccccccccccggccgctgttttccgtgccgcgcgtctgcgcggttcgctcccccgcccggtctctgttttacctcactgtcctgtcgtgtcctgtctgctcgtgctcgtcttctcctccctcccaccccccccccccgcccccccccctccccccccccctcgccccccccccccctcctccccccccccccctccccgcccccggccctcgcctccccccccccccgcgcccccccccccccccccccccccccccccccccccccccccccccccccccccctctcctcccctcttcctcccttctccctcctttcgtcctctctgcctctccgcccgcgcccacccgccgctcttcctcccgtttcgttcctcccttcccccccctcgctccgctgcctctctccttgctatcccgaccctcctgctcggcggaccgcggtctcccccccgccgtccctcgctatctttcttctctcccct

SEQ ID NO: 71792 - DNA, 643 bp, Oryza sativa
  Clone ID: PAT_MRT4530_72231C.1
ctaaaactcatcgtagccgacttgctcctggaagaactcctcgtcagcaggatccacttcatcttcttcagcaaccggatcatccagcccgtggggatcagccacgtcgggagacctccaagctttcatgacaaggcatttcgaaagccgacacaggtttaccatatgccgacgagaggggtcccagaccaacaacaggttaggtcccagaccatactgtgccaggaagcccaggggtcctccccgacaccaccccggcaaatccacttgtctctcagcatcaaggctcccctgattagctaattactcagccaggggtgtcccattccacccatgtggttgcactatcatatgctcggatgaaattccaaggaaacggtccttaagtgcaagagcgggaaaccgtacacccgattttaagtttgaaggcgaccgttgatacccgtgcagagtgcacgattgctgaggcgcaactaggtgggtacaagggaacatggtggcttgccttgctcgagatcttgagcttgatcctcgaaatcctcgcactgtgggtcttcgggctccgaaactacacgcgaaacgggacaactcagcaaacggcgaaaataaagccctattattgacctctaagcgtgccattaga

SEQ ID NO: 71793 - DNA, 258 bp, Oryza sativa
  Clone ID: PAT_MRT4530_72232C.1
atggcgacacgcggcgacgcgacggtgacggtgacggcgcgacagcggcgcggggctcggcgcggtgggggcgacggcgacgcagcagcagtgcgatgggacggcgcgcggcacggcagcacacggggcgcgagggcgcgtaggcggcagcagtccacggtagcggcgacagcacggcagagggctcgaggtgatggaatggcgatggcgcgacgagacgttgacggcgatggcagctcggggctcaaggccggctag

SEQ ID NO: 71794 - DNA, 1040 bp, Oryza sativa
  Clone ID: PAT_MRT4530_72233C.1
atgggggcgcggcgcggtggacaggaggaggggcggggggggggcgacggaagggcgcaggcgggagggggtcgtagacgcaaagaggcgcgaacgcgcgagcgaggcgcggggaacggtcagagaaggagacggaaagaaggaactatgagctcgagcacgcgccctggctcaagcgcacgcgcgcgggcgcgagcgcagcgggagcggagggcgctagggcgcgtggctagagcacgcgccaggcggggcgcgggcggagcggagggcgcaggcaagagcagacacagcacagagagagcagagcgcggggaccccggggtagatgggccgagagagattcggcccatcgaccccgggggaggcaaaatagacttttgcggagggattgatttggaaggatttggattcggaattggactcgacgatagatcggggattgagatccgagatggcacggacactagacaacaagcaaagaaacaaatttcgcaattagggtttttaagagataattttcccgctaggcgccacgacggaaagggcgctacatttaccatatgccgacgagaggggtcccagaccaacaacaggttaggtcccagaccatactgtgccaggaagcccaggggtcctccccgacaccaccctggcgaatccacttgtctcctggcatcaaggctcccctgattagctaattactcagccaggggtgtcccattccacccatgtggtcgtacttgttatatgtacggatgaaattccaaaggaatcggtccttaagtgcaagagcgggaaaccgtgctcccggcacgtcccccggtctgcgatttttagaaattcatttagttcgtaagaaccgacccaggtgtcgggtttttccaaggatcaaaggtgacttgccttgctcgagttcttgagcttgatcctcgaaatccgcgcactccgggtcttcgggctccgaagctacacgcgaacgagacgactcaacaaacggcgaaattaaagtcctattattgacctctaagcgtgccattaga

SEQ ID NO: 71795 - DNA, 645 bp, Oryza sativa
  Clone ID: PAT_MRT4530_72234C.1
atgaaacagcttcttccggtgcaagaagccttccctggaccgaccgtccgtcgacgcggcggtgacgccgtacgtccatctccctccatgccgtttgcttggcttgttggcttcggcgaactaactgcgttgtcagcaagtgggccccggccagaagacatgcatggatcatggatgctgcaggtagtgctggccggtcaggtcatggctcgatatgatcttcacgcgtacgtcacttgctgcatggatacgtgtgtgtatgcatatgcaaatgcgtctcatgttcttgacgacgccttcctctcgcgatctctagctcccgcgtcgtctcgatctgaatgtgtgtgtgtatggtgcgtgacaagtggatgggcgtccatggcgaccatcacgtatgctggtttgtttatttatatatgcgcggattacttgcggatcgagttgaaggaccggcggtcgcacaggacggccgtgcggcaccgcctcactcacgcagcccgggagagcggcagcgcggtgcagggcggtcctgcgtgcgactggcacgggtgccgcacgacggcgctatgcgactgctatggtcccgcgccacagcgccgcacggctggctcggtcccgcggaacggcgccgcacgaccgccttag

SEQ ID NO: 71796 - DNA, 297 bp, Oryza sativa
  Clone ID: PAT_MRT4530_72235C.1
atgaccggggtcggcgacggcgacactcaggggcggcacctaggcgcggctcccctcccctccctcccagatccggccgaaggagggactggggagaccggtgactggcaacgcggggcggacggcggcagggagcggccgtgcggcggcagcggccgcatctacgtcatggggagggccggcggcggcgacttgcatgtagcagcggcggcggtgtggaggcaggaggtcggcggcagtagcgggccgacgcatgagctcgtggtggcacagctcgtgatagcgcgcggaggatag

SEQ ID NO: 71797 - DNA, 274 bp, Oryza sativa
  Clone ID: PAT_MRT4530_72236C.1
atagagatccaatatgagcttaattcggatagggatccgaataggagtcctacgggccttggaggcccgagtgatggatcctatatattcgtgaggggtgtgaccggcggaggcattgcatcaccgtgggagtacagcgaggagaatgcacgaggaggagaaggtcgagtaggtgcgatcgattacttcctctacatcgacgcgcgttacttcgcgagagttccttcgacttctcagcgtcttcttccgttgcacaacgcatcgagtggtaacg

SEQ ID NO: 71798 - DNA, 118 bp, Oryza sativa
  Clone ID: PAT_MRT4530_72237C.1
gaatagaagcactataagctgatgcgcaaggctggtgtagaggtatcctacaacgtatttgagtacacctactttggatttacatttttccatagggaggagtcattatcaaattata

SEQ ID NO: 71799 - DNA, 354 bp, Oryza sativa
  unsure (1)..(354): unsure at all n locations
  Clone ID: PAT_MRT4530_72238C.1
cagccgcgagagnagagaaagagagaggagagagagatngcngcngntnacngcngcgcactcggngcgtacgacnggagcgacccatcgangccgatctacntctccntccncggcaaggtctacgacntcacctccggccgcggcttctacngccccngcngcgcctacnctctttcgccggccgcgacagcctgcgcgcttcggcaagatgtccaaggacgacgncgacgtctccngcgacctctccagcctctccgacaaggagctcggcgtcctcgncnttgggagaccaagttccaggccaagtancccgtcgtcggccgcctcaccgaagtgaaaaaaaaaaaaaaa

SEQ ID NO: 71800 - DNA, 151 bp, Oryza sativa
  Clone ID: PAT_MRT4530_72239C.1
gccgcgtcgtaactggatccttaagcggcgcctttttttttttttttgttagaacaacgggtatattttacggtttaaaacgggaaggacgcatcgaggtcatatactgggggctttactgtcatacgaaccctaacggttcgatctggca

SEQ ID NO: 71801 - DNA, 209 bp, Oryza sativa
  Clone ID: PAT_MRT4530_7223C.1
atccatggcatctaggcaccatcgctgttggatccgcggtttgccatcgtcaccgcccttgtcccctcctgtcgctggcaccatcgtcacagcctgccatcaccgtcgccgttgccaccgcggtcatcgtctccgtcgtgtggtgtgatggaggtggagaagctgaagggagtggaggtagatggagttgtaaagtagaggagagatag

SEQ ID NO: 71802 - DNA, 330 bp, Oryza sativa
  Clone ID: PAT_MRT4530_72240C.1
atgacgtcaacgacgacgtcagcaccggcggcggctcgggcggcgcaagctcgccggcgaacgacggcgcggcggcgcaaacggagagcaccaggacgtagagcgcggcgcggcgaattcaccgatgaccaaaacaacggcggaagggcaacagacggcgccggcgacgaggaagaaacggcggcagagatcgggtcgacggcggcgacggcgctccggcggtcttcggcggtggcgaagcggtggacggggacggcggcgacttggcgatcccgacggtggcgacggcgaccgacgacggcggctgcaacggcggcgcggcgcggctga

SEQ ID NO: 71803 - DNA, 385 bp, Oryza sativa
  Clone ID: PAT_MRT4530_72241C.1
ccgcctagtcaccataaaagaaaatgaactgaaagcccattttttggcatccattcatccaaaattctgtgttggactactttttaaagttattagaaactgtcaacatattttttagtcactgtaacttaaaataatttgactttaactgtatataatgccttaaaaataggaagataaaaattctacatagaatttcttacactgtgctaccatataccaccttttcccacgtaattccaatgtttaaatatctaaatatatctatcatacacccacatcttgtcttccttcaaactccaggaaatttcagtggggaacaacatgttaatggcataagtaattaggttctaatagatgtcatattttttacaggactaggcgg

SEQ ID NO: 71804 - DNA, 186 bp, Oryza sativa
  Clone ID: PAT_MRT4530_72242C.1
gaggcgacgacgtcggtggtggattgtgttcccgagcgacgtgcacccggggagggtggtggtcggcagagggagtgggagaggaggccagaacggtggatggaagagctctactccggccgcaaatacaaggatgcaaagaagggaaacgtgtgcttcagaaacattcccacgtcgcggatttga

SEQ ID NO: 71805 - DNA, 234 bp, Oryza sativa
  Clone ID: PAT_MRT4530_72243C.1
atggggaagagccggctggcggcgcagtcgcaggaaaagccaccggtagcgaagccggtgtcaacgaggtccgcggggaaggcggtggatccaagaggagaaggtgggggaagagaggttgaggacaatggggccagcagcgcgacaacagagtggagggcgtccgacattccagtcagagaagccgatgggaatgaagggcgctggccatggcagtgtggaaggaggggatag

SEQ ID NO: 71806 - DNA, 386 bp, Oryza sativa
  Clone ID: PAT_MRT4530_72244C.1
acggattatgtttgtctggcctggactaaaaagggatgtcacggcttatgttcagtcttgtgcaatctgtcaacaatgatacggagaacattgtaagagcccaggattgttgcaaccccttccagttccactttaggcttggactgtcattagtcttgacttcattgaagggcttcctaagtctgggggctttgatacaattatggtggtggttgataagttcaccaaattcgctacgttcattcccttatctcatccctttactgccttaaaagtggctcagttgttcatccagcacatctatgatgtttttgtcatgccgcaggccatcatctctgacagggacaggatctttacaagtgctttatggcaggaactcttttgac

SEQ ID NO: 71807 - DNA, 129 bp, Oryza sativa
  Clone ID: PAT_MRT4530_72245C.1
atggacgccggtattgtgcccctcaacaggttgctggacaagtccctgcagatggcacgcattagaccaagaataagcagtgaatcagatcagggtattttgctaagaacctacaagattgtgaggtga

SEQ ID NO: 71808 - DNA, 453 bp, Oryza sativa
  Clone ID: PAT_MRT4530_72246C.1
ttgaatgagctggtgggcggctcgccggagacggagcaggcgcggcagctgacggacccgccctactcgctggggcgcaccatcctgggctacgacgcgcggcgttcggcgtggctggcggcgcacccggagttcccggcgcgcgtggcgcccgcggggcggccgcgcgtgctggtggtgaccgggtcggcgccggcgcggtgccccgacccggacggcgaccacctgcttctgcgcgcgttcaagaacaaggtggactactgccgcattcacggcctcgacgtgttctacaacacggcgttcctggacgcggagatgtcgggttctgggcgaagctgccgctgctgcggatgctgatggtggcgcacccggaggcggagctgatctggtgggtggactccgacgcggtgttcaccgacatgctgttcgagatcccatgggagcggtacgcgg

SEQ ID NO: 71809 - DNA, 305 bp, Oryza sativa
  Clone ID: PAT_MRT4530_72247C.1
gccgcccaggcgcttaaggagacgaaacctggtgcgctagctaccggatctcaaaaagctccatgtacgctggcgaatctcaacgagtttgacgtagcctagctctttaatcacactccgctggcccgatcttgcataagttgttcatatccagttgtctcagctgctttgatgatctccaatttaactatagggtgctgcacacgaccgctctacatgacgcaactagctccacaaggttattgatgctgcagtatacatgatgaagctgaccatttttgttttttcaaattcaagttagtgtt

SEQ ID NO: 71810 - DNA, 252 bp, Oryza sativa
  Clone ID: PAT_MRT4530_72248C.1
atggacgaggatgtggaggtcgtcgcgccggcggccgaggcggtgacccccccgcacttccgcagctgcgtccccgccgccgcgcgaataggcggaggcggcgattttggcgaggaagaggcgcttagtcctcacaccgaaacaaaagcagcagcagcggggcttcagctccactccacaggcaaaactcaactggggtctgagccttggtcctctaacttcgtcttcagcccagaagcactacgcttctga

SEQ ID NO: 71811 - DNA, 3309 bp, Oryza sativa
  Clone ID: PAT_MRT4530_72249C.1
atggcgcgccaagtagggggacttggtgctcaagattctactactatgtcgtcaaatctcgtcaacaatagcgtcgaccccatcgtcaaccaaggagttccgacttcaacaatgctggtgtgtactcaagtcggtgaaatcgtcttcccgatttacaccatggtgccggtctcgactggtccatcaatgaccagaagtgagaatgccgtggccgtaaccccggacgaccccctgtcgaacgatcctcccgccgaagcggagaaggaatgtcgacgacatccaagcctgaggaagatcttagtgcggccaaatcttgtccttccgacaagaatcacgagccgacaaggacaacttttgaggcgacaagaatccgggcgaatctctgagggactatttcggcgctttaatgagtgcagaaatacaatccccgaaatcactgacgcctctgtgattcgcgctttcaaaaccggtgtcagagatcactatactacccaggagttggcgacaaggcgaatcacaactactcgaagattgttcgagatcgtcgatcgatgcgctcacatggacgacgcactgagacgtaagaacgacaagccaaagacgggaggggagaagaaaccagccaaagacgcacctgaatcaagcaagaagaaaagtaacaagagtgggaaaaggaaagctcaagtggaagtcctcgcgtcggaatatgagtgccctcctaaacacccaaaccggcagcgacacgaagagaatatgtcgctggaaaagcaactggcattggagaaaagcaagcgagtacgggtagtcgagaaagctgccgaggcaaccactcaggactcggattcggcatatccagattccggtctccatgtctcgcacatcttcggaggttccatggcatactcctcaaagcgagaatacaagaaagtggagcgtgaagtttgttcgacatggcagggggctgcacccaagataaagtggtccgaacagaagattgagttctcagatgaggaccaccccaaggctgctgttatcctaggacgatatccgatcgtggtcgaacccactattcggaatatcaaggtagcgcgagttctcatcgatggcggcagctccatcaaccttctctttgccagcaccttggatgcaatggggattccacgaacatacaatgccatcatcgggagaactgcactcgcgaagttcatggccgcatctcactacgcatatcaagtactcaagatgcccgggccgaagagaacaatcactattcaagggaacgcaaagctggccgtccaatacgacaagcgaagcctcgacatggtcgagcacacgcccagcccacccaccgcaaccgagccacccaagaaaccgtccgacatgtcgggggtccccagggaggtgattgagcacaaactcatggtgcgacccgatgccgagccaataaaacaaaaactgcggagatttgcaccagatcgaaaacaggccatacgagaagaagagctcgataaacttctcaaagctggtttcatcagagaggtactccatccagagtggctagccaacccagtcatggtgcggaaggccaacgggaagtggaggatgtgcgtcgacttcactgacctcaacaaggcgtgccccaaggatcacttccctcttcctcaaatagaccaactggtggactcaacagctgcttgcgagttgttaagcttcgtagatgtttattccggctaccaccaaatcagcatggcaaaagagatcgaggagaagacatcattcatcacgccgttcgctcttgggaacaacgtcgaggcctacgtcgatgacattgttgtcaagaccaagacaagcgactcattgattgacgatctacgggaaaccttcgacaacctccgacgatatcgcctcatgctcaatcctgagaagtgcacgttcggagtaccattgggcaagctgctcgggttcctcgtctcgggcagaggaatagaagcaaatcccgagaatatcaaggcaatcgaaaacatgaagtcgcccacaagactcaaggaagtacagaagctaactggatgcatggcggcactaagcaggttcgtcgctaggatgggagaacgaggacaacccttcttcgttctgctgaaaaaacaagacaaatttgtatggacacaggaagtcgaagaggcgttcatcgcactcaagtgctacctgtcaaatccccctgtacttgttgctctccaacctaatgaagaattattcctctatattgccgccacgccatattccgtgcgtactgtcatcgttgtcgagagagagaaggtgcaaagaccagtctactacgtcagcgaagctctccatgacgtgaagacaagatatccacagacccaaaaactgctctatgcagtaatcatgacgtcaagaaagctacgccactacttccaagcccatggggtcacagttgtctcctccttccctcttggtgaagtcgtgagaaacaaagacgttgtcggccgcattgcgaaatgggtagtcgagctaagccagtttgatgtctactttgtgccacgaacagccatcaagtcccaggttctcgccgactgcgtagccaattggactatgcctgaaaataggttagacagtcaaaccgacaatgaaacatggataatggcgttcgacggcgcactcaacagccaaggagcaggggcagggttcatcttgacatcaccttcgggagagcagttcaagcatgcaattcacctcaacttcagagcaaccaataacacagcggagtatgaaggactactcgctgggataagagctgcaaccgcacttggagtcaagcaattaatcgtgaaaggggattccgaactagtcgcaaaccaggtgcacaaagactacaagtgctctagcccagagttatccaagtacctcgcggaagtcaggaagctggaaaaaagatttgatggaatcgaggtccgacacgtataccgcaaggacaacatcgaaccagacgatctggcacggcgtgcatctacacaggagccactcgaacccggcaccttcctggacgtcctgacaaaaccatcggtgaaagaaacaaatgacgaaaatagcacagtcacacccgacatctgctcgggggctacagaggcagaatgcgtcgttgctgacatcgagacctcagatgactggcggatcccactaattaaattcataagtagcgacgagctacccgaggacgatgcaaaagccgagaaacgacgatgtgaaccttctcgaagaacatcgagaacgagttgccgtcagagcagctag

SEQ ID NO: 71812 - DNA, 1048 bp, Oryza sativa
  unsure (1)..(1048): unsure at all n locations
  Clone ID: PAT_MRT4530_7224C.1
atggatgctgcaccatatctgaggaaggtggatctcaaaacttacaagaactacaaggacatgtctttgggtctcgagaaaatgttcattggcttcagcaccggggaggtctttggaaccttcatcttcgacatccagcatcaggagaaggcgacaatatggcccacctgccagattctgtctcctctctatctctttcctcccccacctctctctatccctctcacgccaaaggccgacgaggaaccccacgtgccgacggaggccgaggacgagaggcgcgccggcggctgcgagctgagcctccttgcggcagagaccgagtatgacgcgcgcgtcgatggacgccggcccgtcaagctcacgagctgggcctcagcgccggacttgtgcaagaagatggcgaaggtcggggagcagcagccggcgctggacttgcgcgagaagatggcgagcgcggcgacgggcggcggtggtgcccgaggcggcaggtggcggcgggcgacgggttgcggcggcgccctcccctccgccggatccggcgggaggggaggcgagagncancggcgccctcccctcccccggatccggttggccgtcgtcaccacttgccgccgctgtccgccaccaccgcccgccaccctccagcgctaccgcccgttgtcaccgcccgccgccaccgtccattgctaccgtcttgttggagcgccgtcgccttcacctgcgtcatcgccccctcagccctcctccaccgccgccgctccctccagcgcccgcccgaccgccagccagcgccaacgccgttgggcccgctgccaagaggttcccctctcctcttccctcccctcctcctctcggtctccattcttctgtccattctccccgcagcagccagcgcggggatgtactgtaagccgggcatggcgatcgggcgatcccgcaccacaaaccgctcgggggctgattccctggctgcccaagggagatgcagagggggctcgccgccatgctcatcaacccaggagagtgcaacctcgagaccatccat

SEQ ID NO: 71813 - DNA, 482 bp, Oryza sativa
  Clone ID: PAT_MRT4530_72250C.1
tttccactgatctagctgtctggtaagcttgggcgggctctaagatcactgtccctactgctgtccatgaatggcaacacttaactgataagtgctatacacgatgccttgagtgactatgatgactcagatactgacccccaaggagactcacaagcttgtgtgctggacgctgctctggaggagtcaaatagcggatccaagtagtcagacatgcaaatgcacaatgagagatgatctcagctttactgaattgagcaagctctctattccactcatgctgcactgtagtggttaggcatcactgacactacatgacattctgcaggggactgatcaccgtgtagtgcctccgcacagcctctgaagacgagcagctgtggtttacaacactgcacagggcacacacttgtcactgtaggccattgcatgcactcacgaatttggcacaagcgccaaaggcagactctgttcaccctgat

SEQ ID NO: 71814 - DNA, 2073 bp, Oryza sativa
  Clone ID: PAT_MRT4530_72251C.1
gacatccacgaaggacatatgatcgccgacaacccactgcccccagcgtcgggtgtagagctttcaaccgttcgctacgtgatgtccgatggcctgagagattctgaccgggagcaatagagaagtacgacgggagtaccgacccagaagaattccttcaggtctactccacggtactctacgctgccggagcagatgacaacgcattggcaaattatctgcctacggcgttgaaaggttccgcgcgttcgtggctgatgcacctcccgccccactcgatttcttcatgggcagatctgtggcagcaattcgtcgctaacttccaaggaacatacaagcgtcacgcgatcgaagacgacctacatgcgttgacacagaatccgggcgaatctctgagggactatttcggcgctttaatgagtgcagaaatacaatccccgaaatcactgacgcctctgtgattcgcgctttcaaaaccggtgtcagagatcactatactacccaggagttggcgacaaggcgaatcacaactactcgaagattgttcgagatcgtcgatcgatgcgctcacatggacgacgcactgagacgtaagaacgacaagccaaagacgggaggggagaagaaaccagccaaagacgcacctgaatcaagcaagaagaaaagtaacaagagtgggaaaaggaaagctcaagtggaagtcctcgcgtcggaatatgagtgccctcctaaacacccaaaccggcagcgacacgaagagaatatggtaccccatacacaagtcggacagacattctctagaggattgcctcgtcttcaaaaagtcgctggaaaagcaactggcattggagaaaagcaagcgagtacgggtagtcgagaaagctgccgaggcaaccactcaggactcggattcggcatatccagattccggtctccatgtctcgcacatcttcggaggttccatggcgacgatatccgatcgtggtcgaacccactattcggaatatcaaggtagcgcgagttctcatcgatggcggcagctccatcaaccttctctttgccagcaccttggatgcaatggggattccacgaagtgagttgacacccaccgatcaacccttccacggaatcactccttagtcatcgtccaagccattaggcaagatcacgcttcctatgactttcagccaagcgagcaacttccgaacagagcagattacgtttgatgttgctgagtttgacacagcatacaatgccatcatcgggagaactgcactcgcgaagttcatggccgcatctcactacgcatatcaagtactcaagatgcccgggccgaagagaacaatcactattcaagggaacgcaaagctggccgtccaatacgacaagcgaagcctcgacatggtcgagcacacgcccagcccacccaccgcaaccgagccacccaagaaagtgagcaaaacaaccaagacgccgaaaccagaaggcgtaatcaaaatcgttccactctccagcgccaaccccgacaagacagaactcgcgctcatcaccttcctccgcgacaatgttgacgtgttcgcttggcagccgtccgacatgtcgggggtccccagggaggtgattgagcacaaactcatggtgcgacccgatgccgagccaataaaacaaaaactgcggagatttgcaccagatcgaaaacaggccatacgagaagaagagctcgataaacttctcaaagctggttcatcagagaggtactccatccagagtggctagccaacccagtcatggtgcggaaggccaacgggaagtggaggatgtgcgtcgacttcactgacctcaacaaggcgtgccccaaggatcacttccctcttcctcaaatagaccaactggtggactcaacagctgcttgcgagttgttaagcttcgtagatgtttattccggctaccaccaaatcagcatggcaaaagagatcgaggagaagacatcattcatcacgccgttcgctgtattctgctacgtttaagatgccgtttggactgataaccgcaggaaacacgggctgcaggaat

SEQ ID NO: 71815 - DNA, 2670 bp, Oryza sativa
  Clone ID: PAT_MRT4530_72252C.1
atgaccggaagcgagaacgtcgtggctacaaccctggatgactccatgtcgaaggaccctcccgctgtagcgggaaacagaacgtcgacgtcatctgagcccgagaaggatcctagtgcggccaaactttgtccttccgacaagaatcacgagccgacacggacaacttccgaggtgacgagaaatacaatccccgagatcaccgatgcctctatgatccatgctttcaagaccggtgtcagagatcgctatactactcaggagttggcaacaaggcggattacaactactcgaagattgttcgagattgtcgatcgatgcgctcacgcggatgacgcactgagacgcaagggcgataagctgaagacatggggagagaagaaaccagccaaggacgcacctgagtcaagcaagaagaaaagtcgcaagagtgggaaaaggaaagctcaagcgaaagtcctcgcggcagagtacgcgaacccttccaagcgcctaaacccacaaggcggcgacgagaagaaaatatggtgccctatacacatgtcggacatgcattctctggaggattgcctcatcttcaaaaagtcgatggcaaagcaactggcattggagaagggcaagcgagtacgtgtattcgagaaggccgatgaggcagctgctcaggactcggactcagcgtatccagattccgatctccatgtctcgcacatctttggaggttccacggcgtactcctcaaagcgagagtacaagaaagtggagcgtgaagtttgttcgacatggcagtgggctgcacccaagatgaagtggtcagaacagaagatcgagtactcagatgaggaccaccccaaggctgttgttatcccaggacgatatccgatcgtggtcgagcccactattcggaatatcaaggtcgcgcgagttctcattgatggcggcagctctatcaaccttctcttcactagcaccttggacgcaatggggattccacgaagcgagttgacacccaccgatcaatctttccacggaatcactcctcagtcatcgtccaagccattgggcaagattatgttgcctatgactttcggccaagcaaataacttctggacggagcagatcacctttgatgtagctgaatttgatacagcatacaatgccatcatcgggagaactgcactcgcgaagttcatggccgcatctcactacgcgtatcaagtgctcaagatgcccgggccgaagggaacaatgactattcaagggaacgcaaagctggcggtccaatgcgacaagcggagcctcgacatggtcgagcacacgcccagcccacccgccacagccgagccacccaagaaaccgtccgacatgccgggggtccccagggaagtgattaagcacaaactcatggctcgacccgatgccaagccagtaaaacaaaaactgcagagatttgcaccagatcggaaacaggccatacgagaagagctcgacaaacttctaaaagctggtttcatcagagaggtactccatccagagtggctagccaacccagtcatggtgcggaaggccaacaggaagtggaggatgtgcgtcgacttcaccgacctcaacaaggcgtgccccaaggatcacttccctctccctcgaatagaccaactggtggactcaacagctggttgtgagttgttaatctttcttgacgcttactccggctaccaccaaatcagcatggcgaaagaggatgaggagaagacagcattcatcatgccgttcagcgtattctgctatgttaagatgccgtttggactgataaccgcaggaaacactttccaacacacggtccaaggggcacttagcaatcagcttgggaacaatgtcgaggcctacgttgatgacattgttgtcaagaccaggacaagcgactcattgatcgacgatctacgggagacgttcaacaacctccggcgatatcgcctcatgctcaaccctgagaagtgcacgttcggagtaccatcgggcaagctgcttggattccttgtctctggcagaggaatagaagaaaatcccgagaagatcaaggcaatcaagactatgaggtcgcccacaagactcaaggacctacagaagctaactggatgcatggcggcactaagcaggttcgtcactaggatgggagaacgaggacaacctttcttcgctctgctaaagaaacaagataagtttgtatggacacaggaagccgaagaggcattcatcacactcaaacgctacctgccaaatccccctgtacttgttgctccccaaactaatgaagaactatttctctatattgccgccacaccatactctatccaaaaattgctctatgcagtaatcacaacatcaagaaagctacgccactacttccaagcccacagggtcacagttgtttcctctttccctctcggtgaagtcgtgaggaacaaagacgttgtcggccgcattgcgaaatgggtagtcgagctaagccagtttgatatctactttgtgccacgaacagccatcaagtcccaggtcctcgccgacttcgtagccgattggactatgcctgaaaacagatcagaaagtcaaaccgacaacgagacatggaaaatggcgtttgacggtgcactcaacagccaaggagcagggtag

SEQ ID NO: 71816 - DNA, 243 bp, Oryza sativa
  Clone ID: PAT_MRT4530_72253C.1
gggaaggggagcaatcagatgcagtaaacatcctatcaaatcttacaggtggtacaatgtcgtcatgagactttcccagggagtacagagtagctctggactctaatgctttcgtctttggcaggccatggaggagttggccatgagtgcggatcactgcacgactcccgagggaattccaggagtaccagaagcaagtttcaacaaccggcctaactcattcaaagtcctttccccgccccg

SEQ ID NO: 71817 - DNA, 2595 bp, Oryza sativa
  Clone ID: PAT_MRT4530_72254C.1
atgtcgcattacatagatcctcgtaccagcgtaccccagtaccctctatatccggtctacgggtatcccccgtcgacagtggcgcgccaggtaggggaacttggtgctcaagattctactactatgacatcgagcttcgtcaacaacagagccaacaccggccccatccaaagaatccctacttcaacaatgctggtgtggactcaagtcggcgaaatcgttttcccggtttacaccacggtgccaatctcggctggtccattaataaccggaaacgagaacgccatggctacaaacccggacggtcccatgtcgaaggatcctcccgccgtggcggagaacggaacatcgacgtcatatgaccccgagaagattcctagcgcgaccaagccttgtccttctgacaaggactgcgagccgacgaggacaacttccgaggtcaccaagtcctgtaacacattcgaggaggctgctaccagagcacaaccggaacgaccgacggttggcggtgccgacggtgaaccaccggagcagcggacgtcgcctgcacgagctacccctccacctcgcggcaccggcgatctccgcgaccatctgaacagccgccgagaagcacgacgcgcgtgagacaacaagaatcgttcccgacatcatgtttcctcacgacgtcgcgagaacgaggagcgaggaggccgctcgaacgaggaccaacatcaccgtgattgtcataaccgccgtgatcgcgataaccgcgaacagaggacaccagaagataatggtcgggggcatcgacatgaagaagatgataatggtgaccggcgccaggacaacaatggtggacgatgatagaattctcgagaacctgaacgtcgccctcggaatcgcatgccggagccgagtgagccatcatcgtcatcatcatcatcatcttcgtctacgtcatccgatagacgtccacggaggacacacgatcgccgacaacccgctgcccccagcgctgggtgtagagctttcaaccgttctctacgtgatgtccgatggcccgaaagattccgacccggagcaatagagaagtacgatggaagtactgaccctgaggaattcctccaagtctactccacggtagtatatgctgttggggcagacgacaacgcgttagcaaactatttgccaacggcgttgaaaggttctgcacgttcgtggctgatgcacctcccaccttactcgatctcttcatgggcagatttgtggcaacaattcgtcgcgaacttccagggaacttacaagcgccacgcgatcgaagacgatttacacgcgttaacacagaatcagggtgaatctttgagggactatgtccggcgctttaatgagtgcagaaatacgatcccggagttggcaacaaggcgaatcactactactcgaaggctgttcgaggttgtcgatcgatgtgcccacgcagacgacgcgctgagacgcaaaaacgacaaaccaaaggcgggaggagagaagaagccagccaaggacgcacccgaatcaagcaagaagaaaagcggcaagagtgggaagaggaaagctcaagcagaagtccttgcatctgaatacgagcgcccgcccaaacacccagacccacagggcagtgatacaaagagaatatggtgccccatacacaagtcggacagacattctctggaggagtgcctcatcttcaaaaaatcgttggaaaggcagctggctttggagaagagcaagcgagtacgtgtagtcgagaaggcaactgagacaactactcaggactcggactccgtgtactcagattccgatcttcatgtctcacacatcttcggaggttccacagcgtactcctcaaagcgagaatacaagaaagtggagcgtgaagtttgttcgacatggcagggggctgcacccaagatgaagtggtctgaacagaagatcgagttttcagatgaagaccaccccaaggctgctgttatcccaggacgatatccgatcgtggtcgaacccactattcggaatatcaaggtagcgcgagtcctcgtcgatggcggcagctccatcaatcttctcttcgccagcaccttggacgcaatggggattccacgaagtgagttgacacctaccgatcaacccttccatggaatcacccctcaatcctcgtccaagccattgggcaagatcacgcttcctgtgactttccgccaagcgagcaacttacgaacacagcagataacatttgatgttgctgagtttgacacagcatacaacgccatcatcggaagaactgcactcgcgaagttcatggccgcatctcactacgcgtatcaggtactcaagatgcccgggccgaagggaacaatcactattcaagggaacgcaaagctggcggtccaatgcgacaagcggagcctcgacatggtcgagcacacgcccagcccacccgccacagccgagccacccaagaaagtgatcagaacgactaagacgtcgaaatcagacggcacaatcaaaatcgttccactctccagtgccaaccccgacaagacagtcaagatcggagcatcactgaacgagaaatag

SEQ ID NO: 71818 - DNA, 569 bp, Oryza sativa
  Clone ID: PAT_MRT4530_72255C.1
ggccgccccttttttttttttttttttattttttttttttttttttttttttttttttttttttttttttttttttttttttttttaaaaaaaaaacgggcataaaaaatccattcaaaaaaaaggctttttttaaaagccttcctttataggacccccaagggggggggctggaaaaaaaaattaacacgggccacaggggggggctttactacagacgggaggactaaaaaggacaccccccttccttttggggccggagcaaaaaaaaaaaaggggggcgttttttccccttaatttattttaagagggggggattatttaaaataggggaaacaaaaacgggagggggggaaaccattggccctatcccctggcgggaattaaacagggggaaacccccccccgtttggatatccagggccctggattttttccatcaaggggggaccacccctaaccaggggtttgaggggccccccccccttgaatttttgcccggggtttttacccttccttggattcccggggcacgaaaaaggggggaaaccccccaggacgggggggcc

SEQ ID NO: 71819 - DNA, 472 bp, Oryza sativa
  Clone ID: PAT_MRT4530_72256C.1
acgcacgaacatggggacggccgcagcgatagcacagccctcatcgcactatgatctcaccacacaccagttcaacgcgcctattcctccccgcaacaccagacgtccgcacatagacctccacgcgctctaccaccggccagaccactcacccgaagcaaccccgcacacggatttcaccgcgctgatgctcgacatccaaccccaccccgccgcggacccgccaccagcgtccccaattcctgccccccagttccggccccacgccaggcacctccccccccgccccgcgcacgcgtctcgtcccccggccccgacccgttgtcgccgccgccgccagcagacctcccccctccctcctccggccagatttgggagggaggaggaggggagccaccgccaccgccgctcgcgccgtcgtctccgctgccgccctgcgccgccggacgccgcgcgccgccccgcgctgtag

SEQ ID NO: 71820 - DNA, 329 bp, Oryza sativa
  unsure (1)..(329): unsure at all n locations
  Clone ID: PAT_MRT4530_72257C.1
aacatgcacggagttccctacgatttccgttacgctgctccaatccctggccaggcatcccaggtttactcgcgacacttcaaggagttcatggagcttgtggaggctgcaagtaggaagcatcgcaagaaggccatcatcctcgggcacagccttggagggatggtcgttctagagttcgtcaggagcactccattggcgtggcgaaacaggtacatcgagcacctcttcctggttgcgcctacgctcgctccggggttcatgggccccgtgaagaaccttgcctncgggncaaacgatattctctgcgtcccagatgctacggactt

SEQ ID NO: 71821 - DNA, 526 bp, Oryza sativa
  Clone ID: PAT_MRT4530_72258C.1
gcacgagggttttttttttttttttttttttttttttagccaggccggcctaagataggcggagcagatttacttaagaaaaggggtatttacacatatacaagtttcagacttcgaaaagaggctgtcgaagtgaaaggatgttgccatcgcagcaacttcctaaaagaaaaacaagttacagaaggttgttactctcctaaaacattgaaaacgccagcttctttccagattgccgcttcatctttaattgcgccaaacaggaaccccgctgttcggctctgagcgtttctttccttccaaatcatccaacagaccagcagcactaaagtgtcaaatgcgctcctctggctggtttgaaagacctgccaccactccaaccaccaatctccaaggtccaatccgagctctgccggcagctggaacccggcaccgatccaacccttgatctttctccagacatttgaagtgtaaggacaggagacaaagaggtgctcgcaatcttcgtcattgctcatgcagaggg

SEQ ID NO: 71822 - DNA, 167 bp, Oryza sativa
  Clone ID: PAT_MRT4530_72259C.1
ttctacaaccagggaggcgcatctgactatgatgtgagcatataatgatgatacttgaacagcagaggcatttgagctggtttatggagagatgaaaaagacattggaaaggctagaccctggagaaactagcttgcatgcatttgtgttggggaccaaagttcaag

SEQ ID NO: 71823 - DNA, 306 bp, Oryza sativa
  Clone ID: PAT_MRT4530_7225C.1
cccacgcgtgcgctgaagacaccctgaacacaaagaacgacagagcttggcaagctgaagagacagaccgcttcatgaacgcttactacctcacacaaccgccttacgttacatggactcaagtccatcctcaacatgcccagcacccgccggttcgtcaactgcacctacgacaacgagagcaatcgcaggtggatcatgtgcatgcaggtcaacaccattgatgtcatgaagatgcccaagaccatcatctacatgccaccactcatccctgacgacctgacgaagcaaaccgacgacctgctc

SEQ ID NO: 71824 - DNA, 1539 bp, Oryza sativa
  Clone ID: PAT_MRT4530_72260C.1
atggggtgcttcctgtccaagccggcgggggcgggtcccctcccgcccaacgacgccgccgcgctccccgccgacaaccccgcagatcccgaggcggcggccgcgaatggcggcgctgactccgcggcggccgacggcggcggcgacgacaaggacgccgccaagcgcgcggtcccggtgttcagggagttcggcctcgccgagctgcgcgccgccaccaagggcttcagcgccgacctcatcgtctccgagagcggcgagaaggcccccaacgtcgtctaccgcggccgcctcgacggcggccgcctcatcgccgtcaagcgcttctcccgcctctcctggcccgacccgcagcagttcctcgcggaggcggccggggtggggaaggtgcgccacaagcgcctcgtcaacctcatcggatgctgcgccgagggcgacgagaggctgctcgtcgccgagtacatgcccaacgacaccctttccaagcatctcttccactgggataagcagcccttgccatgggaaatgcggttaagggttgcgtattacattgcgcaggcactcgatcactgcaatgccgagaaccgaaaaatctatcatgacttgaatgcttatagagtactttttgatgaggaaggtgatcctcggctgtcaagttttggactaatgaagaacagccgcgatgggaaaagttatagcactaatctggcttacaccccgcctgagtttctacgaactggcagagtcatcgccgagagtgtgatatatagctatggaacagttcttttggatcttttgagtgggaagcacatacctcctagccatgcacttgatttgataagagggaagaatatactgttgctcatggattcctccttagaagggcagtatgctaatgaagatgcttcaaaactagttgaccttgcgtcgaaatgcttgcaatttgaagcgagggacagacccaatataaagtatctcttgtcttctgttgggcctcttcagaagcaaaaggaggtagcatcacatgtgttgatgggtattacaaaagccacggcggtgttgccaactattctttctccccttgggaaggcctgttccggtatggaccttacagcagtacatgatatattgctcaaaacaggttacaaagatgaagaaggtgcagaaaatgagctgtcctttcaagaatggactcagcaagtgcaagagatgctgaataccaagaagtttggtgacattgcatttagagacaaggatttcaagactgcaattgactactactccaagcttgttggaatgatgtcagtgccttcagccacagtttttgcccggagaagtttctcctatttgatgaatgggcagtcagagcttgctctccgggacgcaatgcaggcccaggtctgcatgcccgagtggccaactgccttctacctacaagcccttgctctctcaaagctcggcatggaaactgacgcacaagatatgctaaacgatggagccacttttgaggccaagaagcaaaatagctggcgaggttag

SEQ ID NO: 71825 - DNA, 542 bp, Oryza sativa
  Clone ID: PAT_MRT4530_72261C.1
cgggccgaattcccggtcgaccacccgtccgggaggtgcaggacagcccgctggacgcgtgccggcaggtgctcgaccggcagctcaccgaccgggagaggttccaggcgatgttccgacgcccggtcgcgctcggcctgcagatgcattgctgccaagagcatgcaacgacgagagcctgcgagtgcacagtgcgccgtcatccgccggatggtgaggagctacaaggagagcatgcctatgcccctggagcaagggtggtcgtcgtcgtcatcagagtactacagcggataggggtcgtcgtccgagcaggggtactacggcgaggggttgtcggaggagggctactacggcgagcaacatcagcagccggagatgacccgagtgaggctgaccatggcgaggcagtacgcggagcaactgccgtcgatgtgccgggttgagccccagcaatgcagtatcttctacgacggacagtactaggcttaactgggttgcctcatacctagtaggaacacaccgctgctgtgatgcatgcaacg

SEQ ID NO: 71826 - DNA, 672 bp, Oryza sativa
  Clone ID: PAT_MRT4530_72262C.1
atataatctacctatgggtgactgattatgtgttttgcctcctactcacctaagtgatatttattaccagaattttttccgtccgtgaatactacatgcataaaatatatcattgtccaaacaagttaactatagatatgaataaggatgatatgatgaaatgttcactttgtcaataatgtatggtcttatatgactaggctatatataatttcttccacagaaaattataaatctactgatcaataatcctggtccattcattctgagcatggtctcctgaggggcataaaggttttactcataaatccctacactttgcttctacgcctgtgaccattggtctttacgatctacctggttttagctatcttgctattattagcatcatggactattaggctgaatttaaagtgcatgctatttccaaaaagaacaaggccagatgccattgtttcttttttctttgttgaacattttttggctttagagatagaaaataatctcctcagcatgatgcaaagaggaggggacataggcgttcctccaagagatgttttgttagttccagacaggtggcttgtacagtgagccttccctttgagaaacacctgctcccctacctagtgtgaaggtacagtcatatgtgatctcgcgttatcatctcagcta

SEQ ID NO: 71827 - DNA, 1868 bp, Oryza sativa
  Clone ID: PAT_MRT4530_72263C.1
cggcgcgggcggcaccggctggattgcttttttgtttttttttatcggatcaactcctgaaatttctaatatattgaagggatgatatttgaacattacaagctctctggcacaatatcaaccgctgattgacacttcccacaatggcatgttactttctggaatcacgaaataaagcaacagaaacaggcatatatagcttcagggagctttagcagaatctcacaatcttacattactcaactcaataccaactccaagctaaccaccaaaactagaagccgcctcacactaacagaggacgtttataatatccttagagcccccatcatgatcagattcacaacaacatgtgactggcagtgcttgcattcccaagtagcagcccgaaaggcgttgcattctgctctaacagatgcagtcaagcccctgacgcgtactttatccatgcattggcccacaaagtgggctcctggtccctcctgtccttttgcaatacacactccagaactcccaacacgtcctcttgatcaacaaggagagtgtcctccgggaagcatccggggtgaccctgccgctccgttgggggtgggaaggagtgtgctgccggggacgcccatggccaaggggatgccgtgctgtggcccgagcacgaagcctatgtgtgaggccatctgaccctttttcgggctgttcatcgttcatctggggcacatccggaggtgccggtcttgagccagctcagggggagtcctcgtggtaccagcagcgccgatcgacgagatacccttcccgcggctgtgcatcggccaccgtggcggcgtggatgggtctagcaccgggcaacggcgggcggaggtgtgcgcatcgaggggggttgggagaagcaccccaaagctcgtgtttggaaacatccatggaccctcctcaaagtctccatttgacaccacagtatcctttggtttgtctggagtgaagagcttctttatggcaacgttgtcaaggataggtccacaagtcggatcatcctccataccagggttcctgaactcaaggctcgcctgctcatctgttgcctgaaaagccaatgcatatgcatcccagccttctatgttgtacaatgtctgcaggtccactgtctgtgatgcaccaccgagcacagacacattgagtgactctagctgtgcacacgttcgggcagcactgaacgtgatagcatactctgagcccttctcaacctgcaccacctgccctatacttgcgtcgtttccaagacgtacagcatgatccccctgtggaacaataagaatcatgccaccctggtgctggcctgctgagatgagctcgactgtcccattgatcgtccagccagggatcgatgatgcaccttcagcaactgaagcagatttgacaaaaccaccagctggtgctgtctcaaagtcaccattgctgagcaagccatcctccaccgcagcggccgaggccagatgggagggcgccagcagaagcaggcccaggcacagccccagcaatgcgagcctcctcgccgaatctccctccatctcctcctcctagccgcctcgagctctcgcctcctccttcccccctcgccgaggaagaagaacagtggagagagtgagccgaagtgcagtgtgtgtgcagctgaccgagtgagcgagccgagccagtcctactcactgggctggcggcagctctctgctcacgccctgctttttatgggactccgatggcgattcccctcgccccgggctcctgccgggccacccccattattctatttttctcgcaggcgtggcctgtggggtctgaaaggaaaggaaggaggagcagtgaccactgaatggtga

SEQ ID NO: 71828 - DNA, 2519 bp, Oryza sativa
  Clone ID: PAT_MRT4530_72264C.1
atggcagaagccttggtttttgttgtccttcagaaaataggagctattttaggggggcaggtgctgaatgaaataagatcgcaatttggaaagaagtcacttatatttgaagtggagaacagtgtgatggaactcgcaagcgagtttagggtcatgcaggcttttatcaaccatgttggaatgtgttcacatcaaaatgcagcttatgaggcctggttggatgaagtaaagtcagttgggtttgatgctgaggacataattgaagagtatgcatatcttattgcgcaaacatcaaatgaaggcggcttgattaagagtgtattacatcgatccatcaatgcatggtgccatattgcgacacaactgaaacaaattgaagctcgtttacagaagctcacagccatgaaagatcgttatggtattttgatcagtgaacaaaaactgggaagtaatcccagtcatgatgatctcaaacttatgtcggattctttgtatttttactctcaagatgatattgtaggaaatgaagaagaacttgcgtggatcacacagcggctgatacaaggacggaaatcccgtacagtcatctccatttgtggcatgggaggtggacgggtaatcatcacaactagaaatgaagatgttgcaatattggctgatgaggaccattgtattatgctaaagactctacaatggaaggaagcatggaatctcttttctagaaaagcctttcctagtcgaaaagaaaatcaatgccctgaaagtgtcgtacaatgggcggagaaaattgtggataaatgtaaagggttgccacttgcaatagttgctattgggagtctactttcccacaaaaagaaagaagagaatgaatggaaattgttttataaccaactgaactggcagctgatcaataacccggagttgaactttgtgatagctgttctgaatcttagctttgagtatctaccaagcaatctaaaatactgcttcctgtattgtggcctatttcctgaagactatctgattaaaagaaaacagataattagattttggatagctgaaggttttgttgaggaaactggagccaatattactatggaagaactagccgaagagtatctcaaggagcttgcccagcgttcacttcttcatgttgcagaaagaaatgtgtatggaagagcaaagtcattccaaatgcataatcttgtaagagatatggttgtcagtaaatgcaagacctacaagttttctgatcttgtggttgaccattgtgttacaaaacacaaatacaagacgcgtcgtatatcagtattagaagctgatcatgcctctgaagcacctacctatggagagaaggttcgctcatttatcctgttcgataagaaagtaccttactcttggttggaaactgcaagtagagattttagattgctaagggtgctgtccttgagaagagcaagcatccataaggtccctgatgttgtgagcaatttgttcaatttgcgctaccttgatttggcctatacaagagttaaggtgattccaagatcactgtgccgactgaacaaattacagatgttggacctttggttcactggcgttgtcgaactgcctcgagaaataaagctgctaacagagattcggtacatggttgctactgtcatgagtgaagataatcacagaattttcaactgcttcctgccagttcgatttccttgcgaagtttgtcatctcaaggatttacaggtactaggatacatagaggcaagcaaagatatgatttctaatctcagaaacttgaatcaactgcgcaaccttttcatgatgaaagtggagcataattatttaacagagctatgggcctctatcaaaaggatgccaaatcttgtcaggttggatataatctcgtgcgacagcgatgaagttttcaacatggagcacttggaccctcttccagaattggaaacattccatcttagagcaaagttacaagatggtgttcttcccaagatgtttcatggtcttgttaaaatcagagacctggagatggggtggtcagggttacaagtagatcccgtttgtaccttttcacatatgtcgaaccttactgaattgcgtctttacagggtttatgagggggtgcttttgagcttccaagctggtttgtttccaaaactcaagaaactctccttggctgatatggagaacctcacatggattgaaatggaggatggcaccatgcaaagcctaaattttattgcacttattggtttaagaaacttgaaggttgtgccagaaggatttcaatatctaatgtcactccaagagatgttccttcaggatatgccacaagagtttataaagagggcacaaagagaagaccgggtttacatccagcacatccctaagatacgaaaattttgacaaagcaaattcactcctatgattgtaacctttttaccttggccttgtgctggaatgtaattatagcaaagtgcacggtcggttgcagctgtgtc

SEQ ID NO: 71829 - DNA, 681 bp, Oryza sativa
  Clone ID: PAT_MRT4530_72265C.1
cgaacaaccaatttcacacaggaaacagctatcacctgggtcacgcgctgctctgatgcgcctctccctaggggaagcaggcacatgggcggttcccgcaacccgcccccgccgtggccgccgacgcgtctgacggttagttccaagggaaagaagaaatggaggcttcacgcaaggtgttctcggccatgcttctcatggtgctgctgcttgcagccactggtgagatgggcgggccggtgatggtggcggaggctcggacgtgcgagtcgcagagccaccggttcaagggcccgtgcgcccgcaaggcgaactgcgccagcgtatgcaacacggagggcttccccgacggctactgccacggcgtccgccgccgctgcatgtgcaccaagccctgcccctgatcgatgaaccagcagctagcgcagcagcttgtgccgccacctcgcgcatgtgtcatcgtgtcgatcgatcggatcctagctgccctatgaatgaataaaagtgtgtggcttatgcgtggttttctcttggagaactttggcttttgtggtgttaagttcgatcgttttgtgcatccaccatccatccatcctcccattctgcttgttctaagattatactactacttgagaagcaaatgaaaaaaaaactcagaaaaaaaaaaaaaaaaaagcggcc

SEQ ID NO: 71830 - DNA, 391 bp, Oryza sativa
  Clone ID: PAT_MRT4530_72266C.1
ggttcccaccaacgctgcccccgcctggagtgcgtcaacctcgtccacactgtgccgtgaagaactcttcctcttccgcccctcaccgtcgggaaggactcatcctcctcggcccctcggccccgggaaagaatcatctttctccgcccgtcggcgccgggaaggactcctcctcgtcggcccctcgtcgccgggaaggaatcgtccttctccgcccgtcggcgctgggaacgacgacttcaactccgccgtccctgctcacacaccgtcggtgccgagattgagtgcacccctgctcattttctctcccgatcctacgcatcctggattcaacgcaaaaactgtaaaggttgggctgtacacatcaaaaaatgatgaatatagacattag

SEQ ID NO: 71831 - DNA, 268 bp, Oryza sativa
  Clone ID: PAT_MRT4530_72267C.1
tactaagcaaaagaagaagaagaagaaagaggttgatttttgatgcataccgctgctagcacccgccgttggattgtttgtcgtgttgtccgcctgctgtgaaggggcgcatcctgcagattcaggctcctcgccgtgttgcgttgcgcgttcgtgcggctgttgcggcggtggcagtggaggctgcggaggtggactacagctctaacatctcggtgtttcttatggaggtcttcgacctcttcggcggccaggcgggcaccgtgca

SEQ ID NO: 71832 - DNA, 464 bp, Oryza sativa
  Clone ID: PAT_MRT4530_72268C.1
aaagctatgagtgccatggacaggacaacgacaagctggttggcaatgctggtacagatggggcgcggcgctcaatctggggcctaaatgctgctggatctgagctgaggttggggcagggtggcataggacccggtgaaaggtggatggaacgtggatgtgggctgcacaagcatcttgacaaccttctcctacaagacgatggaagacttttccatgttgacttctcgtatatgcttggggaacaaccacatcgatttgcaccaccatcaccaccgatgaaattatgcaaagaaatggttgaggccatgggtggtactgaaagtgaatactatgcaagattcaagtcctactgttgcgaggcatacaacatattacgaaagtccagcaacctcatactgaatcttttttatctgatgactggatcaaatattgagagtatcacagacaaagggacttctaag

SEQ ID NO: 71833 - DNA, 3219 bp, Oryza sativa
  Clone ID: PAT_MRT4530_72269C.1
atgccgtcggcgcccgacgaagcccaagcgggtgtcaccaccggaaccgccgatcattcctcctgcagcggcggcaaagagtttcggttcatcctgtcacaggacatcagcctgccgctgtcgttccgcgtcaaccgcttcgtgccagatcgcaccctgttgattgaaagaagtgctccagtgctctttgttgagtgtacactatacattgatggagttcagtttgtgttctccacaaattcaaggttgaaatctttgggatcaccatactgctggaatgagcttgtaacattaagtgccaaatacagagacctaacgcccttctcacatcttgcattcacggtgcgggatatgtcatttggtgaagacaacatctatattgttggtggaaccactatatctcttttcaatagcaaaaaccaacttaaaactgggaggctgaggctgagagtatggcccaataaaatggcagatggaagtctctccacctctacccctggcaaggttcccaagaccaagagggaagaaatagagaggttggaaagggttgctaacaagtacatcagagggcagataccacatataggttggctagacaatctcattgcaaatgctgctgataaacttgagaaagagactttgaacacagagttgtctttcaggttgcactatttgactattcagttcttttttgttccaaatttcatggaggaatatggagcaaagttgcatacatcagtcccttcatccttagtggatatatctaagaataaacttgttattgcatgtgatcctgagattgggcgaatcaatccatctgagcataaacactctgtgcttgcttggagcttggctcgtggagtaaatgatagagagatgaagccaagctcagttgaccaaaagttaatacaaaacatcctcaagtatccacccacacgcactttaaatgtggatgaaaagcaattgttgtggaaatttcgtttctatttgacatctgagaagaaagctcttgtaaagttcctcctctctgtggaatggagtgacatccagttcatggttatagagatatatcgttgtgcaaacacaaatttcagtactatagtcacagctacagaagccaaacaagctgttgcgttgattccaaggtgggaatctattgatgtggctgatgcattggggcttctttcaccagtttttcaaaatgaggaagttcgtgcttatgctgtcggcgtgtttgaaagggccagcgacgaagaactgcaatgctatttgctgcaacttgtacaaggcctgcggtttgaaagatctgacagatctcgtctagcacacttccttgtgaatcgggctttgtcaaattacgaacttgctagctttcttcgctggtatttagttgttgagcttcatgatccttctcatgcaagaaggtatctatgtacatatgagatgcttgaagatgctataatgagatcagtacataaggaggaaaatggatttcaagtgtggcagagtttgatagagcaggcagaactcactgctcagttacgttctataatgaaggaactatcaaatgtcaaacatgacgcacaaactaaaggcaggatattagaacagttattctccggaattttcagtgagcttaaaaacttcagtgagccaattccatctccattaacaccgactgtcctccttgacggaattgtgcctgaagagtcattggtattcaaaagtgctaattatccattgtgtatagcatttagtactgtgaatgggggtacatcgaaaatgattttcaagaagggagataatctccgcaaggatcagttggttattcaaataatctctttgatggatcggttgctcaagtcagataatctagacttacaccttactccttatcaagttcttgcgactggtctagaagaagggttggttgagtttattccttcaatttctgttgcaaagattatacaaaaaacgggcagtatagaaagttacctacaaaagtgtaatccggatgaagatggcccttttggtataactgcccaatgtttggaaacttttataaaaagttgtgctggctacagtgtcattacatacatactggggattggagacaggtggctgtggttaaaagggaagacgccgttggggaccgaggtggctggatcgggcttaatggttagatccgctgtacttctggaatgcattttggttcgaatatggcccttttggttcgaagaaagctatgagtgccatggacaggacaacgacaagctggttggcaatgctggtacagatggggcgcggcgctcaatctggggcctaaatgctgctggatctgaggtggccgtgcccgaatctcacttgcaggggcatcttgacaaccttctcctacaagacgatggaagacttttccatgttgacttctcgtatatgcttggggaacaaccacatcgatttgcaccaccatcaccaccgatgaaattatgcaaagaaatggttgaggccatgggtggtactgaaagatatttattctttgcatgtgacttccattttagtgaatactatgcaagattcaagtcctactgttgcgaggcatacaacatattacgaaagtccagcaacctcatactgaatcttttttatctgatgactggatcaaatattgagagtatcacagacaaagggacttctaagttccctatgtcgacgcacccaagacaatcaatggcatcgaagcctcctgagtgggatctgcaagctcaagctcggggggtgacaggggaagtggaactttacctcgccggcgcatctaggagacactcacatgtgctcagggtggcgaggaggcagagcttgagcttgaccacgttagcacatggaggaggtgcttggggggcatggcgggagctggagcgggagcttgaacttgcagcagttggggagacgacgggggtccaggggggaggggggaagggagggctcgagttcactgacgcctggagaaggaggcactctgggatgtggcgggaagccaaagctcgacctcgtcggcgcatggagtggggcaggctcagggacatgtatgtggcgggaagccgaaggtccagctcgccaatgcatggagaaggaggcacttggggagacggagttcaacctcaccggtcgggaggcggaggtggtcgttgcctcgttggcaggggcgatggagcccattga

SEQ ID NO: 71834 - DNA, 411 bp, Oryza sativa
  Clone ID: PAT_MRT4530_7226C.1
atggccggcgacgaggtggatgcgccgaaggctctcctcccacccagaccggccatcctcgtggcgagcgccggtcagcatctaccaaggtccaagggcaagtggtacgcgccgccatcgtacggtcgatctcgtcgtgcgcgtcctgttcgatgccccgacgccgctcgccgcccgtcctcgcggacgccgccggagccggagccaccggttggtttggtagacttgtcccccttcgcctgcctccgcttcacctcgtcgacgcctcaccccacttcgattcccaccaccactccaccagccgtccatacaccccgatccccaatccccagttccagtgaggagcgagttaatcctgctgctccgctgctcgccagtgcggcgctgcttctgcctggtgatctcatctag

SEQ ID NO: 71835 - DNA, 474 bp, Oryza sativa
  Clone ID: PAT_MRT4530_72270C.1
gtgtgggatatgtcatctggtgaagacaacatctatattgttggtggaaccactatatctcttttcaatagcaaaaaccaacttaaaactgggaggctgaggctgagagtatggcccaataaaatggcagatggaagtctctccacctctacccctggcaaggttcccaagaccaagagggaagaaatagagaggttggaaagggttgctaacaagtacatcagagggcagataccacatataggttggctagacaatctcattgcaaatgctgctgataaacttgagaaagagagtgagagaactgaaaatttgcattctagccttattgttgaactatgcagctttgaacacagagttgtctttcaggttgcactatttgactattcagttcttttttgttccaaatttcatggaggaatatggagcaaagttgcatacatcagtcccttcatccttagtggatatatctaa

SEQ ID NO: 71836 - DNA, 369 bp, Oryza sativa
  Clone ID: PAT_MRT4530_72271C.1
atgtccgtgtgtccagtgccaacgcatgtgccatgctggtccacaccagctagagatggcaacggtgaattcaccgtcgggggtcacacccgcgtccccgtcaccacggtgataaaatttcaccgtccccgcccccgtcaatcacgacggggctatattttcaccaaccccgatcaccgcgcggtgaatttttccccgtggttaccccgctcccggccacgcaactacatctcccacgcccacatcgacgcctgcaggcgccgggcagcacaaagccggcggctcccggtggcgcgtcaacggagggagcaggagagcggcggcgcgcgcgagaggaggcggcacgagcgtctgcagagggcggcgtag

SEQ ID NO: 71837 - DNA, 102 bp, Oryza sativa
  Clone ID: PAT_MRT4530_72272C.1
ccgctctcacagtctcacgcacgcacgccagcaggcggcacgcaacgcctcgcttcacggcctcggctagagagacgcgtgcacgcgaacgcagatgaagcc

SEQ ID NO: 71838 - DNA, 636 bp, Oryza sativa
  Clone ID: PAT_MRT4530_72273C.1
aaaggaaaaacacagaacaagttgactaaaagttcaacaattaacaatagtcgagaggaaaaaggaacatctgcaacaatctaaacaaataatctaattaatattttaacttaagtttcttcacactaccttattataaagacaccaaggcctccaacatttctattatttggtacgatttattaatgttgtcactgccatggtgtaaccatagatcgaacagaatgacaagaccgccttaaaatgctgcggaatcaagcctaaatcttcaaatataaagcctcattggtagaatttgtagttgcttgcagacaaaattatgctcctcaatccaccaatgggtgcaagaatcatcaatagaacccctacgacgatgaaggaccaatttatccaccaagagaagctgaatcttttgggttttttgataatgagccacatgatgcagggtagatagtatgttgttggtgccaaagcaaaaccaccaaagaatccaagtagaccaccaaaaaatgggaatgtcatgccaatgaacattgtaattccaacatataaggtacgagtagtgaaccgaagcttggttgaaggcttaaacttgtattgctttatcagacaagtctccatcatgtcaaacaccgg

SEQ ID NO: 71839 - DNA, 238 bp, Oryza sativa
  Clone ID: PAT_MRT4530_72274C.1
atgaaccctcaggcagctgaaccgctgcagcacacaagatgcaactttgttagtcttctgaaggggccaagttcagttgcgggacggaagatacaaaagccaagttcaagataccggattgagttccgaaccccatcagataaaagtgcgcagggaaagttcaacttgaagccaattgtcaagattgtgatatgcggtgaggttgggatagcacctccaggaacatagaaaggaatga

SEQ ID NO: 71840 - DNA, 313 bp, Oryza sativa
  Clone ID: PAT_MRT4530_72275C.1
atacgcctttgggaataatcagatagaggccacttgatgaacaactatcagagtcaccaaaagtagctaaccaaggttgtttcatcctcaacattctcacctatgtgctttcatcctgctcttatctcgtcgtgtggtctgtttttctttgtgtgctttagtcattcagacatgaaccattggaagtgataactctgcaggatagttttttcagtaaattgtttgaatagttccttacagattaagccttgtcccttttcttgtgctgccttgcatttaactgtatagatctgaaaaaaaaaaaaaaaaaaaa

SEQ ID NO: 71841 - DNA, 316 bp, Oryza sativa
  Clone ID: PAT_MRT4530_72276C.1
atggaggcctcccataaagcatagaaagatggtagagatgacaaggcttggtggctctgattgtggatccgcagtgcatacaaagatatccacaccaggtagattttgttcatatctgcttcaaaggatatggtaaatgtgttaaattgtgggaaatatatgttttctcaatgattgatataaaaccaacctcttcgtcaaaaatggtgtggccataatatctttacaatgaagaaacattcttaagttgtggaaaggaaaaaacaaactcgtgaacatagctgagtaaaaataagtttaatgcaaatagataatt

SEQ ID NO: 71842 - DNA, 222 bp, Oryza sativa
  Clone ID: PAT_MRT4530_72277C.1
atggtgctgaagccgtgtgtaacggttagggtgggggtggaaggtgaggagcagcggaggttcaccgtgctgctcggacaccccaaacacccgctgttaggggagttgatcgacgaggccgagcatgagtatggcttcgcgaagcagggcaccatctgccatcgtcatctatggccacgccggcacggtgagggtggttgcggcgacgcgtccttgaggtga

SEQ ID NO: 71843 - DNA, 2391 bp, Oryza sativa
  Clone ID: PAT_MRT4530_72278C.1
atggatggtctcatccggccaaattggctggatacacccatccaatatcttagaggattattcttcggggcactagggatagagatacatgcaagtgagtaccgctactggactgcggcggtcaccgacgacccgctgtcggtgctgtcgtcgtggtcggagtccgaccccgacccctgccggtggcccggggtgacgtgctccaacgtgacggcggcgggcggcgagccgcggcggcgggtggtcggggtggcgctcgccgggaagaacctgtccgggtacatcccgtcggagctcggctcgctgctgttcctccggcggctgaacctgcacgacaaccggctcgccggcggcgtcccggcggcgctgtcgaacgcgtcgtcgctgcactcgctgttcctctacgggaaccggctcaccggcgccctccccgccgcgctctgcgacatcccgcggctgcagaacctcgacgtgtcgaggaacgcgctgtccggggggctccccggcgacctccggaactgccggagcctgcagcggctcatcctcgccgggaactcgttctccggcgaggtgccggcggggatctgggccgagatggccagcctccagcagctggacatttcgtcgaacgggttcaatggctccatcccggccgacctcggcgagctcccgaggctcgccggcacgctcaacctgtcgcacaaccggttctccggcgtcgtcccgccggagctggggcggctgccggcgaccgtcacgctcgacctccgcttcaacaacctctccggcgccatcccgcagacgggctcgctcgccagccagggcccaacctccttcctcaacaaccccggcctctgcggcttccctctccaggtcccctgccgcgccgtcccgccgccgacgcagtcgccaccggcaccgacgaccacgacgaccacgaccaccccatcgtcggcttccgccgccgccgcggcggcatcggaacaccaccaaccgatcaggaccagcctgatcgccctcatctccatcgccgacgccgccggcgtcgccctcgtcggcgtcatcctagtctacgtctactggaaggtcaaggatcgcaagaaacaaggccgctcctccaccgtcgccgccggtgacgagaacgaaagccgccacgggctctgccgctgcatatggggtcaccggggcgtcgactccgacaccgacaccgacgactcgtcggcgtcggagaacggcggcggcggagggaagtacggcgagggggagctggtggcgatcgacagggggttcagggtggagctggacgagctgctccggtcgtcggcgtacgtgctggggaagggagggaaggggatcgtgtacaaggtggtggtcggcaacggcgcgacgccggtggcggtgcggcggctgggcggcggcggtggaggcggggagcggtgcaaggagttcgcggcggaggcgcgggctgtggggcgggcgcgccaccccaacgtggtgcggctgcgcgcgtactactggtccgccgacgagaagctcgtcgtcaccgacttcgtcggcaacggcaacctcgccgccgcgatgcgtgaactggctggtgaggctggtgttttggcaggtcgtccgggtcaaacacccctgtcgtggtcaacgcggctgaagatcgcgaggggcgcggcgcgcggcctcgcgtacctccacgagtgcagcccgcggcggttcgtccacggcgaggtcaagccgtccaacatcctcctcgacgccgacttcaccccgcgcgtcgccgacttcggcctcgcccgcctcctcgccgtcgccggatgcgccgacgacgtcgtcgacgcgcccccggcggcgccgtcgtcgggcggcctgctcggcggcgccataccgtacgcggcgaagccggcgtcgtccgtggcggcggatcaccgcggcggcgggtaccgcgcgcccgaggcgcggacggcgggggcgcggccggcgcagaagtgggacgtgttctcgttcggcgtggtgctgatggagctcctgacggggcgcggccccggcgaccacgcgtcgccgtcgacatcggcgtcgttctcggcgccgtcgtcgtcgtcggcggcgacgacggaccggtcagggagcggcgagcacgggcacggcgccggcgtcggcggcgcagtggtgccggaggtggtgcggtgggtgcggcgcgggttcgaggaggaggcgcggccggtgtcggagatggtggacccggcgctgctccgggacgcgccgccgctgccgaagaaggaggtggtggcggcgttccacctcgcgctcgcctgcaccgagctcgacgccgacctccgccccaggatgaaggccgtcgccgacaccctcgacaagatcgcctcctcatga

SEQ ID NO: 71844 - DNA, 1410 bp, Oryza sativa
  Clone ID: PAT_MRT4530_72279C.1
gggtacgggcccccctcgagtttttttttttttttttttttttttttttttgcgaccaaaagatcatcactccatcagtccatttcatccgctaatactctagttaaaatcaaatttcgcttaaccagtcaagaattgatctaaaaaaaatgacgctacaacagaaggggtaagtttgggcaaaaattgatcgaaagcataacaacacgtttggtggatgcctctgatcttctaagtctaaagtcctcggtatgtacatgtcgtcagattggcctctgagctctgtcgccggagacatggcgatcacatcaccgagcaggcgttggggttctcgtcgctgaacagctgcggcgccggcgacatgtcgagctggtaggggtacggcgggtacgacggcggcggctggtaggtagggacgtcgttggggtgggggtggtagtagccgccggcgccgccggcattggggttggcgtagcccacgccgtcgccattgccgccgccgtagtactggtagtagctggggggaggtccctgctgctgcgggtacgcgaagtagccgtggccgtacggcgagacgtggtacgtgctcgcctcggccggcgccggcgccatggacgccgcggcggcggcggtggacgggccggcgacctcgatgctcttgcctttgtccttcttgtcgccgccggcggcgtctttcttcttctcgccgccgtcggcgtcaccgcccttgtccttcttcttctcgtctttcttgctgccgggcgccacggcctccacggcgcggttgagcttctcggtgagataggtcagcatggccggcacgtccattgtgcccgacaccttcacctcatccttggcattgccgtccattaccacttccttcacccctttgatcttgtagatgcgtcgcctgatgcggtcggcgcagccatcgcagtggaggcgaatcctgagcagcaccgtttcctctttgggtttcttctcctctggcggttgcttcttccccttctcctctttcgcctgggcgtccttcttctcgccgccatcgtccttgacggccttgggctcggcggcgggtttcttggcggcggcgccaccgccgccggcggagacaacctcgacgggcttcttggtcttcgcctcgatcctcgccttgagcgcggccgcttcggccgtccccgccacgacgaccgtgttcgtcgccacgtccgccgccaccgactccaccccggccaagtgcttgatggacttcttgaccttctgcgcgcagccggcgcaatgcaactccatcctcagcaccaccgggtcggcggtggcgcccgccttcggagcagccttctcatcccccatggatggatttttccaacctcctcctgtgctcgcctctggaagtctggaatttgagatttt

SEQ ID NO: 71845 - DNA, 336 bp, Oryza sativa
  Clone ID: PAT_MRT4530_7227C.1
atggccagagtccagcagcagcagcagcagcaacattacgcaacattcaacaacaatcagatcaaccgccgtacgccctatgcaccggcacttagcatcggcacaggatgccgctggccagcggatgggaggtaccccagatacctcccaagcactgcgggggagggcgggagacgggcgccgccgccggatccgggcagcggagaggtcgcggggacagccgccgtccgcctccgctccggccacctcctccttgtcggcgggggcggcgcggattcgcgcggggccaacagcgccactcccggccacctcgtcggcggtggtgggggcgattag

SEQ ID NO: 71846 - DNA, 363 bp, Oryza sativa
  unsure (1)..(363): unsure at all n locations
  Clone ID: PAT_MRT4530_72280C.1
cctcgaggccggncggaaacccattccctctcacctcgtctcgacccatcggagtcaccacttcctcaatcctcacccgggaaatcggctgcgccgagtcccctcatccttctcctcctcttcaggtgacccccgactccgctccggaggccagatctctccctcgaccaatatgaactcagagacctcatagcagaacccggcagatatgacagcattagtccaaagcctccaaacccaaacgcaatcaacgtttgtgcttatgtcccaaaactctgtgtcaaagataaatgaatcggcaaccaggatcgatgcgatggagctacgagtccaccacctcatagttgagatgggtactgatgt

SEQ ID NO: 71847 - DNA, 271 bp, Oryza sativa
  Clone ID: PAT_MRT4530_72281C.1
acggcacgaggaccacccgcgcccacctctgctctgctctgctctcctctccgatagatacgcgcccgcctacgccgtgctactaccgcccacctacgcctacccccgccgccgcctagcggggaggcggacgcggcggggccgctaggagaggtacggcggcgtactagcgggggcgcgaggcggcgcgctaggcggtggtaggatagggaggacggggaagaggtaacgaggacaaggtagtacggacgaggggaccgtgcgcgccacc

SEQ ID NO: 71848 - DNA, 135 bp, Oryza sativa
  Clone ID: PAT_MRT4530_72282C.1
gcgctaaactggcgcttaagccaatactgcccctaggacttatggcctacgatgatttagatcgaactggccacccggccctgggtctgaggtcgtcgcaaggcaacccaggccaacaatttacgattttagttg

SEQ ID NO: 71849 - DNA, 343 bp, Oryza sativa
  Clone ID: PAT_MRT4530_72283C.1
atatgggctgcccggcatggcatggtccaggcccgatcatgctcgggccaagatttgttgggccggcacaacccgaccaatacgccgggccatgccacgtcggcccacgtgctccactgtggcccaggcatggcccaataagggtcgggccatgctgggccggcccgaccgtgccgggccggcccaccgtgccgaggcataggtccaggcacagcccaacacccgaaccgtgccggcatgggcccgacaacgatcaggccgtgccgtgcctgggccaggccaaaatcccctgccttgggccgggccgttgggcctcgggcgttatggccaactatacttcacg

SEQ ID NO: 71850 - DNA, 779 bp, Oryza sativa
  unsure (1)..(779): unsure at all n locations
  Clone ID: PAT_MRT4530_72284C.1
ccggccggcttctactgcggcaacgagggggacatcgcctggttcgccgccaactcgggcctcgtgtgggaggccgccacgcgcttcgccgctctcgtcgtcttcgccgagcatcggtactacggggagtcgatgccattcggcagcaaggataaagcttacaacaattccaagtccttggcgtatctcacagccgagcaagcgcttgctgattatgctgtactgctcactgacctcaagaagaacttgtcatcagaaggcagccctgtcgtgctcttcgggggctcatacggtggaatgctcgctgcttggatgagacttaaatacccacatattgctgttggggctctcgcgtcatcagctccaatccttcaatttgaagacgttgtcccttctaccatattctacgatctcgtgtcaaatgatttcaagagggaaagtttaagctgctttcaaacaataaaggactcttggaaagcactggatgctcaaggaaatgggcaagatggtctgctgaaactaagcaaaactttccatctatgcaagactataaaaaacactggnggaactttcagattggttgagctcagcgtacagttacctgggccatggtggattacccaatgccagcagattttatgatgcctttgcctggcaaccaatanaggaattgtgtacaanaattgacaatcaacctgatggaaccagtattctggagcgatatatgcaggagtaaatgatactacactacactggtactggtgactgcttgatctaat

SEQ ID NO: 71851 - DNA, 1902 bp, Oryza sativa
  Clone ID: PAT_MRT4530_72285C.1
atgcgtccgctccctctcctcctcctaatcctcgccgccgccgcgtcggccctggcgagggcgccgccccgcttcccggtgccgcacgcgcggccgcggcgtggggtggtgggggccgaggaagcggtgagagggtacgactacgagacgcgctacttccggcagcggctggaccacttcagcttcctggaggaggagggggaggagggggatgggttcttccagcagcggtacctggtcggccgcggcggcgggtgggccggcgccggcgggcccatcttcttctactgcggcaacgagggggacatcgcctggttcgccgccaactcgggcctcgtgtgggaggccgccacgcgcttcgccgctctcgtcgtcttcgccgaggcaaatttatcctctcaccttgcaccagtcagtgtgttcttccttgggtgtgcgctgatcgtgcgagatccgatcccgtttacttgttctctgcagcatcggtactacggggagtcgatgccattcggcagcaaggataaagcttacaacaattccaagtccttggcgtatctcacagccgagcaagcgcttgctgattatgctgtactgctcactgacctcaagaagaacttgtcatcagaaggcagccctgtcgtgctcttcgggggctcatacggtggaatgctcgctgcttggatgagacttaaatacccacatattgctgttggggctctcgcgtcatcagctccaatccttcaatttgaagacgttgtcccttctaccatattctacgatctcgtgtcaaatgatttcaagagggaaagtttaagctgctttcaaacaataaaggactcttggaaagcactggatgctcaaggaaatgggcaagatggtctgctgaaactaagcaaaactttccatctatgcaagactataaaaaacactggggaactttcagattggttgagctcagcgtacagttacctggccatggtggattacccaatgccagcagattttatgatgcctttgcctggcaatccaataaaggaattgtgtacaaaaattgacaatcaacctgatggaaccagtattctggagcgcatatatgcaggagtaaatgtatactacaactacactggtactgttgactgctttgatctaaatgatgatccgcatggaatggatggatgggactggcaggcttgtaccgagatggttatgccaatgtcatacagtgaagatagtatgtttccagcagataaattcaactacacttcatatgagaaggattgcatcaacagctttggtgttgaaccaaggcctcaatggattactacagagtttggtgggcataatattagtctagttctggagagatttggtagtaatatcatattcttcaatgggcttctggatccttggagtggcggaggtgtcctgaagaatatatctgagagtgttgtggccatcatcgctccattaggagctcatcacatcgatctgcgccccgcgagcaaggacgacccggattggcttgttaggctgagagaatcagaactgggcatcatatcgggctggctctcggactactacggtgcaagaagaggggcgctcctccagcgcgccgctcccatcccatggactcttctgcaccattcgtgacgatgatcggccgtgcgctgcaactcccaaccagacgctgattttcgcagctgcatttcccgtgtctaaccaataatgtacccagtgctggtgcctcgctcgctggacggctggagttctccaagctggccatgatgtcgcagtagtagtagtactagtacaccgttggtaaggtaggagcagaagctttcaccagttgttcatggactgttgctgccaacagactgggaagctaaaaaattcattagtggt

SEQ ID NO: 71852 - DNA, 1437 bp, Oryza sativa
  Clone ID: PAT_MRT4530_72286C.1
atggtgcgtcacaggagcagcgggagcgacggcgaggacgacgaggagggccgcctctcctgttgccggcgtccaccaccgcccctctctcttcctctctctcccgtcggcgtcctccccggcatcctccgcctcgcgtcgtggtcagtcgggagcgccagatccggcgccgtagtgggtggatctaggccccccgtggcgccggcggtggcgggcaaggcaccggcggaggaggccgggcaaggcgcgcgaggcggcgagcacaggcgcctcaagccatctccgcccgtcgctagctggccgacggtggcggtcccggcggtggtaggcgcggcgccagcggtgtcgggcgcggcgcgacgagaccaaggggagagcgagagagacaagggtgcggcggcgctgctccagctgaagcgatcgttctcggcgaccaccgcgtccgccaccgcgttccggtcatggcgcgccggcaccgactgctgccgctgggcgggcgtccgctgcgacggcggccgcgtcactttcctcgatctaggcggccgacgcctgcagagcggcggccttgacgccgccgtcttcagcctcacgtcgctgaggtatctcaacctcggcggcaacgacttcaacgcgtcacagctcccggccaccggattcgagaggctcactgagctcacccatctcaacatctccccacccagcttcgcaggccagataccagcaggtattggaagcctcaccaacttggtttctcttgatctgtcatctagcatctacatcgtcaatcaaggagatgacgatgtcagtatcatgtcaaatttgttacccccctggggcttctcgagggtaaacttcgagaagttgattgcaaatcttggtaatctgagggagctctatcttggattggtgtacatgtccaacggaggcgaagggtggtgcaatgctctggctaattccactcctaagattcaggttctgagcctaccattatgccagatctctggtcccatttgccaatctctgtttagtttgcgatccctttctgttgttgacttgcaaggaaatgacctgtctggtgccatacctgaattcttcgctgatttgtcatcccttagtgttcttcagctttcaagaaataagtttgagggtttgtttccacaaaggatcttccagaacagaaaactgacagctattgatattagctacaactatgaagtttatggtgatttgcccaattttccacctaatagcagtttgatcaaattgcatgtcagtggcaccaagttctcaggttacataccaagctctatttctaatctcacggatctgaaggagctgagtctgagtgcaaataatttccctacagaactgccgtcttctctaggaatgcttaaatccttgaacttatttgaggtttcggggctcggcctactataa

SEQ ID NO: 71853 - DNA, 603 bp, Oryza sativa
  Clone ID: PAT_MRT4530_72287C.1
gtcgactctagaggatcccctggtgggcccacctgccatgtcacagaggcgcgccttacccgtgtctccggagagtggagtggagaagaagaactgaagaagccgttcgttctggagcgcgccgccatccgctcgaacctttcccctctttgccttgcgcaccaaattgagcaggagaagagccgcggccggtgtggatttttgtgttggtcggtcgcgaggatcgatggcggcgggggaaggagacgtggggatggaggtggagacgaaggcgccagcgatgccgccgccgccgccggcgtcgtcgaggagtttgttctctgttgcaaatttgcaaggcagacagaaccatcaaaggttttagctgggcaaagcagagtcgacgttgacgcggccaggaagaagaagcaagctcgcgcgaagaacggcgacacgcctgagcctgacgccgccggcggtgcccgtgcccgggcgtctcggcgagcgaaacggggaccgggcagctaccgcggcgtgcggcagcgccggtggggcaagtgggtctcggagatccgcgagcccaaccgcgggaagcggcactggctgggcaccttcggcagcgcc

SEQ ID NO: 71854 - DNA, 271 bp, Oryza sativa
  Clone ID: PAT_MRT4530_72288C.1
cactaaacagaagaacaattgggggcagatttaatcatcatacatgcttccaaataaaaagaaacacatattattttattaaccaaatcacacacatgaacaggcagctactagccgcatacataaagctagtaaaccaattaccggtagccagtatcatacaccgcctacgccattggggatgtccaccttgcagaacgccgggaggctcgccgccgcgcgctcgatgtacccatctcggaaggcgccgaacacctcgggcattgggtgc

SEQ ID NO: 71855 - DNA, 224 bp, Oryza sativa
  Clone ID: PAT_MRT4530_72289C.1
gccagccgtgccgtgtagcaatgaccaacatgatgaccatcctgaagatgatcctgacaaggctcctcatcagagcaccacttggaggtcgacacggcgatgacgacgctgaccacgcctcttgcctcgccggctgtgacggagacgaacctgttcatctacctttacccttacattcatcgtcacatgacccgtcacgagacccccaactacgtgcccaacta

SEQ ID NO: 71856 - DNA, 406 bp, Oryza sativa
  Clone ID: PAT_MRT4530_7228C.1
ctgagtactagctttccaatatgttatttgatatataattgtctagctagcttactcgggagatgcaatggtgtgggtataatgttcatgtatatgattgctctgtgtcatgacgatgatattagagtagtatttggtagcataagcgaggtgcttaggccgctggatatcattatttgggattatatgctacgggacagcagaggtgggccgctgatggtgacagctcagtacggttattcctccacattagcatatagtcctaagtacaatttcctggggagggtactcctccgtatttagccccggttggatggccatgacgggttgtcgtaaggaactcggcaaccagggatggtatctcgaaacactaggagggcatcgtaggaaagggaaaggaaaaaga

SEQ ID NO: 71857 - DNA, 198 bp, Oryza sativa
  Clone ID: PAT_MRT4530_72290C.1
atgaatgtttgcctcatgcaacgcatgagaaattcagagaaggaaccagagaaacaaaggcattcatgtggtggagagaaaaagaggtcaaaggggttcggaggatggaaactccgaaccccctttgaacctgatgatgtcacgaccccggccacgctgtccaaatttgggcctagccgcatcacgacgtttcagtga

SEQ ID NO: 71858 - DNA, 372 bp, Oryza sativa
  Clone ID: PAT_MRT4530_72291C.1
ttactcaatttttttttaccaccgccccccacacaatcaagcgaggggggctataaagaacatgtgaccccatggttcttaaaaggtcaagaacctgacaacgggccctttgcccccattttttacataggcatcccccccctgtacaagcatttcacaaatccactgcttaactcagaggatgcgataacctctcaggactaaaaagatacccggggtttttcccttggaagctccgatgcaccctctcctgatccaaacactgaccgctcctgcaaactagtcccaatttttcctttcggaaaccttggcggctattcataactcaccctgtaagtatctcagggcgccgagcggcgattagccctggcc

SEQ ID NO: 71859 - DNA, 204 bp, Oryza sativa
  Clone ID: PAT_MRT4530_72292C.1
atggctggtccatcgacttcggtatccgccgccccaatctcttcctccactgggtcctccccgcgcgccgatttgttttgccactaccggccagctctcgggttcatcgtcctggctacggcgaggaaggtgttgtgcgtcttccccaggagagaggtccgccgtggctcccacccgccgccgttcccctcgttctcccactag

SEQ ID NO: 71860 - DNA, 735 bp, Oryza sativa
  Clone ID: PAT_MRT4530_72293C.1
ttatcttgtagccgtcgtcagatctgggcgggggatggccttcatcgccccagaccgccttctgcgcgtggccgccgtcgcacgccagctgtcacgcgccggccaatgcgagcacgccggacaccgccgtccgccgagccgctcgctgccacgcccgagcccgtcgagccactcgggctgcagaggacgagggggagccgagcgctgctcctctctttctcggcggcgaaccatctcaacgacggcgacggcgcgccgactcgcggcagcagaggagggggagccaagcgtcgccgcggttgaggacgagcgtcgtgcgaggtttgtaccgacggtggtcggcgtcctcgccgagcgcctgcctccctcgccaaggaagccatggaaggaggggggagagccgagtgccgacgcgagtccgaccttcgcctcgctgcgctgaggcacaaccacggcctccaatcggccgacgcggcgtccctccctccctggccatccaccgacgacgctgacgactccgcggatctggccgagccgtcccccgcctccgccgactccatcacggtgggtgttgagctcgccatgctcttccttggcgaatcccgtggttgcagctgagcgcagcgaagcggaggtcggagtcctggcggcgctcggctccccctcctccacagctgcgagccagtgcgccgctgttgccgcatcaagttttacactgcattggcatgttggcat

SEQ ID NO: 71861 - DNA, 1380 bp, Oryza sativa
  Clone ID: PAT_MRT4530_72294C.1
cggacgcgtgggcgctgcgcgagagcgactgcgccggcgccggcgccggcgccgcctccaagtcgatctccctcggcctcgactaccgtctcctcgcgagttcacccgccacctgcgccggtctccacctatcctgctgtttccggatttaatattaaggaaagggcgatcatgagcctccatcgatttgtgaatctactaatggagaacggtgagaagggtgtctactcactgcgtcgtctcaacctgtctcgacacccattgttctactcatcaacagaggtgtcagctgtccaagatctgccagcgctaggagaagaaggatatgtatattacccgttcaagggttatggcgagagtagcaaacaggcttttgaggtggagagcattcggcttccatcaccaactgtcagcttgctaccgactccatcctcaactgataaaatgtgcaagtttgattgtttctctgtctcggagagcaagatcatatgcacagaccaggctgcacgcaccttcctctatgaccttgatgagcattgcgtcacaagcatgcccagcctccatgctccgaagtattcccccttctcagtctcggttgcaatccaaggcgaaaaaggagaaggggaaagcagcagcagcagcagccgccgcctctatgtcatggaggaagtcctcttgccagagaggggcacggggagtagctaccagttcgaggcctttgactatcgcaagccaggaccagaatatttggttaaggcttggcactgtgatccactgccgccaccgccttttgtccgtgaccctcgctacgttccctctccagtgagttcctatgcagtggtgggaaatttcatctgcatatccactaaggggattgggacgtactgctttgacacggtgagctgcagctggagtcatgccggtgactggatgctgccattctgcggcaagggtgagtatgtccctgagctcaagctttggtttggtgtgtccgccaagaacaactatgccccatgtgcttccgatctctcacctgttgtcagagctgagccaccaaaacctggctgcatttgggaggatctcaaccttcctgaggattggcgtccgtgcaggatgtctgacctcgtcaatcttggctcaggaaggttttgcatcattaggttcttccaaccatcgggtaacagggactacatgaaagaccaaattgatcagaccattgctgtctttagtggtgtggaagtgctgcctgatgacaacaaggctgcgggcaatggcaaagggaaaggcaaacagaatgccaaggggctccgtatgatcaaacacaagtccagaaaatgcacattcatcgaacaaatcaacaacgtcgagtcggtgctctaa

SEQ ID NO: 71862 - DNA, 282 bp, Oryza sativa
  Clone ID: PAT_MRT4530_72295C.1
atgccgggaagtcatccatttgatggtttggaagacattgatatgctccccatgtggaacccatttgtgtcgccatatctttatgttatggccattgccgaccctccatatgctgacaagcttggtcatagtgaccttcatcttatcattaatatcacccaagtctgccacattgcttcattaaaatcacctatcatcaaccacgggtctcctgaatttgatctgattctccttaacaagctccacattagatgccggtcctgggctcttggctccccatag

SEQ ID NO: 71863 - DNA, 2007 bp, Oryza sativa
  Clone ID: PAT_MRT4530_72296C.1
gtgagtataaagtagagaagtgagcttactcaaatcagcaagcaacatcagtatagcagctatggttacccagctcacctacctagctgcatcagcaggagtgtgcttggcttcagctctagccatcgccttgctgtccatcgccctctacatcatcggcgtcgtcgcctccttcgccgtcctctgcgccaaggagttcgccgagagagcccacgaccggccgccgctcgtcggaacagttttccggcagctcaagaacttcgacagaatgttcgatgaacatgtcaactatgcaaccgcgcatcgcaccagcaggattgtgtatcccggtcactgcgaggtctttacttctgatccggccgtcgttgagcatgtcctcaagaacagcttcagtaaatacagcaagggggacttcctcactacagccatgaaggatctctttggagatggaatttttgcaacagatggggatatgtggcgtcatcagaggaagctagcgagctacgaattctcaaccaaagtgttacgtgacttcagcagtgacacattcagaaggaatgctgcaaaactggcagagaagatctcatgtgcagcagctaacagaattagcataaatattcaggatcttttgatgagagcaactatggactcaatctttaaagtggggtttggttttgagctcaacacactatctggatcagatgaatctggcattcaattcagcaaggcctttgatgaggcaaactcccttgtttactaccgatttgttgacataatgtggaaactgaaaaggtatcttaacattggatcagaagccaaactcaagaggaacattcagatcatcgacagctttgtgatgaaactgatccatcagaagagagagcaaatgaagattgcagctgactataaaaccaaagaggacatcctatcaagatttgtactagcaagtgagcaagatcctggaacaatggatgaccgctacttgcgtgacatagtcctcaacttcctgatagctgggaaagacaccacaggaaatacccttacctggttcttctacctgctatgcaagaaccccatagtgcaggataaggttgcccttgaaatcagagagtttgttgaatggagcaaggaagataacactattgaaagcttcaccaaacgactggacgaaggtgcaattagcaaaatgcactacctccaggctacaatttccgagacactccggctatatcctgctgtcccagtggatgctaagatggcagacgaggatgatgtactaccaaatggctatagagtggtaaaaggagatggaattaactacatgatttatgccatggggaggatgacatacctttggggtgaggatgcacaggagttcaggcctgaaagatggcttgtgaatggagtttatcagcaagagagcccgttcaagtttgtgtctttcaatgctgggccacgtatctgcttggggaaagaatttgcacacaggcagatgaagatcatggctgctaccctgatacatttcttcaagttcagactggaagatgaatccaaggagccaatctataaaacaatgttcactctccatatcgacaatggtctccatctgcttgcaaaccctcgagaaatttcaccatgaaccccaaacaagctactgcatccttttgttattttattggaacatatgcatttctaacatccgtcctattaggcaagtaataataatctgtcccaagtagtcgtatgaaaacaacaaagtagcaatgggacaatttgcccggtaaaagtaaggtgcttgtacaatttaatatgcttgtaatagggtgcttaaagaaagaggatgcagctatatcatcaactacgtatttaagcttcatttctttggatgcaaaaaaaaaaatgtatgtgcctggaaagctatagcttatattgtccataactaaagatagtctttgtgcataacaaacttttaagtaaaaatccagagccaggtaagcgtcctgccat

SEQ ID NO: 71864 - DNA, 5404 bp, Oryza sativa
  Clone ID: PAT_MRT4530_72297C.1
atggggaaaaatactcaattttggatacatcgtccgaaaatagttttccttgcggaaactagacaagaccaatatatggtgcaaaaccgtattgggttgcgaagatgtttcacagtaaatggagtagggaaaggaggtgggctcgcattattctgggatgaaagtatgaatgtggttctcaaatcttacaattctcgacacatagatgttctgatcacggagctggattgctgcacatggcgagcaacatttgtctatggggagccaagagcccaggaccggcatctaatgtggagcttgttaaggagaatcagatcaaattcaggagacccgtggttgatgataggtgattttaatgaagcaatgtggcagactgagcataaatctcacaggaaaagatctgaatcacagatgagagactttagagaggtcttatcggaatgcgatcttcatgatataggtttccagggtgccccatggacattttgtaatatgcaaagggagggccgcaatgttaaagtgaggcttgatcgaggagtagcttctcctgcctggagctcgcgctttccgcaggctgtcattacacatttaactactccaagttcagatcatgcacctttgcttctcgaaagagaggaaacaacattggcaagaccaatgaagattatgagatatgaagaagtatgggagagagagtcatcactacctgaggtaatccaggaagcgtggacgatgggtgctgatgcatctaccttgggtgatattaatgataagatgaaggtcactatgaccaagcttgtcagctggagcaaagacaagatagggaatgtacggaagaaaatcaaggatttacgggagaagctaggagaattgagaaacataggactgctggacactgataacgaggtccatagtgtgaagaaggagttagaagagatgttacacagggaggaaatatggtggaaacagcgctcacggatcacgtggctgaaagaaggtgatctaaatacacggtactttcacctaaaagcttcctggagagctaagaaaaacaagatcaaaaagctgaagaagaatgatggatcgacgacaatgaacaagaaggagatgaaggaaataaatcgaagtttttttcagcagctatacaccaaggatgataacttgaacccggtaaacttgctcaatatgttccatgagaagataagtgagcaaatgaacgcggatctgattaagccctttacaaatgaagaaataagtgatgctttgttccaaataggtccgctaaaagccccaggaccggatggatttccggccagattcctccaaagaaactggggtctgctaaagggcgaagtgatagcagctgtgaggaattttttcgaggatgaagtaatgcaagaaggtgtaaatgatacagtgatagttatgattccaaagaagaacttggcggaggatatgaaggatttcagaccgatcagcttatgcaatgtggtttataaggtggtggccaaatgcctagttaacagaatgagacctatgttacaagagataatatcggaagctcagagtgcttttattccagggcgactcattactgataatgctctaatagcttttgaatgctttcattctattaagaattgtaaacgggagaaccaaaacttttgtgccctaaagttagacctttcaaaggcatatgaccgagttgattgggaattcctgaatggtgtgatggagagactgggcttttgtgacaaatggaggagatggatcatggaaggtccactggatagcatgggaaaagatcttatatcccaaatctcatggggtcttggttttagggatatgaagtgcttcaatcaagcactgctagctagacaagcttggaggctgctcacctccccggacagcttgtgtgcgagagtgttcaaggcgaaatattaccccaatggaaatcttgtggacactgccttcccaacagtgtcatcgtcagtttggaaaggaatccaacatggtctggacctgctcaaacaaggtaccatatggagggtcggcaatggccataacataaagatatggcgacacaaatgggttccacatggggagcatatcaatgtcctggaaaagaagggaagaaatagacttatctatgtcaatgagctcattaatgaagagaacagatgttggaacgagacactagtccgacatgttctcaaagaggaggatgcgaatgaggttctgaaaatcagacttccaaaccatcaaatggatgacttcccggcatggcaccatgagaagtcaggtctatttactgtgaagagtgcttacaagttggcttggaacctatcagggaaaggtgtagttcaatcctcttctagcactgctacatcaggtgaaaggaagatttggagcagagtatggaatgcaaaggtgcaggccaaagtaaaaatctttatctggaagctggcccaagacaaattgccaacttgggagaataaaagaagaaggaaaattgaaatgaatgggacctgcccagtctgtggaacgaagggagaaaatagttaccatgcaactgttgaatgcactaaagctagagcgttaagagaagccctgcgagcagtttggcacttgcctggggaagacaaatttttatggacaggaccggattggttgttgattctgttagatggtgtaaacgaagagcaaagaactcacattatgtacatgctatggcgagcttggtatctgcgaaatgacctgatccatggtgatgggagatgctcgatagcaggctcagtgagttttctcactagttatgaggaggtactgctcccaaaccgacaaatgcctgatgacataaaaggaaagaagccaatgtacagtgaaggtcagaaggagaagcacatggcagaaaagcagagcagcggatggatagcgccacctgatggagcggcgaaaattaatgttgatgccgggttcaggatggaaactggggaagcgagtgcaggaatagtaatacgagattgcagaggtctcatcctgctagcggcatgcaaaacactgcatccgtgtagctctgcagaacaggcagaggcattggcaagccttgaaggtatccggtgtgcgttgcaatggatacatatgcctgttatcttggaaacagacaatgcagaggtggtagcaagactgaaaacgaagcattcatcaagatcagtgtgggaaggagtaattatggaggcgaaagcagcgatgcaaggattgcaagcagtggaagtggcccatataaagagggactcaaacaaagtagcccatactctagctcagatggctcttagctcaggaaactgtctggaatggagactctgtgccccagcagaaattcttgagctattgaaccaagaatatattgatgggctgctcattctagttgggtccgaccggcgttgcagcttacgtgttggcccatatttggttatgttcgggcctattttacctgggccatgtggttttgcggctttaagacccagcccataccagcccagcccattacctcgcggctcgcgctatcccgtctcctctcctggttccctctttctcccgctccgtccgcctccgttcgtgtctcatagcggcggcaggctctccgcgacacgcttctctaccaccgggttcgacctccccgactggttcaggaaccccaaggacgatggctcatgcgccggcttggatgacgaggaggacgacatttttgtgctcccgactgaacccaacgtctcggatgagcgaagaagccagagcagcacctccaggtcgctgtcgatccgccctggctttcctgcaactgcctcccatgaggatgctgagttcgaggccgacatcgatgaggtcagcaggatccttagtgctcgtttcgcgtctcctgaggccattatgatagccatggactgctgctctgtaagggtcactggctgccttgttgacaagatcctgacgaggttcagcaatgattgggtggcggcattcgggttcttcatgtgggttggcactcagggagggtactgccattgtgccgattcatatgacttgatggtagatatactggggaagttcaagcagtttgatctgatgtggggtttgatcaatcagatggttgaggttggaggcttgatgtcgctcatgacgatgacaaaggtgatgagaaggcttgctggggcaagtcgatggaccgaggccatcgacgccttccataagatggatcggtttggagttgtgaaggatacaaaggccatgaatgtgctcctggacacactgtgcaaggagaggagcgtgaagcgcgcaagaggcgtcttccaagagctgaggggaacaatacctccagacgagaacagcttcaatactctcgtgcatggttggtgtaaggcaaggatgctgaaggaagctctagacacaatggaggagatgaagcagcatggattcagtccttcagtggtgacttataccagcctggtagaagcatactgcatggagaaagattttcagactgtttacgctctcttggacgagatgcgcaagaggcggtgtcccccaaatgttgttacatataccattttgatgcatgcactggggaaggctgggagaacgcgagaagctttggatacctttgacaagttgaaggaagatggtgttgctccagatgcttccttctacaactccctgatctacatacttggcagagctgggaggttggaagatgcatactctgtggttgaagaaatgcgcacaactggaatcgcccctaacgtcactaccttcaacaccttgatttctgctgcttgtgaccactctcaggcagagaatgccctgaagcttctggttaagatggaggagcagtcatgcaatccagacataaagacatacacgccattgctgaagctgtgctgtaaaagacagtgggtaaagatacttctgttcctagtgtgccatatgtttagaaaggacattagccctgatttcagcacttacaccttgttggtaagctggctgtgcagaaatgggaaggttgcccagtcttgcctgttcttggaggaaatggtgtcaaagggttttgctccaaagcaggagacatttgatcttgtgatggagaagcttgagaagaggaatctgcagtcagtgtacaaaaagattcaagttctcaggacgcagtcaaacttctttaaacttgactaatcctttcaatgagaggtcactgatggtggacaacattgtgctgtgttgtacaacacctgtggtcatgaatcttaatatactgctcattggaatgtttatgcaaacttaatatgtactgctcattggaatgtttatgcaaatgcgactgtgattcagtaaaaaaaaaaaaaaaaaaaaa

SEQ ID NO: 71865 - DNA, 694 bp, Oryza sativa
  Clone ID: PAT_MRT4530_72298C.1
tttttttggctcaagaggtttgtattgcatggtatattgggtcaagctatccatagtgttgtacattctgtgatcaatataatgaactcctgaagtgtgaaagaatggattgtagcccatggaagcaaagaacatgactttacaaaaggggaggaaacaatgaaggcaaaaaaaaaaaaaaactgtggggggttaatactgcatcaaaccaaggggggggggggcaccttgagcgtctagagcgagcgccaggaagcaatgcttgaatcagacagaaagaggagtcccccaaaggctatggcaaatctgagttggccaacccccccatggctgtcggaccttctctggatgcaaaatcctgcaggcggtgcatcaagtacatcaagaataagtgcacaaacaccagatagaatagaaggctgactcgagcaacggggtgacgccacaaaaatctagttgcacgtacagctcctgaatctagtaacttcgcagccttttgtaactgctgatttgctgttgccatgtgtcgatgatgtagaggaagaggctccagtgccttgatatcagcatcttcttcccatgctgatgctgatctgcgagcaactctactcctttctgcttccatctgcacttcatgaaactgctttattgatttctccagttgaaactccagtgcagccttttcacttgccat

SEQ ID NO: 71866 - DNA, 738 bp, Oryza sativa
  Clone ID: PAT_MRT4530_72299C.1
atggcgttgtctcattgtcaacggcaagaccttctccttcctcctctcttactacttatgagcgtatttgtatatataccacttgcgggtgctgcggaatggagcagaaatgtgccttctctgattgattttaagcaccagcagttttctcctactggatcagtgttcggatcaaacttgaagtggatgacgtcgcaaggaggagttcctacattcgggaactggtcagccgcaggcgacaccccgtacacgcagaagtttgagaacctgagaaggagcaagaaaactgctaccggtgtttactccaacccaaatgaagtgatcactgaaacacctgatcagcctcctcctcctctcaggtcaccactgcatccatcctctcatgatgccctgaaccaaaggcagaggtacaggtcagctgggatgcagactccagataggaaggcctcttcatctgatggccgtgtcccagtgactccaggaaggagcaggttgaagcaaggaggcagaggctttgaacctgctttagatgaagtgactgtacctccatttggtgattgggatgatgctaatgcggcatctggggagaagtacaccggcatttttaacagggttaggcgtgataagctgaccccaaactcttctgtcaagcagcaaccaccatcttctccttctggtggcagaagacaggaacataaagtgcaacagatttatgtgtacagatatatagcgaagtaa

SEQ ID NO: 71867 - DNA, 219 bp, Oryza sativa
  Clone ID: PAT_MRT4530_7229C.1
ccgaattcccgtcgccaccgccgtcatgctcgaggttgtatcgaagcattgctgatgagaaacactactgttggaattgattctagtaacagagtcatgacacattgcagactttgagcttatgctgagagcagctgtgtctattcagtgcttgtgacagttagacctagctatagtactgcatgctgatattctctgaactcgctaggttcatttatt

SEQ ID NO: 71868 - DNA, 633 bp, Oryza sativa
  Clone ID: PAT_MRT4530_722C.1
atgagagttgacgagttggctagtgaggcccgtcttgatggtagcgagtggtgccggaggcagcgagaagaaggatgcgtggaggtggccgatgatgccatgggtgggctgaggctgactgacgaggggcatccggcggggaacgaagggaggctagcacgacgcaggtggcgtcagtggttcaggaaggctgatgctggttgctccaggagttggccggcagcagttggcaacggcggtctcggccggatctggacgccggcagcagttggcgatgacagccgtggtgtggtgatggcggcagcggcgacagttggcaacggcggcggcggtcctggctgtggtggctgccgtgtcaactggcggcggtggcgaaagacatggcgtcgggcagctagctgctcggtggtgaaggacgacggcgcagcggcagtttgcggaggcagcggcgacggcggcagcggcgacggcggctgcgactctgaggtggtggctacgtcggcggcagggaaggagtcgggtgcgagtctgtatgcagtgaagtttatggaattatggaggctaagagttagaggtttgaatgggttatcaaatggggacgagtcgggaagttcatctgaggggtattcctag

SEQ ID NO: 71869 - DNA, 1548 bp, Oryza sativa
  Clone ID: PAT_MRT4530_72300C.1
atgaaagcaaccggtggccccctgccactaatcttgttccttctgataatcatagtcttaataacagcacaacacaccgctattgcgaaaccttttttttctttgaatgcatttgctcaaggccaacccaacgacaaggatgaccaaaatatgggaaagttttacgtgtacaacaaagcccagaccaacaactatgctgaccaaaggatgaggaagttttacttgtacaacaaagaccaggccaatgattgggatgaccaaaagatggaaaagttttacttgtaccatgaaggcaagaccaacgatagagatgaccaaaagaggaaaaacatttacttgtataacgaaggccatgccaatggagatgatcaaacgatggaaaagttttacttgtttaacaaagaccaggctaaagacggggatgaccaaaagatgggaaaattttacttgtacaataaagaccaggccaatgattgggatgaccaaaagatggagaggttttacttgtataacaaaggccatgccaatgaaggagatgatcaaacaatggaaaagttttacttgtataacaaaggccatgccaatgaagaggatgatcaaacaatggaaaagttttacttgtataacaaaggccaagctaaagacggggatgaccaaaagatggaaaaaaattacttatacaataaagaccaagccaatgattgggatgaccaaaagatagagaagttttacttgtatcatgaaggcaaggccaattatagggatgaccaaaatatggaaaaattttatttatacaagaaaggagaggagcataagtatattcacagccacggacatggtcatgttcattttccggaaggagcaaaagatttgtacttcttcgaggacaatctagcacctggatcagttctcatcactcgtattctgtccgcgagacaaagctccatttttctacaccggaacaattcaaagcacatcccattctccatgaagaacatcactgacatcctcaccatgttttcgcctgtgtcagccaccatggccgatggcattgcagcgacattgcaggcctgtgagcacacaggaatggtccatggcgagaaggctaaatgcgctacgtcgatcgagtcattgcttgatgtcgttgtgtcctcgctaggcacaaagcttgtccgggccttgacccctggagctccaatggaaggtgtgccgtcgctaaggtacatcgtggcctctgctacaccggtgcccaactcccagagtatgctagcttgccatgacatgctatacccctacaaggtgttcttctgtcacacgcccaagcaaaccaggttatatcaggtgtcactggtcagcggtgaatctggtcgaccgctcattgatggattattggctgtgtgccaccaaaacacgtcggactgggacactggccacccattcttccattttatggatgtgaagccaggagagaccactgcctgccacttcttcggtagaggaagcattatatgggtgccagtgccatccgtgaaagaagcaacccagtaa

SEQ ID NO: 71870 - DNA, 519 bp, Oryza sativa
  Clone ID: PAT_MRT4530_72301C.1
atgattccgttagaacatgatattttaagtgacttcttcctggtacctgatagcctagtatcaagctgttacctaggcatctcggcttcgcttgaggcggagagacaccaccgccgaccgcagcggctgctgcttgcatggggcaagaccacggcggcgcagcacgtggtggtgtggcacctagaccacaccttcgagaagctcgcgtcggcgcacctcccgctcgtggcggcggcaccgctggtggacgcgctgcgtgcgtcgcccgccaagccactcgcgctcttcgacctcgcccgccgcctcccgctccggctccatcggcgaggcgcgctctacttcctccacctctcccctcgcatgttcggcctccgcgccccgctcccgctctccctctcgctcaccgcgcccgccaccgagctcctcgccgttgccgcttcccccacagcggcggccgttggctccggcaatcggtggggcgacggcgacggggagggctgcacctcgggagccatctga

SEQ ID NO: 71871 - DNA, 318 bp, Oryza sativa
  Clone ID: PAT_MRT4530_72302C.1
ctagtggatccccgggctgcaggcgtggcctcctctctccagatccacatcctctcctcctcccaagctgttcggtggcacggccgcgacgaagggaggcggacgtcgggtggcgcgacgatggcgactgcgacgggatggcgacgggggccgcggcgaagggaggcggtcgtcgtggggcgcgacgatcgcgactgcgacggggggcgccgccgcctagtcccagctactctccctccctatgtatctctctctgtgagggtttctgtctctctctgtccattcggccgatctcacagggcggctggggagggggtg

SEQ ID NO: 71872 - DNA, 472 bp, Oryza sativa
  Clone ID: PAT_MRT4530_72303C.1
ccggccgggaacgggaacgtatatacgaaagtacgaattaattaatggctgcttccggggctcgcgctgttgtgtcgttcgccatccagctcctcctgctgacgttcgccatcatcggcggctgcctcctcgtcaggccagcagctgctgcaactgcatcaggtggaactccagtgtcgattcgtggtggtggttctgtcacgacccctccttcgcccgtagtcagtggacctcctcacggcgctgaggttattgggcgtggccattgacctatcaacatggcggatgcacatcaagcaacatgagggaacccctggatagtaccaaatttttaagcaagttaattaatcacttgcaaagatagtctttaatttctagttacctataaatatggggatccttccaccattctatacgaataaagtgtgagaacaacttttataaaaaaaaaaaaaaaaaacccgcggccgtg

SEQ ID NO: 71873 - DNA, 1113 bp, Oryza sativa
  Clone ID: PAT_MRT4530_72304C.1
atggcgtcgctgccggacttgatcgacgacctcaccaccgagatcctcctccgcatcccgccggacgagcccgcatccctcgtccgcgcctccctcgtctgcaagccctggtgccgcatcatcaccgacccggccttcctccgccgctaccgcgcatttcatcgaacacctcccatgctgggattcctccacaacgttgacggcgacaaggcgatctcctccgtcccccgcttcgtcccaaccaccaccgccgcctcctcgccgttctccccaccggccatcggttctccccactggtggtgggcgctcgactgccgccacggccgcgtcctcatcaacctcttcaatcccatggagctcatggtctgggaccccatcaccggcgaccaccatcgatttcccgtgccgccgcacccgcacgcctactgcaccggggccgtgctatgcgctgcgcgcgactgccgccatctcgactgccaccaaggccccttcctcgtcgtcttcgtgggcagtggagagcacgggtaccattactcatgggcgtgcttgtactcgtcagagactggagagtggagctccaaggtctcaatcgtgttcgattcctatgtcgagatgttgcccagcctccttgtcgaagatatgctcttcttcatctgtgagaatggcattagaattctggggtatgacattggcaggcatgagctttgggagattgagccgccattgtgggatgattaccaagggggaaccctgatgacagcggaggatggtggactgggatttgctactatggaaacccgcggcctcgtgctgtggtcgtggtatgtggatgatgatgatgggattgcagattgggaacaactcagggtaatcaagttggaaatgctgatcccggtggataacccctcagtctcacttgatctggttggtttcatagaaggcacacaaaccattttcgtgtcatcggatgtcggcgtgttcgcaattgggctcaaatcaggccaagtgaagaagatcttgctagggggaggtcgtcgcacccagctggagtacagactgtacagtgacccatccagacccttccgttatgcttctgataggcaatcgaagtaa

SEQ ID NO: 71874 - DNA, 324 bp, Oryza sativa
  Clone ID: PAT_MRT4530_72305C.1
atggaggcggtggaggtgcacctggtggaagaggagctagctcggggtggcgaggagctccgggtgacggaaggagctcgtggtggaggcaggggccgcctcgagctcgactcccttcatagctgcttctttcccatgtcgctggcttcgctgccttcgttggagcatgctgcccgcattgccgcctacactggagcatgccaccaccttcgccgacgcgtgccatgctgctcacccctgtactttccctacgccgcgagtgaagttggagggctcatggaggaggtggcggcgaagctttccgctgggtgtgagacgggctag

SEQ ID NO: 71875 - DNA, 500 bp, Oryza sativa
  Clone ID: PAT_MRT4530_72306C.1
ccggccggaatctatagttcgagcttgctcacgtaggtgtactctttgatagtctccttttccgtcgtctctgagcatagtgctcgttaattagtgatttcttgactgtaccatattgatgagtcgatttgtcgctcacacggtgcttaggatggcgcctcgatcgaatcggattttgtgtcgaatgctgcagtcgagtagactgtagccatctactattatctagcttcaaggcacgtgtaaggctcaacctgccttgtcctcgattattgcactcgcctgctgcttcgtataaatgattatcagagtagtgctaacgtgacatcgggttgacacccccgaaattgcctctggatctgcattattacaatcactcgaggatctctatcattcccatatgcatagcattgcctgttaatgatttcctgatgcaattatctcccgtgttgaataaataatggcattgctcgctaccatctggctccgagtattgtccacat

SEQ ID NO: 71876 - DNA, 327 bp, Oryza sativa
  Clone ID: PAT_MRT4530_72307C.1
tgcgaagctggagcacaagaaccttgtcagcctcttcggtgcgtgcttggagcaacaggagcggttgctcggatactagtttgttctagaccggagcctcaacctgattcttttagatactgcaaaaagagagcaggtggactgggagaagaggtacacgatcataaacgggatcacttgagggctgcactacctgcactaagagtgtgagataaagggatagcaccgagatctaaaggcgagcaacatgtcgctagacgtgaatgtgaaccccgagattatagactttgggctggcgagaataatgggatgagatcatacccatgc

SEQ ID NO: 71877 - DNA, 1002 bp, Oryza sativa
  Clone ID: PAT_MRT4530_72308C.1
atggctcgcctaccgcgtttgctcctctccttcctcctcctcatcggcgtccatgcctccgtttcccatggctcgccgcctcttccatccacttacgacccttccatttgctccaagtcatcagagtgcggaggcgtcaatatctcctatcctttctatctttccaacgccaccgattattacactcgattttcttgcggctacaccgatttgaagatctcttgcagccgggaccgggacgggaggaacgagactcccaccatcctactcggtggagacaactacaccgtcctggacatcatctacgacagtcacaccatcgtgctcgcggacaccgatgcgctccgcggcggcagctgccccagagtgcgccacaacgtcaccttcgcccaggccgatgagtggcttcagtacaccggcccccgtgacaacctcaccttcttcttcggctgcaaactcaaccttccaccaccaatcgatccagggctggttagtcttgcagacaagcaccaaatcaactgcaaagacttcagcaactggcctgacagtggagattcgttcgtgttcacctccgccgagctcgaggcaccagtagagtccgaattggccaggcgctgcagacaggtcatcgtcgtgccggtaaatggggatattcttaactcgagtaaccagagtgcgctgccaagtggtggatacggtcaagtgcttaataaggggttcgacctggcatggaactcaagaaaagatgaacaatgctaccagtgcgagcaatcccaggggcactgctcctacagccagaacagggtgttcctagattgcttgtgctccgacgggaaggtgggcaaccaggattgcagaaacagcggtgccagcaactcgtctacattaaatgtaatccaaaatggaaattatcccgtacaaaagaattgtaaaatccgtcttgagcattatgtggacgtcgatacgcaccgtgtctcaacggagcaaaatggaagatcgtag

SEQ ID NO: 71878 - DNA, 267 bp, Oryza sativa
  Clone ID: PAT_MRT4530_72309C.1
atggtcgccaccctgctcgcacggccgccgcgttctcaccgcacctacggcgaaccgccgtgcaccgccgcgcctcacagcaccgcgcgcattgccccagcgctgcccgcacggcagctacgccggcgccgggcctccgcatgccgaatgttaagaatcacgaacaaggagttcgctgaactggcccagcatggccagaactacctgtgggcatccgacatccagagcgtcttggggccaagaagcttcgctagacgatcgggatag

SEQ ID NO: 71879 - DNA, 325 bp, Oryza sativa
  unsure (1)..(325): unsure at all n locations
  Clone ID: PAT_MRT4530_7230C.1
cgttaaggtacccaccaccgccgccgccaccgccaccancgccgccgccgacgcgaagcacgccgccacccccgcccccgaccccaaccggagccgccacacgccacgcgggaaccccaccgcgcgccgcagcgacgccgcgaaggccgagaccacccccaggacggccgccgccgccgcgaaccacgagcgccgcgagacggagcgcgcccgccaccacggcaagaaccagggccccgggaacgaccccaacaaggnggacaaaagggacaccggccgggccgaaagagacgccggaggaggcggccaagccgagcgacaggaa

SEQ ID NO: 71880 - DNA, 606 bp, Oryza sativa
  Clone ID: PAT_MRT4530_72310C.1
ttttttttttttttttttttaggtgccatttcttcatggtgatctcattttattcagatacgattaagttcacacgtgtgcgacacatatccagtaacaaaactcagtaattaaagtacccgtggatagcactataatcagcctctcatttggctataattaatataggagtacattactatatagcggctaataagcatttggaggatcagttttgacggtcactcttggggacggtggccgggccggcgaagaagcggttgatcgccgggaagacctcggggcgctgcgtgccgaggaatcggcggaaggcgtggtggtgatacttctccccctcgtcggcgttctccagcacggcgctctggcggtggctcttgttcaccctcacgtccgggttcatgaacacgttcctcgtcagctggaacacgcacatccctcccaccagagacatcgccacgatcagcgggtatacatctggcttcacccaacggcccatgtcgatcgatggatgatcctcgtctgcctgacgctgctgctgtttttgtttcttgctaggactgcaacgaatgatccgatagatcgaagccttgaaactgaagaaatccc

SEQ ID NO: 71881 - DNA, 643 bp, Oryza sativa
  Clone ID: PAT_MRT4530_72311C.1
attggttgtaccccaacaagaccccaatggccatgccgaccattaagttccaacgggaccacatttaaaaacacaatcacatgccacgctttgagaccagaaaggccttcaagaattcggaatgaatctcaaaagggcgctcaaagggcataaatacaactcaaaaaaggttattgggagtccaaaaacaaacaaggggattttacaaacccagaacatttttaaaaactttggcggacatttaccgcacaggtggcctggatgaaagggattttctctttattattggctgccccgagcctaacgctccttgctgcaacctcatcagtggcaattttggcagctggggctgactattcgcccgattcctttttcttgatagaagacactttctttaagcgctccttcacataaacagaggttgagccttcataaggttctggagtggcagtctcctctgtcccataagctggaccctgagattctttagccgccttggctttctaggctttcttcttgctggaacaatggctctatgaaggggacggtgcatcttcaacaccagtgtggttggaacctttcttctcagcattggtttcatcctaggcagcattgtttgaaccaccagaaattcccaactcaa

SEQ ID NO: 71882 - DNA, 421 bp, Oryza sativa
  Clone ID: PAT_MRT4530_72312C.1
ctaagaatggccatggttcacctgatgtacaatcgtggacagctgaatgggggaagtgtgatatcagggatgggaaggagataaaatagaaatgagatcaggatctcctgttgttgcctacaaaagctgcattattcgaggacccaacattcaaggtctatgcataaatattcgcataggaccaacaagcatttttttaagactatgccggaccttatgctaaactgatcaatctgtgtgcacaattcaatacttctgatggatttacgttatactgataatgctaagcgcatgagccatatcgttttatgtacctaaccactttttacataaatggatcatattatagaatactttatcaacaatttcatttttttcttgtttcaaacggtagtattaattcatctccaccttatatatc

SEQ ID NO: 71883 - DNA, 436 bp, Oryza sativa
  Clone ID: PAT_MRT4530_72313C.1
gaacagttaagccttgaataaaatcagccgtgatgaacaatttttccctgcttcctttttcccaagtccaggaagaatgaattgaacaacaagattaacctaaggctagaatgaaatcgcccaaatcgcagcatcgatgcgtagtcatgatcatacacattgaccagtactgatctaacaacaaccatgatcagctggtgctcgaggtccacgaaaggaaccatcttttttgctcggcaataatggccgtcatttcgcgccgacgccgagcgtgagctcgagctcctcggcggcgacctcgtggatcctctcgccctcccatggcgtcaccctccccttgtcgaactcgaactccgcgccgtctcggccggccgtcccttttatttccatggagttggaggtggaggcccccgggttgacaaggttgtaggtgggc

SEQ ID NO: 71884 - DNA, 212 bp, Oryza sativa
  Clone ID: PAT_MRT4530_72314C.1
tattttctccggtgcacaaaattggcgcaccgtcgtggagatcgttggatgttctcgcgctatgaatgcgctgtttccacgcaaaatatttcctcgaggggggagcgcacatgcaccggagacgcacactttatgaagagaatatacatatagggggagagagaagagagcgtctcgggcgcacacttctaatctctcctagatgattgtca

SEQ ID NO: 71885 - DNA, 166 bp, Oryza sativa
  unsure (1)..(166): unsure at all n locations
  Clone ID: PAT_MRT4530_72315C.1
acccacacattcattgtacatnttagtctatatttgctgttcacctgcgatccatgcgggtgcgataggaggagggcgccgaactccatctttttgagagcatggtatagaacgacaggagtgaattgaactagaaagagccgacgtcgttgccgctctttaacgt

SEQ ID NO: 71886 - DNA, 583 bp, Oryza sativa
  Clone ID: PAT_MRT4530_72316C.1
agcgtcccaccttctctattgatgaaaacatcacttggggagttacaataaactttgaaaagataggaggcctgaggattccgattacacagttgatgttctcacaagatgttctgtaagcaaggacaaaagtggaaagaagacaatgaagattattcctctgaaagaccgtggagaaccagttgtgatttccttgccactttctcagattgatggactaagcagcattcggatgcacataccaaaggatcttttgcctgtagaagctcgagaaaacacattgaggaaagttgatgaagttatttccaggtttgctaaagatgggatccctttattggatccagaagaggatatgaaagtacaatcaagctctttccggaaagcttccagaagaatagaagctcttgaaagtttatttgagaagcacgatgtccacaattctccacatattaaacaaaagctaaaagtgttgcatgctaagcaagaattatcaacccaaataaaggccattaaaagaacaatggcggcttccactgctttagccttcaaggatgagctcagggcccgaaaacgggttctttcg

SEQ ID NO: 71887 - DNA, 3171 bp, Oryza sativa
  Clone ID: PAT_MRT4530_72317C.1
atggcgaccctcaagcgtaaggccgattccgcggccgccgagctcgcgtcccctcctcccaaggccccgcggggctcggaagcactcgctgaatcgccttccctcgccggcgggggcagcgagcccgtcgcctgcgtgcacgacgtctcctacccggaaggctatgacccgtccgcccccgccacccacctgctcaacggcgtcggcggcgccgagggtgctgggcctgccaagaccttcccgttccagctcgaccccttccaggccgaggccatccgatgcctcgacaacggagaatccgtcatgcaacgtgtcatctatacatctccaatcaaggctttgagtaaccaaaagtacaggggattcaaagaagagttctctgatgtcggcctcatgactggggatgttactattgagccaaatgcatcttgtttgtataaaggatcagaagtcatgagggaagtcgcttggattatatttgatgaagtacactacatgcgtgatagagagagaggagtggtgtgggaggaaagtatagtgatggctcctaagaactcacgttttgtgttcctctcagctaccgtgcctaatgccaaggagtttgctgactgggtggctaaggtacataagcaaccttgtcatatagtatacactgactaccggcctacacctctccaacactatgtatttccttctggaggtgatggtttatatctggtagttgatgagaagagcaagttcagagaggatagttttcagaaaggtttgaatgcgcttgtccctgctagtgagaatgacaaaaagagggaaaatgggaagtggcagaaaggtctcttgacaggaaaacctagtgaggacagcgacatattcaagatggtgaagatgataattcagcgtcaatatgacccagtgatacttttcagctttagcaaaagggagtgtgaatttcttgctatgcagatggctaagatggacttgaatgatgatgatgagaaggcaaacattgaaacaattttttggagtgctatggatttgctttcagatgatgataagaagcttccccaggtttcaaacatgcttcccttgttgaaacgtggcattggtgtacatcattctggtcttttgcccattttgaaggaagtgattgagatactcttccaagagggccttatcaagtgcttgtttgccacagaaacattcagtattggtttgaacatgcctgcgaagactgttgtgtttaccaatgtgcgaaaatttgacggtgatcgattcagatggttgtcaagtggagaatacatccagatgagtggccgtgctggtcgccgaggtattgatcagcgtggtatctgtatattgatggtagatgagaaaatggaaccttcaactgccaaaatgattctgaaaggaagtgctgatagtttgaacagtgcctttcatttgagctacaatatgttgttaaatcaaatacgctgtgaagatggtgatcctgaaaagcttcttcggcactcattttaccaatttcaagctgatcgagttctccctgatcttgagaagcaagtcaaggagctggaactagagagaaattccatgattattgaggaggaggagaacctaaagagttattatgatctcttgcagcagtacaaaaatctaaagaaggatgtccgcgatattgttcattctcctaaatatgttctacctttcttgcaaccaggaaggcttgctcgcgttcagtacagtactgatgagcaatccaccttctctattgatgaaaacatcacttggggagttacaataaactttgaaaaggtgaaaacccatagtgaagataggaggcctgaggattccgattacacagttgatgttctcacaagatgttctgtaagcaaggacaaaagtggaaagaagacaatgaagattattcctctgaaagaccgtggagaaccagttgtgatttccttgccactttctcagattgatggactaagcagcattcggatgcacataccaaaggatcttttgcctgtagaagctcgagaaaacacattgaggaaagttgatgaagttatttccaggtttgctaaagatgggatccctttattggatccagaagaggatatgaaagtacaatcaagctctttccggaaagcttccagaagaatagaagctcttgaaagtttatttgagaagcacgatgtccacaattctccacatattaaacaaaagctaaaagtgttgcatgctaagcaagaattatcaaccaaaataaaggccattaaaagaacaatgcggtcttccactgctttagccttcaaggatgagctcaaggcccgaaaacgggttcttcgtagactgggatatattacaagtgaggatgttgtggaagtgaagggcaaagtagcatgcgagagaagttctgctgatgagctaacattgacagagcttatgtttagcggcactctgaaggatgctaccgtagaacagatggaaaagcttcaggatgccccaaagccaagggaggagctcgacttgctgttcttccagttgcaggagacagctagaagggttgctaaccttcagcttgactgcaagatccaaattgacgtggagagttttgtgaactctttccggcctgatataatggaagcggtgtattcatgggccaaaggatccaaattctatcaaatcatggagatgacccaagtatttgagggcagcttgatcagggccatcagaaggcttgaggaggtcctgcaacagctaattctggcatcgaaatccatcggtgaaacccaattggaagcaaaacttgaggaggctgtcagtaagatcaagagggatatagtgtttgcagcatctttatacctgtaaaatagcttgatggtctcctgagcatgtgaaggctatcaaagtcactctttctgttgagctgcctgattactgttgaaggggagcaggtccttggcagagaaattttgttgttactaccccagtaggcgctaactaaattaattggaattttctaaaggaatccagatatgtacccattttttcatgtgtacaaattacagatgtattggaaccttgtttatcatttgaaaagctgggtttgaggtaaacggtgtaatttgacgctaaaacctgcagcccggggatccactgttctagacg

SEQ ID NO: 71888 - DNA, 595 bp, Oryza sativa
  Clone ID: PAT_MRT4530_72318C.1
ttcatccctcgcaacaaatctatccaagccggcggtgtgccgggtcactagtcctcggacgctggttttaggatacgcctacccggcgtatgactgctacaagacgctggaactgaacaaaccgcagatcgatcagttgcgtttctggtgtcagtactggattctcctcgcgtttctgacgacgttggagacgatcacctatttcacggtctcatggctgcccatgtacggcgaggcaaagcttgcgctcgtgctctacctctggtacccaaagacacgaggcgcgaagcacgtctacgagagctacctgcagccggtgctggcgaggcacgaggccgacatcgaccgcggcctgctgcagctacgcgccagcgccaaggacgcgacggcgtcgcacctccaggccgccgtgtccttggggcgggcctgcttcgccgaagtcgccggccgcgtctcgtcgcagctgcaggcggcgagaagcagcggcggcggcggccgcgccggccaggctgaccaattgcagaagcgacagaagattaatccggaggaggaagaagaagatgaggacgcgacggttagcaagacgaggagatga

SEQ ID NO: 71889 - DNA, 258 bp, Oryza sativa
  unsure (1)..(258): unsure at all n locations
  Clone ID: PAT_MRT4530_72319C.1
tcccactccttcntttatttcaatctaccacacttttaatactttaatatatatatatcatcagctcagtctattatcaataatactcccatatttctaacttcatatttaccttttccaaatctttctcacccctttccaacttttttaattcaattttcccacatattcttctaattcaacttctattctttttaacatactttattaatattccataactattcctacctaactaattacttacccttaatcact

SEQ ID NO: 71890 - DNA, 201 bp, Oryza sativa
  Clone ID: PAT_MRT4530_7231C.1
atggcgaaggctggaaagccgtgtcggtactccgaaagtaaaggcatctcgggtgaaggcatctcgggcgaactacaaagacttcgctatgacgagttcggcatcaaggaggcccaacaggcctcccccaaccttttaggcccgtttgccatagaccaggcccagcctatcagcccattaaaggcccatatgtgcaaatga

SEQ ID NO: 71891 - DNA, 2201 bp, Oryza sativa
  Clone ID: PAT_MRT4530_72320C.1
atgcgaggccgccatctcctaagccctctcttatcccctctcgcctacccaaaacccccctcctctcgcctcgctccccgccgcgtcgccagccaccgcaccgtagccccgccgcccgccgcgcgccgcgccccactgtccgagcccgacgtcggcatctccctcttcgcctccgccctcccgggcttccgcggcgccctcaagcagcgctactccgacttcgtcgtccacgaggtcgccctcgacggctccctcgtccgcctcacctccttcgacctccccgacggcgagtgtgtagatgcgaaggaaggcggcatggacgaagcacaggcgctggaatcgttccggctgctctgcggcgacgcggactgtgaggcattgagggggtttctggagagggtttcagagggaggcgacagcgatgtctcaccgatcattctctctgctgatgccgacaagactcatcgctcggaagttcatgatttcttcaagaggaacttcgaggccttgcttacagatacagttgagcacagcgatggaatccagaggtgcatcagggtgaggttgaagccggggcgacgcgaacggagggatgttgatgggagggggaggaataggaaaggcacgggaagttcgggctggagagatgacaagccatttgatagtagaggatctataatctggcctgaccatctagggaagttcataaggtttcatctttacaaggagaacaaggacacccaagaggcactaggaaagataggcaagatgctagggcttcagcctcgatcattcgggtttgcaggaacaaaggataaacgcgctgttacaactcaacaggtcacggttttcaaggtgcaagctagtaggttggttgctcttaacagtaagctcattggcattaaagttggagacttcaggagtgttgttacagagtctgaagatgtgattaaggctgctcttgatggattaataacaaatggatttatcaattattatggtctacaacttcagcgcttgaagaagtaccctggcaactatctacaagcactaatggctatacctagaacactgagactgatgtatgtgcatagttaccagagttacttatggaaccatgctgcaagtatgagagttcaaaagtatggtatttcacgagttgtagaaggtgacttggtttacaaaaaggaagccccttttgaacaaggagctttaaaggctacttcagaagatgacggtcaaactatgtcatctgaaatgaacgcatgttgtgaaacgcttccagaagaaatgatccagtctgtcaagatagcggattctgaagatttatcaaagtccctgtacacatttgaggatgtagtcctccctttgcctggttcagaaacattgtttcctgggaacgaagttgctggaatttatcatgaaatagctatgaaggatggcattaatctaagagagagtgtccatggtgtcgaggacttctctattacaaggatgaaaggaggttatcgtcgggtgatccagcgacctattgattttgaatgggatctcatcacttatacagatgagaaaatacctttagtagaaacggatttagatgttttgtctaaaacgaagccattagaagtaaatgaactactatcagatgggatttccagctgtacatcacatgattctgggctggaagcttcattggatgcctctgaatcaataaatggagctagcctagtagtagcagaagccaaatctattggcagctcggatatgttggagaaactggccataaaattagcatttactctaccagcatcatcttatgctacaatggctattagggagttgatgaagacttcaacttcggttgctcatcagaaaacattaaacatctgaaccttcggccatttgcattatttatgaaactaatctctgatctaaaggacatggatgtttagcatgcatgttatgttactctgatccttcaaaaaagaaagagagagaaggaaaggccactgaagcgtcgtgactcgtaaacatgcttagctcatctggtgtgtaacaccagaattacatattaccgatttgtccatgtaaccgctcgtgcatattactacagtcacgtactgggaattgcctgtagtgaactagtgatatgtactaatgtttggttatcaactactccgctttatcgcagtttgacatgc

SEQ ID NO: 71892 - DNA, 200 bp, Oryza sativa
  Clone ID: PAT_MRT4530_72321C.1
atccaggcaagggtgggcgtgatggagcgggatgggccctgcgacggcctttgtcgcttccggattcacctaggcacgagaggggactgcccgctgccttgcgaagttcgagtatgcgtccaatggtggtttctccgaggagtaggctttgtccgtgccgtcgaggatgcctgtggagtggtgttcccgctgctatccaa

SEQ ID NO: 71893 - DNA, 522 bp, Oryza sativa
  Clone ID: PAT_MRT4530_72322C.1
atgactactatagatacaaccgtcgttcacatcaagatcaagctgtccaagttctgcaatccagttcgcttcatcgccaaattccatcccagtcgggcgaaatcacaaagagaaggtgttgcgtcacctataatgggcctatgggcttgtaacttcgtctgggaccccggcccaagtggggcccatacacaatcgcccacgtggcctggcaccttcggggacgtcgggcccgagggtgaggtgtccgccctcctcctgatttcccccgaggggggtctggtcaagcgtgtcacgctgcatgcaacgcagtacagcacgctcttttatccggtctgtgaccagtcacagaccggtcagatcaaggcccctgtgaatttgtctcttcccttccttccgcccatgccgccgctgttagtgtacgcccgccgacgccgacgctgcaccgccctctctttctccaccgcaaagaccaccaccgtgccactcgcccaccacaccgtcacctcgaccgtccagccctag

SEQ ID NO: 71894 - DNA, 111 bp, Oryza sativa
  Clone ID: PAT_MRT4530_72323C.1
atgatgcggcagtttgaaggtcctgaggaagatcttgcagcttgtaagatcgtgagatctggacttgacaccaagatctcggtttctgggtggcatccttgtcgactctaa

SEQ ID NO: 71895 - DNA, 171 bp, Oryza sativa
  Clone ID: PAT_MRT4530_72324C.1
atggctggcggcgttgctctgtccgggatggctggcggcgacggacagaaaagtgctcaggcggcgggcaacggcggtgggcacctgtgctcagccggctgtggtcgggcgatgagaaggggctacggcggcggaactgctgcggcggacgacgactcgtgctggacttga

SEQ ID NO: 71896 - DNA, 1063 bp, Oryza sativa
  Clone ID: PAT_MRT4530_72325C.1
ttttttctcgctgcttaatcctcttttatttccttttgttcatctccttatataacgctgcccaagacatcagtctgaagagttcatgagcgcgcgtttttttttttttttttttatgggaatttcatggtaatatatcgaatcactcaagatttcaccagtgcgatagaaaaagataatcatgtccaccaaaacacatggtaacttaaagcatcatcatcacggctaagttcaaaatcttgaaagcaaccatagatctaaagacaaaacatagaactcagtagtacgcagagctaggcgagccatggcgacgacggcggcgaagaggcgacgacgatctagacgcggtcgcggcgggggccaccgtacggcgggcgggagtaggtcggcgcggagacctcttgctggcgctcgacgccggggaggtcggccatgccgagcgcggcgagcatctccatggtctccttgtcgacgcggatctcctccacctcgagcgccgacttctccgggacgaagtccatgcggcgctcgcgctcctcctcctgcagcttcagcgagatgccccgcacgggcccgcgctggatgcggcgcatcaggtgggtggtgaacccggccaccttgttgcgcagccgcttcgacggcaggatggacacctcctcgagcaccttcttgttggtgtggaagtcgagcgtcatccgcgagtagtacttctcgatcacctgcctcgaggtcttcttcaccgtcttggtccgcacgcgacccatggctgctcctctccttctccggcgacggcggcggcggcggcgcgggtggctacttgcggcggcggcggcggcgagggtggattagggcagagcccggccggggccgggcccgccaatggacgtcctcctcgtggatgaacacctccatcgatccctgcctctccggcaacctcccctacgcctagctacctagctacctatactcgcaaacacgagctagctcattgcaatttcgtggtaattaagatctagagaagacgaggcagcaaaagcggaggggaaaaaatcggacgcgtggg

SEQ ID NO: 71897 - DNA, 209 bp, Oryza sativa
  Clone ID: PAT_MRT4530_72326C.1
gccccttaaccgcactgcccgtgcctctgacttgattgcgtcctgatgtggccgcgtctcttgcccaaccgccgcccctgaaggcctctacaggttactgcgatcgctgctccactgcggacgctgctgcgacggccaatgtggagactaaccctgagaacgtccctccgtctgtgcgtgctcaggccctagcactagcagagtttgag

SEQ ID NO: 71898 - DNA, 439 bp, Oryza sativa
  Clone ID: PAT_MRT4530_72327C.1
ggctataaaaaaggggattttatttaaatttatatgacatcaagtttcaactggcacccatgaagatgcatgactttatttttaacatttgaaccattatactattacaattcagtcccaaacccccccaacgggggaaatgctcctcggaccaatggactatttaggataaatcccacatttggggggcaagtttaaggccaacaaagcttgaccttgaccttgagtctgatcaaagtaaacaaccccgccctgctgcagctgtagttgctgcacaatcgcctgaaccccactaatggcctggaaaggaaattgtggccctaccaccctgagctgggggcaacactgggggtggaagacttgggtgtttatcaattgaaacggacctggttgccaaaagggggttgcccctatgctatgctgtggccttacaaacccc

SEQ ID NO: 71899 - DNA, 429 bp, Oryza sativa
  Clone ID: PAT_MRT4530_72328C.1
atggagtggggccttcatcccgggggtgctccggcggatggcggcggcacggcgggacgagtactgcgtctacgacagccacgtgctgacggcgttcacgtcgtcgctgtacctggccgggctggccgcgtcaccagggcggtcgggaggcaggccgtcatgctcgcgggtgcggcgcttttcttcgccggcgccgccgtcaacgccgctgcggtcaacatcgccatgctcatcgtcgacagcatgctgctcggcttcggcattggcttcaccaacctgcaggtcgcggtggcgtggatcatggggtcgcagatcgggcgggacggcgagtcggcgatggcgaggcgctactccgtggcggtgctggcgctgacgtgtgtcttctcggcggcgttcgggtggtcgtggggcccgctgacgtggtgttag

SEQ ID NO: 71900 - DNA, 729 bp, Oryza sativa
  Clone ID: PAT_MRT4530_72329C.1
atgggtgccatgtggtcggcgagctcctcctttagagggctcagcgatgctcggtgctcgacgagtggaagctcgccggttgtccaacaagttgtcggaggagagaagatagagaggaggtggcgaaggaagaagatgacaggcaaccttgttggcgtgttacgtcgtgaagtgactgttctttctgggcctgcacatgagaccactgccaggccgggctggttggcctctgttctgaactcagatctgatgggctctttagtgaagcccattatagctgttgatttgatgttctccatgccccctgagctcaacagtgctttccttggggttgctttcaagacagaggtgtttccttctgaataccggtggcggtggaactttgattcagagtatcttgaactcctgaagaagcatggagcccagcaggaagcaggccaagcactacaagttccaaggctatcaatacacctcgttgtattgtacttatcgatcgcttcgcctttggcggaccaagatcaggcaggcccactgacaccagagatcatcaggtcacatgtaactgacggcccaaaaccacgtctagtgtctgcagctagctgctccgtcggctctgcatttcggtgctctgaaaaattgcaacgcaaatcagcggcgaaccgtgaaaaaaggctcatcgccatggcagcgctgcgagcattggctgcttgcctgttcatgataagataa

SEQ ID NO: 71901 - DNA, 227 bp, Oryza sativa
  Clone ID: PAT_MRT4530_7232C.1
gcttcagagtagtatagtatagggtagggtaagccatcattaacatgcccatcaccaaatgacaaatgtattgtacgggagaaaatacatgctgttagggcttaaaacgatgaaatcgcctcagtaaccaactaaccatcagagctgtccggacattatttcattatatcatgtatcgaccggcgaccgcccggatgcaatcttacgacgtgccggagcttcgggga

SEQ ID NO: 71902 - DNA, 489 bp, Oryza sativa
  Clone ID: PAT_MRT4530_72330C.1
cgtgccaaacaaggccggccgttgcgcgatatggctggaggtgggttccccatgggcggcggcataaccttctccgtcgtggtcacctgcctcatggccgcctccggccggcggcctcatcttcggctacgacatcggcatctccgggggagtgacggcgatggagtggggccttcatcccgggggtgctccggcggatggcggcggcacggcgggacgagtactgcgtctacgacagccacgtgctgacggcgttcacgtcgtcgctgtacctggccgggctggccgcgtcaccagggcggtcgggaggcaggccgtcatgctcgcgggtgcggcgcttttcttcgccggcgccgccgtcaacgccgctgcggtcaacatcgccatgctcatcgtcgacagcatgctgctcggcttcggcattggcttcaccaacctgcaggtccaaatctttctgtcgtcaaaatgtatcccaactgaaaggttaag

SEQ ID NO: 71903 - DNA, 2897 bp, Oryza sativa
  Clone ID: PAT_MRT4530_72331C.1
gctagctaccagtccaaccaacaccaacaactgcgcgagtgagcgcgcggctattgcgtgccacggcgtgccgttgagcgatggctggaggtgggttccccgtggccggcggcgccccgccgggcgactatggcggcggcataaccttctccgtcgtcgtcacctgcctcatggccgcctccggcggcctcatcttcggctacgacatcggcatctccgggggagtgacggcgatggagtcgttcctggcggccttcttcccgggggtgctccggcggatggcggcggcgcggcgggacgagtactgcgtctacgacagccacgtgctgacggcgttcacgtcgtcgctgtacctggccgggctggccgcgtcgctggcggccggccgcgtcaccagggcggtcgggaggcaggccgtcatgctcgcgggcggggcgctcttcttcgccggcgccgccgtcaacgccgccgcggtcaacatcgccatgctcatcgtcggccgcatgctgctcggcttcggcattggcttcaccaaccaggcggcgccggtgtacctggcggagacggcgccggcgaagtggcggggtgcattcacgacggggttccagctcttcctcggcatcggcaacctgacggccaacctgacaaactacggcgcggcgcgcatcccgcggtgggggtggcgtctctccctcggcctggcggcggcgccggcgtccgtcatcctcgtcggcacgctgctcatctcggacacccccagcagcctcctcgtgcgcgggcgggtggagcaggcgcgcgccgcgctccggcgcgtgcgcggcgccaaggcggacgtggacgccgagctggagggcgtggcgcgcgcggtcgaggcggcgcgcgccaacgaggagggcgcgtaccgcaggatcctctggaggcagcaccgcccccacctggtgatggccgtcgccgtgccgctgctccagcagctcaccggcgtcatcgtcatcgccttcttctcgccggtgctcttccagacggccgggttcggcagcaacgcgtcgctgatgggggccgtcatcctcggcgccgtcaacctcggctccaccctcgtctccatcgccacggtggaccggtacggccgccgggtgctgttcctgaccggcggcctcgtgatgatcgcctgccaggtcgcggtggcgtggatcatggggtcgcagatcgggcgggacggcgagtcggcgatggcgaggcgctactccgtggcggtgttggcgctgacgtgcgtcttctcggcggcgttcgggtggtcgtggggcccgctgacgtgggtgatccccggcgagatattcccggtggagatccggtcggcggggcaggggatcagcgtggccgtcaacctcggcgccaccttcgtgctcacgcagacgttcctcgccatgctgtgcagcttcaagtacgccacgttcctctactacgcggcctgggtcgccgtcatgaccgccttcgtgtgggcgttcctgccggagaccaagggggtgccgctcgaggccatgggcgccgtctgggcgcggcactggtactggcggcgcttcgtgcagccgccaccggcggccaaggacgccatgctgccggagttgagtaggaggctaaccgacaaatccaaatctgtgcctgcgctgcctcttgcctccgttccccgatcaatgctgtcgtccgccgccgccgcctctcgccgattcgccatgccccaaccagctagctccggctccacgtctcgacgcttcgactttcccgattcggtcctcctcgacacggtagcgcacgcggacggctgtggcgacgacgcaaccaccgccagggcggagacgagcgatggccttcccatcgaggtgtctttcgtggccgccgacccacccaccttcacccgctgcgtcgtccgctgctccggcttgacggcgggcgagttctcgaaggggccgcccttcatcatcggcgcggacggcgccttcctcgtcatacgcgtcatcttcccctgccgctctgaccgacgttgttttaccgacttcttcgtctacaggtcgggccctgggacaccgttgctcgagctcctccggcgcccctacccggttaagcacctgtccgaccacctcggcatactatcctgtggcgagcacttcttggtcgtcaaccccaaatggcaattccacgccgatggtcaggtgaggtgcgacctgcatgtcttctcgagcaagaccacgtcgtgggaaagtaaggtcgcaaggctgccatgtggcgtggaggcgtatatcggtgattttatacccaccaaagtgttgtccgttgaaggacgatcgattgcctgggttgatctctggaacgggatactgctcttcgactcggtcaccagcaaccccgaggtgcgcctgatacagctgcccccgttgatgcccatcaacggtaggtacctcagaggagggggtttggatgatacctatatttctgtggatccaaatcgagatatcacctgtagtaatggctggttcaggttcattgagatgggattcccgctgttggatggcagcactggacagttaaactttcggtggcaggccaccatgttcaagaggttggttcgtccagaggaatgccaatgggagccatgcggcaccgaaactgactctgcagagctgcgaggcgtctgtggtgacttcgccaatctccaagatggatttgtcggctcaatcttcaaagatgctcatagagccgcgaagctctaccgctgcgtcgctgacctccccttctccgccgacgacagctcgtacacagctgtcgccgtctccgctgtcaacgccaccactccgttgctccaagctgcagcaccacacaccggcgcgccgctagctagggtttag

SEQ ID NO: 71904 - DNA, 270 bp, Oryza sativa
  Clone ID: PAT_MRT4530_72332C.1
cccacgcgtccggggattaccgggcagagcggaagatcgaagcgcaccatcctatctgatggagactattatcctagggagcttgccatttatgtggcagacggcagccaagagttatctatactaggctacaggtgtgttggaggtgccagcatacaggatggacagacagagctaatgctacacatgatactactgaatgaagatggtcgtgagagatgaacatgcattacaagagacatcctgccttgataatcaatgtgaaggact

SEQ ID NO: 71905 - DNA, 492 bp, Oryza sativa
  Clone ID: PAT_MRT4530_72333C.1
aaaaaaaaaaatgggggggaagtggggtgggccccgttaaaccaaataattttggtaaaaaaaacgggaaatttttttttttttaaaatcgggcaaaaaaacccgaaccggttaatttggaaaaaatcacctttgggggtgaaagggggaaaaaaactttacttaacttaaaaattttttaggggattttttttttaaaagggaaaaaaaaccggccccctaaaaaaggaagggtttttttgaaaaggaaaaaaaagcgttttttatttggccctaaaaaggggaaagggtttaagaattaattttttttaaaacccggttttgggggtaaacttttgcaattgttggaaaaactggggggaaaaattccggaattttttgaaaagggaatttgtttttgggaatttttgaaaaaactttttgaataaccccccaaaatgaaaaagggggttttttaaaccctttggaggccctgaaaaatccccccccaaa

SEQ ID NO: 71906 - DNA, 428 bp, Oryza sativa
  Clone ID: PAT_MRT4530_72334C.1
actgggagagccagaaaatgagtcgtgcatgttccattcgatgggggaaagctataagcacagatactgagatacatccaatagatcatcacagatcattgatgcagatgacacacaggaagcagagcagtagtactattgttgttgctaaacaagaagcagaggggtagaggaaaacttgttgttgctacagcctacaggtagaggaaaacaagaagcacaggtagaggtgtagctgcggctgatgatctcatctggagcagccctgccctcgatcttcttgcttgggcatcatgtctccctgaataatttccttaagccagcatgaatgcatgcacatgtggcaggaacattttccatcgagctagaatccactggttgtctgcctctgcctggtaatcaagttagattacgccaagcacgccaag

SEQ ID NO: 71907 - DNA, 159 bp, Oryza sativa
  Clone ID: PAT_MRT4530_72335C.1
atggagagggcggatgaagatggttcgggcggtggtcccgtaggcagtggcggcggcccgggacagtggtggtctgagcaccggcgcaaggatcttgtcgaggagcaggtggaggtcgaccttggcgacagcggcggcccaggacagcagcgaccttag

SEQ ID NO: 71908 - DNA, 730 bp, Oryza sativa
  Clone ID: PAT_MRT4530_72336C.1
ggaagacattattaagctagaaacaaattacagccttgcagagttaaaagacttgaaagtggttgaccatgtctcaagacccaacactgtcatcttagaaatgttaattgaaagctttctcaatgacattattttccatatatcaattactccaactaatctggtactagctactgtatatgcatagtgaatagttagtattgcttaaacaatgtctgggaccgttatattcgttgtaagcatatatttcaattgttttcctatgatggtcagtcaaaaccagataatcaaaaaagagataaaaaactactctctattggttatttgattttcaggctttcaagagattagactactaggcctgcataatttgaaatgctatttaataaactatatatgtatttaaatgttcagaaatttagttccagtttaaaatttcaggtgtatgcaatgttgaaaaccaccaaatctgggcatttccttccaaacaacttctttgagatgaaatagattctgggcagttgtttcttccaccgtccttcattatctttgtactctcgcatctaaattatcctatgtcaaatgtgcatatgatttagttcacagctaaatgcatctaaagggccaacaccagatcttctgcaggtaactgtggcctaacatctaaagccattagtagtacccatgttcttttttagttcataagtcctggtactgatgtggtgatgct

SEQ ID NO: 71909 - DNA, 1482 bp, Oryza sativa
  Clone ID: PAT_MRT4530_72337C.1
atggctgcacggcgagcgaactgcgcgctggtgctggtgctggcgctcgcgctgttggcggcgcgggatgctggtgccgcggcggtgcccaagcccaactggctgggcgggctgagccgcgccgcgttccccaagcggttcgtgttcgggacggccacgtccgcgtaccaggtcgagggcatggcggcgtccggcggccgcgggccgtccatctgggacgccttcgcgcacaccccgggaaatgttgcaggaaatcagaatggagatgttgcgacagatcaatatcatcgctataagcggttaccgcacggtaaccgtgcttaccgccagggcacggaagatgttaatctcatgaaaagtttgaattttgatgcctaccggttttcaatctcatggtccaggatcttcccaggtatcactccttatgtcaatctttaccactacgatctccctcttgcgcttgagaagaagtacggaggctggttgaatgcaaaaatggcggatctattcacggagtacgcggacttctgtttcaagacctttggcaatcgtgtcaagcactggtttacatttaatgagccaaggatagtagcacttcttggttatgaccaaggaacaaatcctcctaaaaggtgcacaaaatgcgctgctggtgggaactcagcaacagaaccatacattgttgctcataattttctcttatcacatgctgcagctgttgcaagataccggactaagtatcaggcagctcagcaaggcaaagttggaatagttctggacttcaattggtatgaagctctttccaactcaactgaagaccaagcagcggctcaaagagccagggacttccacattggttggtatcttgatccattgataaatggacattacccgcagataatgcaagatcttgtgaaagataggctgcccaagttcactcctgaacaagctagattggtcaagggctcggctgactatattggcatcaaccaatacacagctagctacatgaagggccagcaattgatgcagcagacaccgacgagttactcagccgattggcaggttacctatgtttttgcgaaaaacggcaaaccaattggaccacaggcaaattctaattggctttacatcgtgccatgggggatgtacggatgtgtgaactacatcaagcagaagtacgggaatccgacagtcgtcataactgaaaacggaatggatcaacctgcgaacctcagccgcgaccagtacttgcgcgacaccacgagggttcatttctacaggagctacctcacccagctgaagaaggccatcgacgagggcgccaatgtggctggctacttcgcctggtctctcctggacaacttcgagtggctgtcaggttacacgtccaagtttggtatcgtctacgtcgacttcaacacgctcgagcgccaccccaaggcgtcggcctactggttcagggacatgctaaagcactga

SEQ ID NO: 71910 - DNA, 390 bp, Oryza sativa
  Clone ID: PAT_MRT4530_72338C.1
atgccatgtccgacgaagagcacgggcagcaggcagcagctggcgctcgccctgttcacgacgaagagcacgggcagcaggcaacccagccgggtcggcgccaatgcacgacgcgtccgacccctcgtcgacggaccgggagacggcgcttgtccagtccgcgacctcagcatgctggtgctcgacgggatgtacagccactcgacggcggagtcgacggccgcgaacgcgcatgcgttctacggcagcgcaagcagcgtggcgttgcggctgcctcatcataggaccaaggggatagagattagtaaccttatcgaggcggaattcaaagcagaacgaaccctggaagcctcgcctagtcgcctgcatgcatgctctggagctccctga

SEQ ID NO: 71911 - DNA, 3774 bp, Oryza sativa
  Clone ID: PAT_MRT4530_72339C.1
gagatttgaaagggagattatgccaaggctagtctggagtttctcattattattatagtgtctatgttctgggacaagtagacttaaaagctgggtacggtcacatagtcagtgcatcctgtctgactactctttgatcaatatgaactcataccgttaatgagttattgtcttgtttaggttttagtattaaacatttgaccatgaaattcagaggtggatgggtgcgagcccagcataagggtgtagcatgtcttatgaatcatgcataccaacaacataggtaaatgtagtttcctgtaataaatcttgacagcacagttgtgcccctactagatacctttaaggacaatggattattgaatgtagttgtgaaggatcaattcccagatttcgtggctttctgtttcaagtcctttggcaatcctgtcaagcactggtttacattttgtgagtcaaggtgagaagatctactcaggatggatgaaggcataaatcatggaatctattcagggaggtcgcgggcttctgtttccagaccatcagcaatcgtgtcaagcactggtttacatttaataagccaaggatagtcgcacttcttggttatgaccaaggaacaaatcctcctaaaaggtgcacaaaatgcgctgctggtgggaactcagcaacagaaccatacattgttgctcataattttctcttatcacatgctgcagctgttgcaagataccggactaagtatcaggcagctcagcaaggcaaagttggaatagttctggacttcaattggtatgaagctctttccaactcaactgaagaccaagcagcggctcaaagagccagggacttccacattggttggtatcttgatccattgataaatggacattacccgcagataatgcaagatcttgtgaaagataggctgcccaagttcactcctgaacaagctagattggtcaagggctcggctgactatattggcatcaaccaatacacagctagctacatgaagggccagcaattgatgcagcagacaccgacgagttactcagccgattggcaggttacctatgtttttgcgaaaaacggcaaaccaattggaccacaggcaaattctaattggctttacatcgtgccatgggggatgtacggatgtgtgaactacatcaagcagaagtacgggaatccgacagtcgtcataactgaaaacggaatggatcaacctgcgaacctcagccgcgaccagtacttgcgcgacaccacgagggttcatttctacaggagctacctcacccagctgaagaaggccatcgacgagggcgccaatgtggctggctacttcgcctggtctctcctggacacgggctgcaggctttcggattgaggggcgaagagggggaccctgggagttgcgtgttgcgggcctggtgctgcggtgggcggggcgccggctgcgcattgcgcccgggggggggggcggcgggggctgcggcgcgtgggcttgcgctactgcttggtctcactgtgtgaacaactgctgccgccgcctgccggcggtgtgctccggccgcgcgcggtcgtgatggctgcacggcgagcgaactgcgcgctggtgctggtgctggcgctcgcgctgttggcggcgcgggatgctggtgccgcggcggtgcccaagcccaactggctgggcgggctgagccgcgccgcgttccccaaccggttcgtgttcgggacggccacgtccgcgtaccaggtcgagggcatggcggcgtccggcggccgcgggccgtccatctgggacgccttcgcgcacaccccgggaaatgttgcaggaaatcagaatggagatgttgcgacagatcaatatcatcgctataaggaagatgttaatctcatgaaaagtttgaattttgatgcctaccggttttcaatctcatggtccaggatcttcccagatggtgagggacgagttaaccaagaaggcgtagcatattacaacaatcttataaactaccttctgcagaaaggtatcactccttatgtcaatctttaccactacgatctccctcttgcgcttgagaagaagtacggaggctggttgaatgcaaaaatggcggatctattcacggagtacgcggacttctgtttcaagacctttggcaatcgtgtcaagcactggtttacatttaatgagccaaggatagtagcacttcttggttatgaccaaggaacaaatcctcctaaaaggtgcacaaaatgcgctgctggtgggaactcagcaacagaaccatacattgttgctcataattttctcttatcacatgctgcagctgttgcaagataccggactaagtatcaggcagctcagcaaggcaaagttggaatagttctggacttcaattggtatgaagctctttccaactcaactgaagaccaagcagcggctcaaagagccagggacttccacattggttggtatcttgatccattgataaatggacattacccgcagataatgcaagatcttgtgaaagataggctgcccaagttcactcctgaacaagctagattggtcaagggctcggctgactatattggcatcaaccaatacacagctagctacatgaagggccagcaattgatgcagcagacaccgacgagttactcagccgattggcaggttacctatgtttttgcgaaaaacggcaaaccaattggaccacaggcaaattctaattggctttacatcgtgccatgggggatgtacggatgtgtgaactacatcaagcagaagtacgggaatccgacagtcgtcataactgaaaacggaatggatcaacctgcgaacctcagccgcgaccagtacttgcgcgacaccacgagggttcatttctacaggagctacctcacccagctgaagaaggccatcgacgagggcgccaatgtggctggctacttcgcctggtctctcctggacaacttcgagtggctgtcaggttacacgtccaagtttggtatcgtctacgtcgacttcaacacgctcgagcgccaccccaaggcgtcggcctactggttcagggacatgctaaagcactgagaatgaaagacacgcagactgaagttgaagttgccatccattgatcatcatgttcagttctaggctgccgcttggatggcatcagagctggctatgaactatgtgatggaaataaaaggactgcaaattgattcgattatgcaattcgtgtctatgatcagaattgtggccgtctagtgaacttgtagaagtgtactcttgatgtgtgatcgatcttgagtaatcaatgtttgatcagatttcgccttaaaaaaaaaaaaatgaagagatttggcttggtgattttataggaaaaaaaaaaaaaaaaaaataggtttttgtatttcatttatctttcactatagcactatcttgcttcccctgatggtttccatgcattttcttttcccctcctttttcaagtttttatccctgtagaagtagcaatttagcagtgattaataagtagtggattccaacagtatgtttgctttaaaaaatttactctaaataaaaggacgctgacaaagtccaacctgaaggccatcttgtttaatttttgcgtgcctttcgccagtagtgagccctatgattcagacccaaatttgtagtacttgtggtgaatcagctaatgtgtgtttcagtgtttgtatttgtagtatgtattaattcaactgcctcaacttttcgggttc

SEQ ID NO: 71912 - DNA, 495 bp, Oryza sativa
  Clone ID: PAT_MRT4530_7233C.1
atggtgggcggaggggcgctgcggcgggtggggaagtacgaggtggggcggacgatcggggaggggacgttcgccaaggtgaagttcgcgcagaacacggagagcggggagagcgtcgccatgaaggtggtcgaccgctcctccatcctcaagcacaagatggcggatcaggtcttggcaagccggaagaagatatttataatcttggagttcatcactggcggtgaactatttgataaaataattcgtcatggaagactcaatgaagctgatgcacgcagatactttcagcagctcattgatggtgttgatttttgtcacagcaaaggtgtctaccatcgagatttaaagcccgaaaatctcctccttgattcccaaggaaatcttaaaatatcagactttggactcagcgcctggcctgctcagggtggtgcccttttacgtactacctgtggaaccccaaattatgttgccccagaggtgagtgacatctga

SEQ ID NO: 71913 - DNA, 774 bp, Oryza sativa
  Clone ID: PAT_MRT4530_72340C.1
atggctgcacggcgagcgaactgcgcgctggtgctggtgctggcgctcgcgctgttggcggcgcgggatgctggtgccgcggcggtgcccaagcccaactggctgggcgggctgagccgcgccgcgttccccaagcggttcgtgttcgggacggccacgtccgcgtaccaggtcgagggcatggcggcgtccggcggccgcgggccgtccatctgggacgccttcgcgcacaccccgggaaatgttgcaggaaatcagaatggagatgttgcgacagatcaatatcatcgctataagcggttaccgcacggtaaccgtgcttaccgccagggcacggaagatgttaatctcatgaaaagtttgattttgatgcctaccggktttcaatctcatggtccaggatcttcccagatgagcatactggcgcacgccgccgtgggcgcgttcctgacccactgcggctggaactcgaccatcgaggggctcatgttcggccacccgcttatcatgctgccgatcttcggcgaccagggaccgaacgcgcggctaatcgaggcgaagaacgccggattgcaggtggcaagaaacgacggcgatggatcgttcgaccgagaaggcgtcgcggcggcgattcgtgcagtcgcggtggaggaagaaagcagcaaagtgtttcaagccaaagccaagaagctgcaggagatcgtcgcggacatggcctgccatgagaggtacatcgacggattcattcagcaattgagatcttacaaggattga

SEQ ID NO: 71914 - DNA, 301 bp, Oryza sativa
  unsure (1)..(301): unsure at all n locations
  Clone ID: PAT_MRT4530_72341C.1
atcataacatgtatacacataaacattacaaagaatacgaatcggccgaacacttaaatattaaggagtatttgagacaaaaattaacccccgaaattcctcagcctatatatgcatgacgacatgtacgtacatatacatatattaatttctctgaatatttatactcttaattatacgccgaatctctctacgtattcgtaggatcgggaggagtcgatcgatcgtcgttgttcaccgtcgtcgccggccgccggccatggcgccgccgtctcgtcatgtacaccaccgccngtcgtcg

SEQ ID NO: 71915 - DNA, 1092 bp, Oryza sativa
  Clone ID: PAT_MRT4530_72342C.1
atgaggacggcgcagcagcagcagcagaagcagcagggcgggggtggtgcgcgtggaccaagcgtcgcccgcgtccagcttccgcgagctcgacgacgccttccctccagggatctattcacggagtacgcggacttctgtttcaagacctttggcaatcgtgtcaagcactggtttacatttaatgagccaaggatagtagcacttcttggttatgaccaaggaacaaatcctcctaaaaggtgcacaaaatgcgctgctggtgggaactcagcaacagaaccatacattgttgctcataattttctcttatcacatgctgcagctgttgcaagataccggactaagtatcaggcagctcagcaaggcaaagttggaatagttctggacttcaattggtatgaagctctttccaactcaactgaagaccaagcagcggctcaaagagccagggacttccacattggttggtatcttgatccattgataaatggacattacccgcagataatgcaagatcttgtgaaagataggctgcccaagttcactcctgaacaagctagattggtcaagggctcggctgactatattggcatcaaccaatacacagctagctacatgaagggccagcaattgatgcagcagacaccgacgagttactcagccgattggcaggttacctatgtttttgcgaaaaacggcaaaccaattggaccacaggcaaattctaattggctttacatcgtgccatgggggatgtacggatgtgtgaactacatcaagcagaagtacgggaatccgacagtcgtcataactgaaaacggaatggatcaacctgcgaacctcagccgcgaccagtacttgcgcgacaccacgagggttcatttctacaggagctacctcacccagctgaagaaggccatcgacgagggcgccaatgtggctggctacttcgcctggtctctcctggacaacttcgagtggctgtcaggttacacgtccaagtttggtatcgtctacgtcgacttcaacacgctcgagcgccaccccaaggcgtcggcctactggttcagggacatgctaaagcactga

SEQ ID NO: 71916 - DNA, 523 bp, Oryza sativa
  Clone ID: PAT_MRT4530_72343C.1
ccgggctgcaggcgccgccacgacggaacctcggggcggcgagcggccgccgccgccgccattctcgacggagcggcggcgggggatctctctctctctctccccgtgaagaaatggaagctctgatcatgatgatccaaggcactggacaaaatttgaggactatcaagatctggagtgggtttacatcagtctttggtgctttggggaaggagtatatctgctggtgggcgatgtcggtgccctgtgctgtatggacaagctggagcccccagcagtaaaccttatacaggttgcctctggcggatggaatggcctataaatcgcaactatcagcagcaacaataactgtagatgaagaacataagacaatcaaacacgctcatccattatcagccttcagtgattggtaaccacagtacgacctcaacgctggagcgtttggactcggaaatgatccttgccaactattccagacagaaaaggttgttttatgcctctgccatcaacacgcagtggactc

SEQ ID NO: 71917 - DNA, 2064 bp, Oryza sativa
  Clone ID: PAT_MRT4530_72344C.1
ctgcaggaattcggcacgaggcgccgcacggcccacctgcagccacccagcaaagccgccgcgcgcgtcttctcgctctagggttttcccacacgacaaccccccaagcatgtcggcgccgccgttgctgaaggctccggccgccgccgccgcctccctcgtcgcggcggccgcggcccaccgcgctacggccgccgccgccgccccgtccggtgcgtcccgcgtcccgccgcgacgcttgcgctgctctgcatcaggcgccgccgccgtcgaggtgcgtgctccgatggattgggcgacgaggtcgctggaggagatgcagcgggcagaggacttcgactctttctgcctgatggggctttcgccgctggatgggcggtacgagcgctttaccagggacctgaaacccttcttcagtgagttcggcctcatcagataccgggtcatcgttgaggtaaagtggctactgaaactctcccaaatccctgagatcaatgaggtgcctccattcagcaaggaggcccagttattcctggatgcgattatccaggatttcagtgttgctgatgcaaaagaagtgaaaaagattgagaaaacaaccaaccatgatgtgaaggctgttgagtactttctcaagcaaaaatgcagctcaaatccagagattgcaaaggtgttggagttcttccattttggatgtacttctgaagatatcaacaacttgtcacatgcattagctctaaaagagggggtaaatacagttatgttccctgttatgatggacatatgcaaagcaatgtgctccttggcaacacaaaattcaaccatccctatgctgtcgcgaactcatggacagccagcatcgccaacaactctgggaaaagagatggcgaattttgcggccagattgtcaagcataggaaatagtttttctgaggtcaagatactagggaaattcgctggagctgtcggaaattacaacgctgatgttgttgcatatccagaagttgactggcctaaggttgcagaagattttgtcaaatcgttgggcttggagttcaatccttatgttacccagattgagccacatgactatatctcgaagctcttcaatctatttgttcagtttaacaatgtcttgactgatttcgatagagacatgtggacctatatatcactaggctacttcaagcagatagtaaaggctggtgaagttggatcttccacaatgcctcacaaagtcaatcccattgatttcgaaaatagtgacggcaatttgactatagccaatggtacattgtcttctttaagcatgaagctaccaatttctcggatgcagcgtgatctcacagactcgactgttttgagaaatttgggtgttggattagggcattcactcttggcttacaaagctacattgcgaggaatcaataaggttcaggtgaatgaatcccggttatctgaagacttggatcaaacatgggaggtccttgcagagccaatacagacagtgatgcgaaggtatggaatccctgaaccttatgagaagctgaaggaaatgaccagagggcaggctgtcaccaaggacagcatacggcaattcattgaagatctagacttgccagaggcggcacgatcgtcgcttctgaagctaacaccacattcttatatcggagaggcagaatttttggctagaaatatcgaagaggtggttgatctaaaatctggatttaagatcgagtgagcacccgttccggaactcggtaatccccccaaattttttaccaggacaggaagaataacgggcgaaaatcttcaaagctgagggtgaacaccgaattgtgtcctgacctttaacaacttccggttacgctaattcagctgtgctgattgaaaggcttttggatgcacgcaaaatgcatccgtggaatttgtgccatgcgtgtttcggaataaaatcagaagcaggataaatcttgctcgcctgtctttttcaatcgcaagtggccttgctacagtcttcattgcacattcccttgcatcgacaggctacgaaaaaaaaaaaaa

SEQ ID NO: 71918 - DNA, 395 bp, Oryza sativa
  Clone ID: PAT_MRT4530_72345C.1
gtaaccgttcttgttcttgtgcttttttgggctgtggccacattagtcgctgcagatcagctttagaaacagagctgctagcttgcagagatggaatagccctggccctccaatggactctgctgcccatcgtcgttgaatccgattgccaagaagcaatccagctgatcaagtcagtgaataaggtattgtctgctgatgcgtgcgtagtcaacgaggtgattgaacttatttctggaacaagggtgattgcacttaataaagtgcacaggactcagaatagcattaatcatttcttagcaaataaaggccgaagtgaatccttaacttacttctggccggatgactcttgtattgctatctcacatttgctttgtgagaactcctattctgag

SEQ ID NO: 71919 - DNA, 125 bp, Oryza sativa
  Clone ID: PAT_MRT4530_72346C.1
acaacgcacgctgtcagcaccttagatgggaatgtcaaaggccatggagggttcgatttcgggtgcgtgccaatctataaagacaaatgcgcattctcaccaagtacacagttatggaagcatat

SEQ ID NO: 71920 - DNA, 230 bp, Oryza sativa
  unsure (1)..(230): unsure at all n locations
  Clone ID: PAT_MRT4530_72347C.1
attggttgttttttttgtgagtgtttttttttttttttttttttaacaagaaagcgttttaaagagggggttttatttaaatttaaatgacataaagttttaactgttccgcttgaagacggacgcctttattggtgagaatggaacccttatccttgtacaagncaggaccaaaccccacccacggggggaaagcttcttatagcaaagcagtacctaggatagaaccc

SEQ ID NO: 71921 - DNA, 380 bp, Oryza sativa
  Clone ID: PAT_MRT4530_72348C.1
ccaaaagaagcttttgtactcataaatctctcttcagtgctgcatgtaataattgtatataaacagagcaggggcagggtgaaatgttgtgtaatttactatttgatttgtaacttcggaaacacccaaccctagcctgcgaaaagagaataaaattataggttcacttacagttctgaaaaaaggtgtctttccacataatttgtacatgattggatgcaattataaatagcctttctcttgcatgatgcggatttatctacctagacataattaaaaggtgagtatctattggtcactgagcttgacaactttgatgattgtattgtaccattgtttcagttgtagtggccattgttcctgttaaatgcaagttgata

SEQ ID NO: 71922 - DNA, 265 bp, Oryza sativa
  Clone ID: PAT_MRT4530_72349C.1
gtctccgtgccccttttgcggggccaccaccaccaccgctgactcctccgccactcctcctcgccgcgccgctacccagccggcttctcgcgagggctcagctgcggctcgttcggctctgccgagcagcaccaccaccggtcgcgcgctccaccgggctcgcacctaaggcgctcgtcggacgagcgggcggtacgaggctcacgagatggcgggatatccgaaccagggcgaggattcccgacggctagggagggtatgggca

SEQ ID NO: 71923 - DNA, 1969 bp, Oryza sativa
  Clone ID: PAT_MRT4530_7234C.1
gccccacgcgtccgcccacgcgcgcacacaactaataaccaacgaaaccacgagcagcggctgatcggtaagcggtagtggtagtagtagtttcgtttgtacgttgacccaagcagcagatgccaattgcagcagccgcggtcacctcgccaccggccgccgcgcaggtgcacggtgtcgtgccaaggcatgcctcgccgacgccacagcagcgggcggcgccgcggcgggagcagtcgccgctgaacccgagctcgcagtcgatccggtcggcctcctccggcaccgagctcgcaggttccgcggcgacggaggcctcccgggcgcacatcgccaaccttgaccgggttctcgggaagccaccgcaggtgccgaggccggcgagccacgcggcggcgagcaagcaggagcggcagcagcaggacggggagctggagccgctcaacgtcaggcacggcctgctcaacgcgctcaacctgtccttcttcgtgcccatgcccgggatgcgggcccgcaccgccgccgacgagcacatgtcgcctcgcagcctcatgcacatgcagcagctcctctccgccgactccccgcgcgcctcgccgaggagcaccatcgcgccgcgctggcgcagcctccacggggaagacggctgggccggcctcctcgacccgctcgactccgacctccgccgcgagctcctccgctacggcgacttcgtccaggcggcgtaccaggcgttccactcgctgcccaccgcgtcggcgaggcaccgcgggctcatgctccccgaccgctcctaccgcccgacgcggagcctcttcgccacctcggcgctgtccatgccgccgtgggcgaagcgccccaacacccccgagtggctcacgcagcagtccaactggatcggatacgtcgccgtgtgcgagtccgagcgggaggtcgcccgcatgggccgccgcgacatcgccatcgtgctgcgcgggacggccacctgcctcgagtgggcggagaacctgcgcgcctcgctcgtgcctctcgacggcgagagcggcgaaggcggcgggcaggaggagcccaaggtggcacggggattccggagcctgtacaagacggcaggggagaaggtgaagagcctctcggaggaggtcatgggcgaggtgcggcggctcatggagaagtacaagggcgaggagctcagcatcacggtcgtcggccacagcctcggcggcgccctggcgctcctcgtggccgacgagatcgccaccaccgtccccgacgcgccgcccgtcgccgtggtctccttcggcgggcccaaggtcgggaacgccgcgttcgtggacaagctccagaagaacggcagggtgaacgtcctgcgcatcgtcaacgccggcgacatggtcaccaaggtgcccggcgtggcgccgcgcctgccgctcaccaaggagcagtaccagcacgtcggcgcggagctgcgcatcgacagcaagaactcgccgtgcctccgccccgacgccggcccggcgtgccgccacgacctggaggcgtacctgcacctcatcgacgggttcacggggacgggccgcccgttccggcacgacgcgcgccgcagcgtgatccggctgctgcagttgcagagggggaacgtgaagaaggagtacgtgaaccgcgcccgggagctcggcgtcgacccctcggcgccggtggacgtcggccggagcatggcgtacgggaactgcgccgtcgcgagcccctcctcgtgagacgacgagattgacgtcttcttccaagagcccttaattatgtaaatttttgtagaagcagaccaacaattctttcgttagtcaggggtgtcagcgggaaaaaagattttcccttgtcatttgacgtatgtatgtacagtacataaaaactattatacttgcaaaaaaaaagaaaaacattatgcaagtgaaagcttgttatatctttatcactg

SEQ ID NO: 71924 - DNA, 921 bp, Oryza sativa
  Clone ID: PAT_MRT4530_72350C.1
ggcaaaagcgaagcaaccgcttccttccacccttcctccatttctcccttccccgcctcgcctccgcttcgcttcctcctcttctccgggcggatcccgctgccggtgaggcaagccgcattccggtccggcgagatgttgggggagctcctctccaggatcctgctgctgctgttcgggtacgcgatgccggcgttcgagtgcttcaagacggtggaggcgcgccccaacgacgcccacatgctccgcttctggtgccagtactggattattgtggccatggtaatagcctttgagagcctcatctcatggatgccaatgtatggagaaattaagctagctttctttgtttacctgtggtatcccaaaacaaagggaagtgatgttgtatatgataccttccttcggcccattgtaatgcaatatgaaccaaacatagaacagaggttactgcatctgagggcgaaatctgggcagctacttagcttctacatgaagaactttgccgacaaggggacagctttcttcatggatgtcctgcgctatgttgtctctgataaacctgagggatccaatcaagagcagcgcaacaagaagtccggcggctggagccccttcgcgaccaaacgccggccaccgtcgccgccgcggccgccgcaggagtccctcttcgagagcaaccccgaagccgccgccgtcgccgaagttctcaaggcaaccatcaaccccaggccccggcgaggagcgcagaatggcaagaattactattagtgcattgcaccatccgttcaagatggtgacccgtgtatattgcgtaaatactacttcctccgtttcatgactttggtcaaaatcaaactacttcaattttaattaagttatagacaaatatagtaatatattttcataattagttttatt

SEQ ID NO: 71925 - DNA, 753 bp, Oryza sativa
  Clone ID: PAT_MRT4530_72351C.1
atggcggcggcggcggcggcagcggcggctgaggaggagatcgcggtgaaggagccgctggatctgatcaggctcagcctcgacgagcgcatctacgtcaagctcaggtccgaccgcgagctccgcggcaagctccatgcatacgatcaacatttaaacatgattcttggagatgttgaggagatcgtgacaacagttgagattgacgatgagacatatgaagaaattgtgcgcaagaacacagattcgaagaggcagaggcggcgaagagacgcgcgagccatgggcgtcaccaaggaggatgtcgaggccgccatcacctcctccctcagcccttccagcctcgtggtgacggatacttccggcgggtgcggcgcgagctacgagattgaggtggtgtcggagaagttcgaggggaagcggctgctggagcggcaccggatgaattggaatgatactatgcttgactgcttagaaatttcagtaactttgcgtgcttcccgcgtcatcgagagccgctcgcgtcacttccccgtccatggacggtgctccaagttatggaccaccccgtgcagcatcttcccaaaacgcaccgaccggcacaatattaaccgtgcaaagagccagaatttggccacgaagcgagcaatctcaagtgtggccgggttccgcctcccgcgtcgccagttgtcgatcaggcgcaacggcaacggcaaaggcaaagcagtcgcctccgaggaaaagtccgcatga

SEQ ID NO: 71926 - DNA, 156 bp, Oryza sativa
  Clone ID: PAT_MRT4530_72352C.1
atggaggcggcggcgccagccatgctggcgccctcctccctggggcggcgcatgctggcgccctcctcctgccacgtcgccgcaccatccgttgagaggccagccgatgtggccggacggtggtcgccggaggaattggtgccgacagaaccatga

SEQ ID NO: 71927 - DNA, 2305 bp, Oryza sativa
  unsure (1)..(2305): unsure at all n locations
  Clone ID: PAT_MRT4530_72353C.1
cttggtggtccgcgtcgcgctcgtctctcgcgtgcgctgcgtctcccctcctacccctgattcgcacggaattcctcgaatcgcccgtgagagccgcttgattcgatctccgattcaggccccggggtctagggttttcgccgccgttcgagcggagcagagcggngcgtgggagatggcggggaagggagccaaggcgacggcggccaagtcggcggagaaggaaaaggggaagaaggcccccgtatcccgctcatcccgcgccgggtcccaggagaagccagctccaaacaaggatgtttaccaactatttgctgagaaggttagggataacaagcagctggaatcaagatgggcaattatgcaagaaactcgtgttgagtatttccgtggaaaagattttactaccttcatgaggaatcatccagaagttagggaaattttagggccagataaagatttagaagtggaagacattgttaacactctgctgagcaagaaccttgtgataaggtgtgaccgagtttggaaaactgtcagaccaggaaagaagaaattgtcatcgtggcctgcacatttggagatacatcgtgaacaagtgttcactgagaatgatggattttttgcttggatgtttctcaaaaggaggaccttgtggcaaacgattctttcatttgtttggcctctctttgctttggcagtttgcttatttccagtttacccataccaatgcaagattgtggtcttgtactcatgtgctggagctttattgttcattgtctctattcttttgttaagagctgctatctttggcatactatgggtactccttgggaaacgtgtgtggttctttccaaatataaatgccgaagagacaacatttagagaacttgttcggttttggcccgagaaggatgagggagagcgaccaaagtggacatcaagactcttctatgccactgttgctgtattggtgatattactgctcaggcaccatgctccagatgaagcagctagggcaaggtaccagaagaaggtttcgaacataattgatgatgttcttgagtggtctccaaagttagctttgtctgggatgatggaaaaacatactgggactaatgcatcagaaactagcaatcacaccagtggaactgggagtagtcctgtccctcccactaatgaagggaataccgcaaaagcagacccagatatggatcgtcagacgaactcagataaagtccaagatggtgatgagtatggtgatgacatgagaacaagatttagtgaacggacggcacgggtgggtggcggagcagccaagcgaggcaggctatccgagatccagcggcggcggctcggcatgcgccacggcggggatgtgggacttggcgaaagggaaggaggcgaggcgacgggagcctcgaccaggggagaggaggccggcggcggggtggccttggccttgggcggcggcacgggcgccttggtgggtggcgcggtggccggagccggggtggtgggtgccgaggcgggggccggggtggcggggggtggtcggcgcggcggcgggcttcttcttggaggagaccggtggtgtggtggtcggctccacccgccgtaccgggaatccatctcggaggagctcctcgagaacattgtctcccgcatctccctctgcgacgtcgtcctcacctcggcgatctctcgttcctggatccaccgcgagcggcggcggccgacagagtcggagcttgcactcgcacgaaggtggcgacaacggtggtggagccaaagctcgcatgagtggctggggtggcgaggcgtggctggatgggcgctccgatcggcgacaggcgctgcgacaaaaggggaaccagtcgatggtgagcggcggtgggtgtggatgggagggtgctccagtcggcagcgcgtcgggtctaggtgtcctcttcctcccctccaggaggcacaactacgaggcgagccactcgacgaaggagccgaggtcagggccaaggaaggcgttggcgtagacggtacagtggtgcggcccgaactgcgccgcctgttggtatttcttacgaccacagataaatccgcaagcccacggaataccgttgtaacacttcaccttcggatgaccccaaaaggatatcgaactcagagaacgtgtgtactctacctaatgctaagactatccaaggataacaactactggcaccgacccttgttggtctgccagtgtggttccggctatagctttatgatgtatccgaacgtggaggattactatgacaggatttag

SEQ ID NO: 71928 - DNA, 489 bp, Oryza sativa
  Clone ID: PAT_MRT4530_72354C.1
atgatgggcaacggtggtgtggtgagggggatggctgaggatgattgggtgactaggcctaaggtagaaagggtggaattagagggctcactgaggaggatacgcagcagcgccggcaatggcggagtggcaatacccatgtttagtcactacgaagaccaattgagagttggagacggcataacagcggaagtcggtgtggtggctgccgaggcagagctcggcgggagaggaaaagcggcgcggcgcggcgagggagcagtggagaagaagcaagaaaatgcagcgggtcggggctttctagctgcacgacagcgcaagaagacaaagaagagaggtggtggcttgggagagatttttctcatggacacggagccgaaggcgcgtcgtgcgtggcacgaagaaggggacaacagcgatttcttgggtgacagatcggatggcggtggagtggggatcactgccttagaaatgattttttttgtatga

SEQ ID NO: 71929 - DNA, 483 bp, Oryza sativa
  Clone ID: PAT_MRT4530_72355C.1
atggctgaggagagggaggttccttttgggggtacccccgggaagagatccagtggagacggggtgggcctgtagctcagaggattagagcacgtggctacgaaccacggtgtcgggggttcgaatccctcctcgcccacagccttccaaaggggaagggcctttactttccccctgagggtaggaaaaccatgatcgggatagcggacgtaaagctattgaacttgggaaaggaaatcaaaaagaaagggggtcgggattccattggatgaatctttaaagaagacaaagcagaggattgggattccattgctgtcattttatatgtatatgttaaaaaaatacgccgtctgggagctttaccaggactcactagaaaaacacctaaatccggaagtaatctgaaaaagaaattccattctgggaaaaaagaacaatatcgtattcgtcttcaagaaaaacagaaattgcgttttcattatg

SEQ ID NO: 71930 - DNA, 215 bp, Oryza sativa
  Clone ID: PAT_MRT4530_72356C.1
aatatgatagacctttttactaggcagaccactcttatacacgatggattaatttcattatcccttttcaaatttcaaggcatcacaccaatcactcttaacttctctccttgttcccataactacccactccctaattaatctataacacacccctttaattccccaataacctttacacatataacccacacttatacagtctcattttatta

SEQ ID NO: 71931 - DNA, 199 bp, Oryza sativa
  Clone ID: PAT_MRT4530_72357C.1
tccgccacgcgttcgaaagctaacaaacttggtgatcaagcatggactagtttcaggtatcagacacatatttgggggaggttctgcggaagaacctgggaaaagggggccccaattacctttatcaatcttgggtgtcacccccaccgaggaaccaccagggctccaagaatgggtccacttcttacctcataaatta

SEQ ID NO: 71932 - DNA, 219 bp, Oryza sativa
  Clone ID: PAT_MRT4530_72358C.1
atggcctcgacggtgacggcggaggggggcctcggcatccgtgaaggcagagtcaccgacggcgccacaagcaggaggacaatgaatgccaggatgagcgtgaagccgatgagcctcggcatcgactacaccattctcgaacaagctgatccgcaaacacgtcgaggagctgcggcaacgggcgcggtggcaacagttccgcggctagccgagatgtag

SEQ ID NO: 71933 - DNA, 324 bp, Oryza sativa
  Clone ID: PAT_MRT4530_72359C.1
atggctcacctcatcagggcacgcgccatccgcgccggcaccatcatccgcgtcctcgactatctcttcatcgactccgacatcaacacaagggtcattatcgtccagcaacttgaattgctgcaaactgagtgtgcactgatcggtactagcaatactcatgcgagcccaaacgcgtacaacatgctccacagcgacatggtggcggccgtgcgtattgcgcacgcatgctgtatgttcctcgacgagctcagcaccacatacctctttcctgcccaccacaacgtcaacggctacgagagggtaaatgatccctctgtgtaa

SEQ ID NO: 71934 - DNA, 212 bp, Oryza sativa
  unsure (1)..(212): unsure at all n locations
  Clone ID: PAT_MRT4530_7235C.1
acggcaaccccgtctcctccgcttcgctactctactcgacgactacggctacggctacggcttccggcgagcggcggcgcgatnccgggcggcgaaggagggggaagnnatgagggagatnctnacatncagngcgggnagcgcgggaaccagatcggcgnnaagnnctgggaggcgatntgcgacgagnatggcgcggacgcgacggngcg

SEQ ID NO: 71935 - DNA, 876 bp, Oryza sativa
  Clone ID: PAT_MRT4530_72360C.1
tcctcctcctgatccatcccgatcccgtgcctaccgccacagccgccattcaacgaccggccgccgccaccatcaccgcctcgtgggcctcgtgggcggtgggcgacagccggtgggggagcccgcgcgccgctgctccgctaccgcatgcacgccacccctcccccgccacctgccccgcaactcctccacccatcatcgtcgcgtcgccagtcgctgccgtcaccgctgctgcgcagcccgtcgccggccgccaacgccctcctcctctcccccctcgcactgccgcaccctccaccattggcaccaccagcatcgtcgtcatcatcgcagcgctccacctcgacggcgtcctccgcttgccgcccctccaccgcctcgtcgcccggtgccgacgccctcctctcccgcctcgcactgtcgccctcgcagcgattctccaccccggctcgcagcgcccgcctcgccgccagcaagctcgccgtaacgcgtgtctcctcctcctgatccgcccccatcctgtgcctaccgccgcggccgccattcgcgatcggccgccaccgtggacgccattcgcaaccggccaccgccgccatcaccgcctcgtgggccccgtggtggtgggcggcggccagtaggggagcccgcgcgccgctcctccctcgctcccgcgcattactccgccgccgcccctcccccgccgctcttccacccaccaccatcgcgtcgcccgttgccgccatcaccgccgccgcgcagcccgtcgccggccgccgacgccctcctcctctcccccctcgcactgccgcagagaagggagatagatagatatatgaggaagggagagaagagggaggagggtgatgacgtgggtca

SEQ ID NO: 71936 - DNA, 408 bp, Oryza sativa
  Clone ID: PAT_MRT4530_72361C.1
atggccggaggaggaggaggaggagccgcgctggcggcggcggcgtgggagatcgccgtcgtcttcgtcctccggcccctcctcgccttcgccttcgtcctctccatcatcgccctcagctggtacgtggcgtggaggacggtgctggtgcacgtcccgctggtgcaggagatcgccgggctccgccggaagaagcccgtcaagcccaagcccaaggagcgcggccgcttcgccaggttctaccggtccctgggcgagagagaatgcgcatttgaattaagggcaatgaacgaggctcaaagtacgcagatgtatatcaaagccaaaaatattaaattgaagaaaagaaacaataaagacttttactcagtacaaaatttcatgaccaagacattgtttcgaacttaa

SEQ ID NO: 71937 - DNA, 1720 bp, Oryza sativa
  Clone ID: PAT_MRT4530_72362C.1
ctaaagcacccaatacatcatttcgctgttgagcttgtacatctcagacctgtgcttcagcatgcggagccctccaccattggcaccaccagcatcgtcgtcatcatcgcagcgctccacctcgacggcggttaacacggcgaacagctcctcgccgtcacggtgatcctcatcggtatggaagaacctggcgatgcagaacttgccgtgtccaaggttcacgaggtatgagctttcaagattgagggcgtcgggcggtgtgaactccagaggaaggcggtgaagcaccggcagcttcgagccgccatcgaggtccagagcggagaggacaaagttcctgctcatgtctctattgctgcgtgagaagccaaaccaaaggccgtgctcatggcaatactcggcgagaccggtaaatggcaacgtccagccggtggccactgtgctccacgcatggctcaccgtgtcaaagcagtagatgccaccgccgtgcgtggacatccagatctccgtgtcaccgacgacggcgtaggagtggacatggagatcggacagcggcggtggcggcggggggagagcgcggcatcgccaatcctcattcaatccatcctcgtagatgagcccatagaagcagccgtcgccgtcgtcgtcgtcatcttcgtggcgcggcatgtcgaggatgtagaggtcgtccccgacggtgacggaggtggtaggcaacctcacctggtagggaagggcgggcatggtgcggacggcgtgctcgccggggtcgtagaggacggtgcggcaggtctggtcgacggcgaccaccgcgttgctgtgattgcctccaaggaggaggaactccatcttctggttcgcaaacaacttggagaagggagggtagaaggtcatggctgggcatggcaggctagcatactccaccgcgtcggcggccgacgccacggatggcaccggggttggacgtggcaggaagaagcgctccatgtcaatgttgcgcagcgtatagttgaaaaccatccgctttaggtccttcggtggttttgaccccggttttatccgacgtggcggctgagtcagcgtgggacccatgtaagcactacatgtcagtgtgagccgtgccatgtcatcaccatccttctcacccttctctcccttcctcatctctctctcccttctgtgcggcaatgcgatgttgccgacgtagacaacgcagcggcagcgggcacggggtagtggcacaaccatgctcagagtggcgcgagacggggagagatggagttttgcctcgtgggcttcatgggcggcaggggagctcgcgcgccgctcctccgcttgccgcccctccaccgcctcgtcgcccggtgccgacgccctcctctcccgcctcgcactgtcgccctcgcagcgacttctccaccccggctcgcagcgcccgcctcgccgccagcaagctcgccgtaacgcgtgtctcctcctcctgatccgcccccatcctgtgcctaccgccgcggccgccattcgcgatcggccgccaccgtggacgccattcgcaaccggccaccgccgccatcaccgcctcgtgggccccgtggtggtgggcggcggccagtaggggagcccgcgcgccgctcctccctcgctcccgcgcattactccgccgccgcccctcccccgccgctcttccacccaccaccatcgcgtcgcccgttgccgccat

SEQ ID NO: 71938 - DNA, 1712 bp, Oryza sativa
  unsure (1)..(1712): unsure at all n locations
  Clone ID: PAT_MRT4530_72363C.1
gttgttgtggtttttttttttttttttttttatcggggttggctcattgcctatatttttggggagatagatggactaaaagttttttttttttttttttttttaatcaaatggagagtatatcttttcttttattcccatatcaaatggtacaaatattaaactgtctaagaacataactcgaatccgtattaaccaagagtaaagaaacaaataaatacaaacaaaatacgcctcttacaacaacatcatttttcaccagcatgtgttcccctccctattagaagaagcccttcacttcagctcacaagcagcagcttcaagtaacaaaagaaaaaaagctcatcacctcatttgctcagttcatggcaggtcctccttcatgccgcggacgaactcctccgagtgttccttggtgacgcagctggcgagcatccgcgtgccgtcgagcggcagcggcgccttgaggatgacgacggaggcgatgaagtcgttgttgacgagcgggccggcgaacttgggcgggccgaagccgtagtccacctcggcgaacccgagcttgctccagtcggagacgtagatggactcgtagttgaacgtcatctggaacgggtcctgctccgtctcctccttggcgaactggaagaactccaccgccatcctctccttcgcctgccggatcatgtccaccacctccatcaccgacgacgacagcaccgtctcgctcggcgctgacatcttcaccgggaagatggagttgccgtagtaccccctgtccagcttcagcaggtggcgcacgctggcgaagaagcagagcttcacggtggcgccgggctcgaggttgagtgccctggtgcggcattgccacagcttcgccgtcagcacgtcgaagccggagcagaacttgccgctgtgcgccttgtactgcgccttcaggccgtcgatgtagccggtggggaagtcgaggacgatgtagtcgagcgccagcaccggcagccccggcagggggccgggcttgatgctcgggttcgggaacttctccctgtcccacaccggcttcaccctcggctccgggagcccccgcgccatgtcgcccaccgcgttgatgaactgagccgcgcccatgccgtccgccgacgcgtggttgaaccggagccccatcacgaacccgccgcaggtgaatttggtgatctgcatcatcatgatggtgttgtggggctcgacgccccagcggtcgtcgccggggtaggggacgaggtcctccttggggaggaggagggggcgctccaggaagcggacgtcctccaggctgcagtcggcggcggcctcggcgaagtagacgccgtcggcggtgcaccggatggcgggggacccggcctcgggctccacgatgcgcccggcgagcgggtagaagaagaccagcgccctggcgagcgcgtcgcggatgacgcccggggccgcgtcggcgcccgaccggaagatgtgcatcgactccaccagcccgcggtgggtcgggtaccggtccacccacgccagcggcagcgtctcctccggcgtcgccgccgccggcttcaccgccccctccgagatcctcgtcaccttgaagctccccgtccccgccatggccgcgtctcccttttttttctttttttctcttttttttttttgagcttttacgattcggtgggtcgacccgggaattnnccggaccg

SEQ ID NO: 71939 - DNA, 871 bp, Oryza sativa
  Clone ID: PAT_MRT4530_72364C.1
aaatcactgtcagggctaagcaacttgcagaaaaggatgttggttgtgtttttgcaaagacaggagaagttaatattgaaaagatcaagtgttcaaagtattttcaagcacttcttcagaaatccaaaggacatgctgctgaacaaatgaagaccactgattgccaagagtccaccattgaagaaggtccgcatgtagaggaaaactcaactgatatggaaaatgagaagcttagcatcagggcttcaaaattagtaatgcaaagaaaactaacatcactgcgtagccataagcccctgaaggcaaatgttgtacaagatgggaatatgttcaaatcagtgagtaacatatctaatgagagtgttgctgtcgaaaatggagtcagaacaaatcatactgataacaagtatactgcttatatggatcttgaagatgatgacagaccccgtggactgttgcagaatgcaaagcgaaagcatgcaggattcagaagcccaatctgcgaacatgcaaattctccattaagtaatgatgaagccgatgcccctgccaatgagtttgtgactgccaggacaaagttggagatggattctgtgcaaaagtatgggcataatggtactcaaggtgcttctgtatccccacaatgtgataacaacccaaataaccggaattatggtgtaaggccaacctggaattctcgtcgtggattacgtggtaattttgttcctcctatcagaaataatggaggatccacttccaatatgacctcacgggtcattggaaaaaatgatgattcaatgggagattcaacaagaaaatggtctgtatttccatcttgacctgatggtgagcttcctgagaagctgagaaa

SEQ ID NO: 71940 - DNA, 355 bp, Oryza sativa
  unsure (1)..(355): unsure at all n locations
  Clone ID: PAT_MRT4530_72365C.1
gtgatggatctagagagtcttttacaagttgcgatacattggatccgaaaactcttagacgttgtgattcattctgtgatcaactaacctgatgtattccttgatgtatctgttcttgagaatttgagatgcgaatctatgttggtgatgatatttgcgattttgacttggggatacagggagcaacttgattcgcaaagagatcagcgcanccgcaactcttcttgatgtgttctctcttgacaattcatcatctgaatctatgtttgtgacgatacttcgattctgattcgcggataaaggtagcagctttatttgggaagagatttgtgtacttccaactcgattcgggaaa

SEQ ID NO: 71941 - DNA, 417 bp, Oryza sativa
  Clone ID: PAT_MRT4530_72366C.1
atgggagttgccacagttgcaggaaaggtggaggaagtgggaagagaggatgatgggcggtgcagtggtgaaggttgtgaggattgggacggcggcgacgatgcacgcagaagtgagctggagtggatgggagtgaataatgatgtgacatttttgcatgttaagcttaaggagttagtagggggatgcggtgagagtggatgggagttgccacagctgcaggaaaggtggaggaagtgggaagagaggatgatgggcggtgcagtggtgaaggttgtgaggattgggacggcggcgacgatgcacgcagaagtgagctggagtggatgggcggcagcgacaggccgagagaggaggggatgggggcgatgggagagtgcgagagacgataaggaatacaccaaatatttaggataa

SEQ ID NO: 71942 - DNA, 412 bp, Oryza sativa
  unsure (1)..(412): unsure at all n locations
  Clone ID: PAT_MRT4530_72367C.1
tggcgccacgcggcgagatctgatcacctaggggcccgacgtccttaagccgtgctccndgtgcagagagtagaagtgcgttgcttgtcgtcgtcgtcgagttcgattcgattcgatttcatgatgcacaagaaagcagaagcagccgcggcctcaaactaagcagcctcgatcgatcgttctccttcttcttttacaaccggtataaggtcttcgtccaccgcgtgcgcggcgcgcctcgackttgtcgggcgcctcgtcgcgccgcttcggttcttggggctgctctaggagtccctgaaggtgcgggaggtggggtagctccggaagargtggaggaagccgccgccgcggggaagctgacgcagcggccggtgcgggcgttamcggaragaaccgatgctctcctama

SEQ ID NO: 71943 - DNA, 249 bp, Oryza sativa
  Clone ID: PAT_MRT4530_72368C.1
ggggaagccatgttcgatccgcctggttttccatttgactgggggggggaatatttaatttgccacctttggttttggggacagaaagcccgaaagggggaagcttcccgttaaaccgggggaccctttttttaaaaaagaggtgcctcctctctggtgtgcgccccccccttaagaaccccccttgtgggggggcccatcccccgtcctttttggcgttggtgcccctccccccttaagggggggggg

SEQ ID NO: 71944 - DNA, 1763 bp, Oryza sativa
  Clone ID: PAT_MRT4530_72369C.1
cccacccaatggggcaacgagcttggatttttattattaaatggctagcttcggtaacttatttagaattttgcagcggcaaaataaaaagtgatagctgaaggaaaatcttggattcatcctaccatccattctcctctactctcctctcctctcctctcctctcctctccggcttactccccccctcaccgcttaccgcgccgcctccgtctctgccgctgccaggctcgggagcggcggatctgccgccgacagcgccggcatccgtctccgcctcttcacggcggcgtctgagccggggcaggtatccctcccattccctcacctcccctctcacctctcctctctcggcgcggattccggccggagcagctgccggagggcggtggcggcggcggctccaggcggttcctgcgcggaaggtggaggcggcggcggtggcggctcccctccctcctcccagatccggtggaggcggcggcggctcccctcccgcccgtgtacctcccgcgccagcccgccgcgcccctgctcctcgcgctcgacatcggctcgcgggttttcctcgctctctcacgcgcgaagtagttcggtcgtggtggagggatggactcgtgggttttttttctttttgttcgcagggactctgataaagctggtgtacacggcgagctgcggtggcggaggcgcggagctgcggtttgccaagttcgagaggcggaggctgcaggagtgttttgacttcgtcagggcgcagggtctcgtcccccctcaccgcttccccagtgtagcatcaccaccatggcgacgcagcggaggcacgcggctgtggcatggacacctactaccgccgccacctctccgggcagcagccgggagtacatgaaggccaaatgcagcatgtaatgcgctgatttaaacacattataaaagctgttctgtaggaggaaaatcattcttgaagattgagtatcatgaattcctacatctagacagtctcgatgttatataaagaactgtataatttgatgaatcggaagcaacaaggaagcatatgcccttttgtcgtttgattggccgcaacactcaggtcaatgtgtgaacggctatttggcatttggctggatttggtggtcagtgacttgtactagtgatgtattatatctggtcagtgaacctgtgatgtaattgaacatgttttggatagtgatttgtggatgtaattaactgacttgtcatgtaacttacttgaggataacatgtgatcttttttttttctgaatttgtgatagcctgttttgtgaatttgtattaaatatgagctgaatgttgttaattgggctgtaagatgaaaagtatgtggatgttaattgggttttgtattggattttaagtgggctaccacccgaccacctggttcaagtcttatgaacgactcgggtagggcccaaatttgttaagagactgaggtgtgtcagcaacatggaaacggatgcaacaaacagcctaatactgaggtgtgtaaggttgttgtaaactgtaacagtttggcagtagttttgattcaaacatgatttttacacagcaagtgtgcacacaggtagttacccagttaacattgctcaccccccccccccccatgttgtatatttatttatttttcctaaaaaaaattttgttggtgtaacttttctcctgttgttctgtatcttgtaaatatggaagcagccgtgataataaacatatatggtgtctttgtat

SEQ ID NO: 71945 - DNA, 1642 bp, Oryza sativa
  Clone ID: PAT_MRT4530_7236C.1
cggcacgaggggcgctgcggcgggtggggaagtccgggggggcccccgcgctccgggaggggacgttcgccaaggtgaagttcgcgcagaacacggagagcggggagagcgtcgccatgaaggtggtcgaccgctcctccatcctcaagcacaagatggcggatcagattaagagagagatatctataatgaagcttgtcaggcatccgaatgtggttagactacacgaagtcttggcaagccggaagaagatatttataatcttggagttcatcactggcggtgaactatttgataaaataattcgtcatggaagactcaatgaagctgatgcacgcagatactttcagcagctcattgatggtgttgatttttgtcacagcaaaggtgtctaccatcgagatttaaagcccgaaaatctcctccttgattcccaaggaaatcttaaaatatcagactttggactcagcgcctggcctgctcagggtggtgcccttttacgtactacctgtggaaccccaaattatgttgccccagaggttctcagtcataaaggatatgatggagcacatgatgatacatggtcatgtggagttattctatatgtggccacgtggggttatcttccatttgatgaagttgatttgactaccctttacgggaagatagagagtgcagaatattcattcccagcttggtttcctaatggtgccaagtcacttattcacagaattcttgaccctaatccagataaaagaatcaggatagaagagatcaggaatgatgaatggtttaagaagaattatgaacctaccagagaaattgaaagtgaagaagtcaatcttgatgatgtcaatgcagcttttgatgatcctgaggaagacgctgaccatactttagatgacgaagcaggacctttgacactcaatgcattcgacctaataattctatctcaaggcttgaaccttgcagcactatttgatcgccgacaggactatgacaagcttcaaaatagatttttatcacgcaaaccagcaaaggttatcatgtcaagcatggaggttgttgctcagtcaatggggtacaagacacacattcgcaattataagatgagggtggaaggtctaaatgcaaataagacaagtcatctcgcagttatgcttgaaatttttgaagttgccccatcgatcttcatgattgaactgcaaagagcagcgggagacacctccgattataacaagtttataaataattactgcagcaaattagacgatatcatttggaattttccaattgagaagagcaaatcaaggatatcgcggctatcgaagcgctagtctgctttgacatccatcatttgtactatgtgtaatctaatgctatgcagcttgagtggtattgggtttgttagtggatgtatttgtagagattgccaattcaattcatctctgatcttttagttataagagatgaccatgtacaaagggccactgaaagttttggcatctcagtttctctgtacaatgtttgcagcgaggtatattaaacagtttgactgaccgccgctccctgctcatcaacacgctttgtagtttgtctcaagatgtattaatttctccctgctccattagcagcttgcatc

SEQ ID NO: 71946 - DNA, 386 bp, Oryza sativa
  Clone ID: PAT_MRT4530_72370C.1
ttgggtggcgaggaggatggggtacctgccgtcgtcgctgggcagcaaggcggcgcacttcgtgtccgacctcaccaccgtcatcctcaacccaatctccgagcgcgagccttcctccccactccccgaggtggacaaagacgaagaaaaatcagaggatgacaaagattctgagcaaaattctgacacccccgatggccctgacacatcttcctttagagcattcttgatctcattcctgtcatcatctggttctagtaatggttccatggagataattcctgatcagaatggggaattgggatacccaactttaacaccaatggggaagtcaaaaaagggaaagtctgggctcctaagtagaggaaaacattccattggaaaaa

SEQ ID NO: 71947 - DNA, 223 bp, Oryza sativa
  Clone ID: PAT_MRT4530_72371C.1
gttttacattaagaaggggggagaagtggaggaggaggtggcgcgcaagggagaggagaggaaggaggaagaggtggtggtggaggagaagagccatcatcttcatcttcagccaggtgaggaggagcttgtcgtcctctcgctcgccggctgcttgcccaaagtttttccattgccagcccttcaccttatccttctcatcttacaattttctatggtggat

SEQ ID NO: 71948 - DNA, 698 bp, Oryza sativa
  Clone ID: PAT_MRT4530_72372C.1
atcgccgccgcgtcggagctgacgaggtaggcgtcggcgcccaggtcgtccatggcctcgccgcgcttcctcgccgacgagctgatcaccgtcacgtggtgccccatcgacttggccaccttcacgcccatgtgccccacgccgccgagccccaggacgccgccgcggagacctggcgacatcagcccgaagtgcttcagtgggctgtacaccgtcagcccggcgcacagcagcggcgccgcctgctccggcgctagccccgccgggatcttcaccacaaacctgcacacaaattcattactttttttactagtttcttaccatctcactaaccaaatattttaatctttttaagacgtgacaactttcagattaggcaggtggatcaaaaatcacgggatgttttggtttgatgccagaatttgccctatcaaatagttggcactttaaatagtaccatgtatatgtttgtaatgatgtcaaaatttaccaaaggtaatacaactcttagagcaggtacaatagcaggctaatagcctgcttacctaatattttaacatatatgatagagagagggaaagcagagagagcaaagcggacgacaatccagtcaccggctcaagcacgagcgcctaggcgctctggccccctgcagctcgggacaaccaatcgaaaattagaacttgaacatgcagaag

SEQ ID NO: 71949 - DNA, 216 bp, Oryza sativa
  Clone ID: PAT_MRT4530_72373C.1
atgagaggcacagtgtcggatggcgaggccacggggcgggcaggcccaagtcattgtttatgccagaaggaaccgggcatggggcgctatgcggggaatggcggaggattggggaggcttccggaaaaggaaagggtggtggcttcgggcggcgcggccggcccagaacagtactccactggctgtagcagcagcaggcggccggccgcgcggtga

SEQ ID NO: 71950 - DNA, 391 bp, Oryza sativa
  Clone ID: PAT_MRT4530_72374C.1
ctagcaattattatctagactattttagatcagagtaaagtgcacatacggtccttacaagccggcagcggcgagctgtccatcgtcttccccgtcgttggcggcgaggcgccaccaccggccgcctcctcctaccactcttttcgctttgcccccgccgcctacactggcccgccgcccgcccgatccgccgcccaccgccgggctagcgccttcccacggccatccctctaaagccgaccctaattcgtcagctctctaccgaagtttgggttcgccggcgccggagaagaaaaggtggtcgccggagttggagaagaagagcacgaatcgtgaagcacatccagtgatccaaaaattgcaagatttgagattggattttctgtcgaca

SEQ ID NO: 71951 - DNA, 1229 bp, Oryza sativa
  Clone ID: PAT_MRT4530_72375C.1
atggctggcctaaaggttaattaccacaagagtgagatttttaccttgggtctgtctgacaatgatactaacagagttgccatgatgtttaattgtccggtgggtcagttcccaataaagtaccttggtttacctattggccctgacaaaatcctaaaccttggttttgatttcctgggccaaaaacttgagaagagattgaattcttgggggaataatctgtcccatgctggaagagctgttcaaattaatgcctgtctctcttcaatcccttcctatgccatgggtttctaccaacttcctgagggagtccaccaaaaatttgatagcattagagggagatattattgggctggaaacaaactgaaggggaaataccatatgtggagaaaactctttcgttctgaggaagaatgcaagctggacgcgctggtggaaaggatccgccagcgcgtctgggccaacgacggcgagatccgccagcgcgtcgaccaggacgcggacatcgccgccgaggccggcgccaacgcgcgctggaccatcctatcgctcgctcccagctgcagggagacatggacggggttctccatggatgcgttcagggagctccggcgattcaccgagcttgccataccatcggccatgatggtttggagtggtttggattattccagcatggagtggtggtcatttgaattagttgtgctgctctctgggcttcttcccaatcctaagcttgaaacctcagcgttgtcaatatgtctcaacaccggttctctgatgtttatggtgccatttggtctctgcactgccatcagaaaatccaacctcaaatcttgcaaattttggatcactggatgtggttcacgattcgtgctcttcttctccaactccggcaaccacctcttcttctccggcaccggcgaacccaaactccggtagagggccgacgaattagggtcggctttagaggaatggccgtgggaggcggcagcccggcggtgggcggcgcatcgggcgggcggcgaggcggcggcggcgccgccgaagccgcagggtcaggagcaggcggcgggagcaaagcggaaagagtggtaggaggaggcggccggtggtggcaccccgccgccggcgacggggaagacgacggacagctcgccgctgccggcttgtttagtcccggttcgtattaccaaccgggactaaagatcggtcagccacgtggccgg

SEQ ID NO: 71952 - DNA, 431 bp, Oryza sativa
  unsure (1)..(431): unsure at all n locations
  Clone ID: PAT_MRT4530_72376C.1
gctccccttccctgcacgcaggcgctgttggatttggatcgagagccgtcgtccttggatcaaagtcttcgcctcactgccgtcgtcgggcagtggagaagaggagatccagtgtatatgcactgctacagctgtcccaccgcctacggtaccacgtcacgtcaggtggaggaggaaccaaggccatccctcaacacctcaggcacctcatgagttcgactcccacagtgcacgccgccacgtcaggtagaggaggtggtgcttgcgtgtgaatgcnnggtcggtggtgatggcacattgcttggacaccgccatggccccgccctctctacttggtacttgcngtntatggcgatgttgccggntcttgcgcctcttcccgntggntgaccttgtcntgttctggagtttcgggggtgttcctccccttc

SEQ ID NO: 71953 - DNA, 351 bp, Oryza sativa
  Clone ID: PAT_MRT4530_72377C.1
atggattgggtggcggcaacatgttctgcacagtgcgaggctaaagcgaagaacggggcagtaacatcgacagggcaaggctgccggacaaaccctctggccgtccacgccttccgcgtgacagggccgcgggggtggcggcagcagcagaagctgaggctccggggatggcagcgcatcggcgaagcaaatcggcagggcgagaccagcgaggagggcgacattgaaccatcggtggagatcggtagttggcaagaggaggtgatgatgcttgagatcagtggcggtgagacagtgatggggatggggagcagcacgagggatgtggatgaccaggtagccagctgctaa

SEQ ID NO: 71954 - DNA, 2028 bp, Oryza sativa
  Clone ID: PAT_MRT4530_72378C.1
atgatccgcttgtttgcttccttcccaaaactcattccactcttggctgtcttcatcttctcgtgttccctgccaatagcgatcagtgatgacactgatactgatagaggagccctgctctgcttcaagtctcaaatctctgatcctaatggagccttaaggtcttggagcaatacatccctggacttctgcaactggcagggtgtttcatgcaacaatacacagacccaaatccgagtcatgggactaaacatcagctccaaaggactcagtggctcaataccaccttgcatcggcaatctgagctccattgcaagcctcgacttatcaaacaacgcctttcttgggaaaataccagctgagctcgggcacttgggacaaatcagctacctcaacctgagcatcaactctcttgaaggccacattccagatgaactgtctttgtgcagcaaactcaaggtactcagcttatgcaacaactccctccaaggtgagataccaccaagcttaacacaatgcactcacctccagcaagttgtgctttgcaataataagctccaaggcagaattcccaccaaatttgggatgctgcatgaattgaaaactttggatctctccaacaacgccctcacaggtgacataccaccattgttgggcagtagcccatcttttgtatatgttgatcttgggggcaatcagctcacaggaggaatcccggagttcttggcaaatagctcatcccttcaagtgcttagtctcaagcaaaataatcttacaggggggatcccactagccctcttcaacagctccacgttgacaaccatttaccttaaccgtaacaacttagtgggttccataccaccagttacagcaattgctgcacctcttcaattccttagtctagccctgaataaactcagaggagggataccagcctcactgggcaacctttcttccctggttcgtctttctctagcagtaaataacctggtggggagcatccctgggagcctaagtgaactccgaaaactagagaggttaattcttacatataacaacttgtctggtcctgtgccccagtcaattttcaacatgtcatctttgcaatatcttgaaatggccaataactctctcatcagccaactaccaccagatattggtaacaggcttccaaacctacaaagcttgatcctatcaatgacacatctaagtgggccaatcccagcttctcttgctaatatgtctaagctagaaatgatttatcttgttgctactgggctcaccggggtagtgccgtcctttgggttattgccaaacttgagagatcttgatctggcatacaaccatcttgaagcaggtgactggagcttcctctcatcccttgcaaactgcacccaactgaaaaaattatgcttggatggtaacagtctcgaaggaagtttgcctagctcggttggtaatcttgccccacagcttgagtggttgtggctcaagcaaaacaaaatttatgggacaattccctcggagattggtaaccttaggagtctcactattctgtatatggataacaatctgttcagtggtcacatcccaccttccataggaaatcttagtaatttacaagctctaagctttgcactaaatgatctctttggacaaattccagattccattggcaaccttgcccaactaatcgagtttcatatagatgggaacaactttagtgggagtataccatcaagtttatggcactggaagcatttagagaagcttgatatctctgacaattcatttttcggatatattccacctgcagtaggaaatctgagcagcatacgcgatctaatatttgcaagaaataatttctttggacatattccatctaccgtaggaaatttgagcaacctctctattctaagctttgcacagaataatctctttggacatattccagagttcgttggcaatcttgtcaaactaaccaatctttttctacatggcaacagcttcagtggaagcataccttaa

SEQ ID NO: 71955 - DNA, 137 bp, Oryza sativa
  Clone ID: PAT_MRT4530_72379C.1
aattattcatggttggggtttgaagagtatctaggttcatgcaccccagcaacggggtgatccttcttgctttggggcaagccagttaagcctagtgctgggcggtggcaaaatgctgaattggtaaagcttaaccc

SEQ ID NO: 71956 - DNA, 933 bp, Oryza sativa
  Clone ID: PAT_MRT4530_7237C.1
atgacggcattccaggctttccagccgcctgcacggaagaggacgctggcggcggaactgaggaacgaccccgcggcgaacgagggagcggagatgatgagctggatgggaacatttcgcctcctgcgcgcgaatcacagacctccgccgctccctcggtgcagagcaccgcgaccatcggctacccgcaatggagcatcggctttcgcgggaggcgaaggcaggaaaaggagggagaggaggctagcgagtttgggagggagggggaggcggccagggagcccatccgagggcgatgcagggctctccgaggggtatgcatcgacgagcttgacgaggtcgtggcgaggcagggctccctgcggtcgagctacagcgagcgcgtacctgcgactgggatggtcgtgctcggtggtggcggcaacccagaaggacgggaccggcgaccgcagggctctccacggtgatggtgccgcttgccaggtcgcccagccacccggtcatcactggcatcaggtcctcgtactcctcgccggagatgcttctggagaggggaagggcggcggccggccgcctcgactcatcttatcccgagcagcacagacggtgagagagaggagacgaggcgaaggtggcggccggcggtgcgaaccagccatcgtccgtctcgacctcgccggccgcccagtcctcgtcctcagctccgccgtgctcgcccattcccacgcctcccttcttctcgctcttgttttcgatgtcgcgggccgcgccgtcctcggtctcaacctacccacgccccgcctcgacctcgtcggtcgcgctgtactccgcctccgcctcatgcgccccgctaccgccgccgcgctcgcccgctcctcccgcagcccgccacccgtcgaccgctgccacgctcgcttgccgccagcctcctag

SEQ ID NO: 71957 - DNA, 399 bp, Oryza sativa
  Clone ID: PAT_MRT4530_72380C.1
atggagtccaacgccgccagatcgatccggccggcatgggtgccaccgccgtcgatccccatcgcgtacgtctctcaggcatgcatggcgccgtcgcaccatggatttgcctcagattattatattgccgctgctcaccgccaccgctactggaggcagctgcagctcgtcgtgcatccaccgcttctgatcactagagacgagtttcgtcgtggatgcacaccgacgctgttgctggctagagtcgacgccaagatgcgaaccgacgctgtacagaggcaggacgtggttaaggcggaggtggagcgggcagccggcagcggaggcggagctcgccagggtagccgatggcggaggcggaaggcgctctccgacctcttggtcctcatcgacaaatga

SEQ ID NO: 71958 - DNA, 1437 bp, Oryza sativa
  Clone ID: PAT_MRT4530_72381C.1
atggcgagggcggcggcacggtcaccagtggcgatcggcggagcggaaggcggtggcgcatgcccgaagcagcggcgcacatgggagagggagaagaaaggagggggagggggttttccccggcgagcatggcggccggagcgggagatgaaggcggcagcgacgacccaccgacgcgaaggggcggacaggcgccgacgacacctaaggagagagcggagagggattagtagtggagaggacgaccacgacggcttgcatcgctggccagagatggagaaaaatggcgggctcaccggaggacgagggaaatggggttttggtggggttccggcgacgggaggcggcggccgaggatcaaaccgactggcacgcccatatctcatcaatttttggacctggactggagctaagcagatctcccaggtcgttgtgttcatcgacttagttcgcgccaacacagttccgacaccatcggctgagcgtggatttttcgtcaacaagttcatgtttgattgtatcagtgagggtggtgtagccaaggagtctattgttattgatgtagctggagatgattctccatctgatgatgatgctgaggctagggagatagagagacattacaaagaggtcaagaggaagatgaagactagaaaggcttataacctgaatgatgtggtgtttgaggggtacagaagtcttcttgctatgcatggtagggctaaaccagatgaaaatagcaccccctacgctgagaatgatgatgaggagtcatttgatgagattggcagtgatggtgaggttattagaagaaagagcaaattgagggaaagtctagttggccagaggatggtgccagggaagcctaggagtaaaaggagaagggagctcaatgaactagctaaaccaaaaaaggtttctaagtttggaacaactatcaggtgcaggacctataagaaatctgggcataacaaatcaagctgtcacaagtacactgatgcaggaactagcacaacagcttctcggcacactaccaatgctgccaatgcatccaacaactcagtacctagcagcattggccaaagcaggaaaagaaaggcagttgaactcagtactagcacatctgcttgccagacttggaggagatcacctcctgtgaaaaaggcaccaaacaaaaccaacccaatggtgaaggtagcagccagtgcaagggtattaacccgacaaggtggttcagccagtgtgaatcttcaggccatagtgccacattctcagagctctagaactgctttagtgaggatcacttctggaaaagcatgtgtgtttgttcaagttcaagaacctgctagtgccaagacaaagaaatcaacccctagtcgactgatgtttcttttccatgggaatctgataagatgtgatgtatttctgcacacttga

SEQ ID NO: 71959 - DNA, 2676 bp, Oryza sativa
  Clone ID: PAT_MRT4530_72382C.1
aggttattactgaaaatgtatacattttgaaaatctacagaacaatacctactgtatattcaccagctcattgacaaaaattgctttgttagatttcatgacgccgtgtgctttgtgcaagaccgtaacatagaagcagtgataggccttgacgacttaagctcgtcatcatcctccaataatatactgtttgtttgctctcttatctattcttcatctcgcaagtctttctcacaaaggcaccataatttgggtcacttatgtggttctcacttagccactcttgtcaaccaaggtgtttttggtcatgtttctattgacactacctttgcttgcaaaggttgcaaaattggcaaacaaatgcaacttccatatcctttaaacaaatcaactcggccttttgatttggttcactcttatgtttgggcgaaggttccctttccttctaaagaagaccacatctactatgttattctcattgatgattattctagatatacatgggtctatttcatgaaacaccgttcccagccttttttttatatatcaatcctttgcccaaatgattcatacacaattttctagtccaactcgtatttttagcttagattaaggaggagagtataactcaaacgcttttttcaatttctgatatctcaaggcacccttccttagctttcttgtcctggtgctcatgtttagaatggtattgctgggcgtaaacatcatcacatcattgagaacactagaacccttcccaatgcatcttttgttccagctcatttcttggaagaggctatttctacaactatgtacctcatcaacatacaacaatcttcttctcttcaaggcaagcctcctagagaggtgttgtttggatctcctcctcactatgaccacattaatttttttttatttcctatgccttgtatgcacctcgtaggcacaccatgttgattgcccaattggttgagtgtgtctttcttggttattgtctcaagcataaaagctatcattgctataatccttttgaacgttgtatccctatctcctgagatattacttttgatgaaaataaacccttcttttattctgctactagtcaaacttcttctcttacaaattctatttcctttctctacgctgttggtgctgttcttgagccatcgacttatcaggaggcaatagctctgccttagtggcaattggctatgtaaggggaacttgatacactagagcatactagcacatgggatcatgtgcccttgtcatctcatgctattcctatcacctataagtgggtgtacaaactcaagatcaagtctgatggttcagtggagggatataaagcccgtctagtagctagaggtttccagcagactcatggccaatattatgatgagaaatttactcctgttgctcatatgactactttgcgcactttaattgttgtgacaacatctcgttcttatactatcttacaaatagaagtcaagaatgcttttctttatggagaccttcacaaggtctacatgcaaccaccttcgggggtgtggaagctccacctgggtacgtgtgccaccttcatcgttcattgtatggtctcaagtaggatcctcatgtgatatgtgctgctagcttccgtcttagcgaccattgctttgttcattcacacatctgaatgtggacttaccctactcttgcaatatgtagtcatgtagatgacatattgattactggcgatgatttagattaatttctttcgtaaaagggatactcaatcatcagtttatgacgtctgatctaggctcactcaactattttcttgggattgaagtcgcatctactgctgatggttactacatttctcaacgacgttatattgaggatctccttactcagttaggtctcactaatactagaacggccacaactcctatggaattgaatgttcacattcgttcgatagatggtacacttcttgatgatcctttccgatattgacatcttgtcggaagtcttgtctaccgtaccatcactaggctagatattgcttatactattcatatcttgagtcaatttgttggtgctcccaccttagtccattatgaccacttacttcatgtcttacgctacttgaagggtattgtaacttatcgcttattctatgcgaaggctactccgcttcaacttcgtgcattctcggaccccacttgagcaagtgatcctgctgatcgtcgatctgtcactggctattgcatttttcttggcacttctatccttacttggaagtccaagaaacaagcacccgtatcatgatctagtactatggcaaaacttcgagctcttgtgaccaccactttagagattgtctgtttgggttgacttttggctgattttggtgtcttttgtgaattgtcatgcacccacaactctcctatgcgacaacattggggcaatccaaatctccaattatccggtgaacatgagttcttctttcacatcttctgattgtcaacaatacaccattgctctccaatatatgtcatctgagctacaaatcgctaccaaggctcaaattcgagagcatcatcggttgcatctcctcaaactcaatgtgttcgatccaccttgagtatgatgggggagggggtgttagatatatagatacacact

SEQ ID NO: 71960 - DNA, 507 bp, Oryza sativa
  unsure (1)..(507): unsure at all n locations
  Clone ID: PAT_MRT4530_72383C.1
nnnnnnnnnnnnnnnnnnnatgaaaaactcctcataacctgctttgaattgcccatcacatgacaagaacacacctgcagaagaacaagcatcggacgctaccttaaatatatcattcgtttgagaaatcaataagctagaatataacaatggcgagtgtcagtgataattgaacagcatcaggtatgaaataatcaccaagtgggaacggcgcgatccgccggattcggcgacggcgttgagagggtactggacaatgcccagggagaccctcggcaatggcggccataggccgcttcttgcacgacagcgagaacccatgcttcttgacgagcaccttaaaaatggcacgcagggagttgcattggcagtgcgccgtcacctccgtcagctggtggcagcacaaggcccggacccccgggggggaggcgacagcgaaccgccaaaaagggacgcccatgaacggcggcggggtggcatggggaccacggcatggcccgggttgga

SEQ ID NO: 71961 - DNA, 258 bp, Oryza sativa
  Clone ID: PAT_MRT4530_72384C.1
atggcgatggcgagcgagagggtttatgtagggggatccgatgcgcgcgggggaggaggggagccggtcgacggcgcgaacttcgtgtttgtttgcgtggtggttgggcaggggagagcgcgtgagcgtgaaggtccagccggcagccggagcagcagcggcggcggcggcggtggcgaggcggcacgccccgtatcagctgatgggctagaaaaaaaactggaggttggagaggcccgcgagagtgacgggctatag

SEQ ID NO: 71962 - DNA, 1616 bp, Oryza sativa
  Clone ID: PAT_MRT4530_72385C.1
ttttagatagatcgccgccgccgccgtcgtctccgcccctctccagccaccagatccagcgaccatggggcagggcaccccgggaggcatgggcaagcagggcggtgcccccggcgaccgcaagcctggcggcgacggcgacaagaaggaccgcaagttcgagccccccgccgccccctcccgcgtcggccgcaagcagcgcaagcagaagggccccgaggcggccgctcgcctccccaacgtcgcccctctctccaagtgccgcctccgcctcctcaagctcgagcgggtcaaggactacctcctcatggaggaggagttcgtcgccgcccaggagcgcctccgccccaccgaggacaagaccgaggaggaccgatccaaggtcgacgacctccgcggcacccccatgagcgtcggatccctcgaggagatcatcgacgagagccatgccatcgtctcctcctccgtcggccccgagtactacgtcggcatcctctccttcgtcgacaaggaccagctcgagcccggctgctccatcctcatgcacaacaaggttctgtctgtggtcggaattttgcaagatgaagttgatcctatggtttctgtgatgaaagtggagaaagctccgctggaatcctatgctgacattggtgggctagatgctcagatccaagaaatcaaagaggcagttgagcttcctttgacccatcctgagctatatgaagacattggcatcaggccacccaagggagtcatattatacggagaacctggaacagggaagacactacttgccaaggctgttgctaactccacatccgcaactttcttgcgtgttgttggaagtgagcttattcaaaagtatcttggtgatggtcccaaactagtcagggaactgttcagagttgctgatgagctttctccttcgatagtctttatcgatgagattgatgctgttggaacaaagaggtacgatgctcattcaggaggggagcgtgagattcagagaactatgttggagcttcttaaccagttagatggttttgactctcgtggtgatgtcaaagttatactagcaacaaatcgcatcgaaagtcttgatccagcattgctacgccctggtcgcatagatcggaagatagaatttcctctgccagatattaaaactaggcggcgcatcttccagatacacacatctaagatgacattggcagatgatgtgaacctggaagagtttgtcatgaccaaggatgagttttccggtgctgatatcaaagcaatatgtactgaagctggacttcttgctttgagagaacgccgaatgaaggtgacacatgctgacttcaagaaggcaaaggagaaggtgatgttcaagaagaaggaaggtgtgccggagggtctttacatgtgatgtgctcactggtcgccagtgacggggtgggtaaccttgtaggacgaatatatatttgatttatcacataggctatgctgccttggtttgtaaaatacttgtgaaatttgttttgttacttcttgggatggagttggatagaacaaattgcatttctcatgatttgccttctcaagtactgcactgaataatgaactgtggctaa

SEQ ID NO: 71963 - DNA, 1681 bp, Oryza sativa
  Clone ID: PAT_MRT4530_72386C.1
atggggcagggcaccccgggaggcatgggcaagcagggcggcgcccccggcgaccgcaagcctggcggcgacggcgacaagaaggaccgcaagttcgagccccccgccgccccctcccgcgtcggccgcaagcagcgcaagcagaagggccccgaggcggccgctcgcctccccaacgtcgcccctctctccaagtgccgcctccgcctcctcaagctcgagcgggtcaaggactacctcctcatggaggaggagttcgtcgccgcccaggagcgcctccgccccaccgaggacaagaccgaggaggaccgatccaaggtcgacgacctccgcggcacccccatgagcgtcggatccctcgaggagatcatcgacgagagccatgccatcgtctcctcctccgtcggccccgagtactacgtcggcatcctctccttcgtcgacaaggaccagctcgagcccggctgctccatcctcatgcacaacaagatggctgtcagatgccaatgcttgtataaggctgcttttcaggttctgtctgtggtcggaattttgcaagatgaagttgatcctatggtttctgtgatgaaagtggagaaagctccgctggaatcctatgctgacattggtgggctagatgctcagatccaagaaatcaaagaggcagttgagcttcctttgacccatcctgagctatatgaagacattggcatcaggccacccaagggagtcatattatacggagaacctggaacagggaagacactacttgccaaggctgttgctaactccacatccgcaactttcttgcgtgttgttggaagtgagcttattcaaaagtatcttggtgatggtcccaaactagtcagggaactgttcagagttgctgatgagctttctccctcaatagtctttatcgatgagattgatgctgttggaacaaagaggtacgatgctcattcaggaggggagcgtgagattcagagaactatgttggagcttcttaaccagttagatggttttgactctcgtggtgatgtcaaagttatactagcaacaaatcgcatcgaaagtcttgatccagcattgctacgccctggtcgcatagatcggaagatagaatttcctctgccagatattaaaactaggcggcgcatcttccagatacacacatctaagatgacattggcagatgatgttaacctagaagagtttgtgatgaccaaggatgagttttctggtgctgacatcaaagcaatatgtacggaggccggattgctcgctttaagggagcgcagaatgaaggtgacacatgccgatttcaagaaggccaaagagaaggtcatgttcaagaagaaggaaggtgtaccggaagggctttatatgtgagacatccaccactcatcagcaccagaattacctccaggacacggttaagtgtaatagagaactggtagagctggtgtttggttcaatgttcggagaatgtttgcttacacccttcttattcagcaatgtcgaactaaagaaccccctgaacaatgtatggctaccaggaatgcatgcagttacggttcaatgttaaatgctttttgatcaaacatgggattcctgattgtttgaacagatgcagttctgattatggaccggttgtcaaattgcactttttgattaaggcgaa

SEQ ID NO: 71964 - DNA, 255 bp, Oryza sativa
  Clone ID: PAT_MRT4530_72387C.1
actgtttgtcagaggaagaagctgtgtctgtgtgtttgtctgtcagagagacagtgcgctgggggcgcgggcgctgccgtcgacagagcggccgggtggggaagatgagaccgaggatgacgccgtgatggacgggcggatcccgctgacgccggcgagcggaggggggcgggggcaccaccggcgggcgcactcggagacgttcctgcggctgcccgacgcggacctactcctcgacccggagggggacttttt

SEQ ID NO: 71965 - DNA, 189 bp, Oryza sativa
  Clone ID: PAT_MRT4530_72388C.1
atggctgagcgagcttgcgcgcgcggccgagctgggtaccgggcggagaaagcgaggcggcagtcagccgacgagctcgcatgggcgcacgcgccgctcgcgctgccggcagctggaggcgacagtccagcgccgtcgtgcgctgatctggccccctcgcggccagatcggatggaggggcgccggtga

SEQ ID NO: 71966 - DNA, 1518 bp, Oryza sativa
  Clone ID: PAT_MRT4530_72389C.1
atggagtggccatggccactttatacaaatatgagtccgaactctgaagaaggtatcatctcccaaacaatctcaagctcaagctcaagctcatgccactaccagtgcattgccacgctcagtggcaactcctcctacgtctccggcctcgccgtcgacggcgactcgctctacgtcgcctcgtcggacggccacatcaggctgtggccgctggacatggccatggccatggtgcgagaggagtcgacgtcgtcgtcgtcgcagggcgaggtgtccagatccaccgtcgccgtcaccggtagcccggtgaagtgcctcgccgccaccggcgatgggcttgtcagctcgcaccaggacggcacgataagggtgtggcggcacgccggcggccgccgccgcctcgcgctgcgcgccgtgctgccgacggcggcggactgcctccgcgcgctcctgctcccgggcggcggctacgtcgaggtgcggcggcacaagaggcgggcgtgggtgcaccacgtcgacgcggtcaccgcgctcgcgctgtccccggacggcgagagcatgtactccgtgtcgtgggaccggagcctcaaggcgtggcgtctgcccggactccggtgcgcggagtccgtggcggcggcgcacgacgacgccatcaacgccgtcgtcgccgcgcccgacgggcacgtgtacacggcgtcggcggacgggacggtcaaggcgtggaggcgccgcacggggcagaagaagctctcgctggtctgcgtcatggagcgccacggcgccgcggtgaacgcgctggcgctcggcggcggcgggcgggtgctctactccggcgcgtgcgaccggtccgtcgtcgcgtgggagaactccgccggcgccggcgccggtggcgcggacgtgcgcatggtggctaccgccacgctcaggggccacgcgagggcggtgctgtgcctcgccgccgacggcgacgtggtgtgcagcgggtcggcggacaggacggtgagggtgtggaggcggggagcgacggcggcgtacacctgcttggccgtgctcgacggccatggcggcgccgtgaagagcttggcattggcgaggggaggagcaggatgcgatcgctgctgcgcgtgccacgtggaggagagctcgagctgcagctgcgctgctctcgtttgcagtggctcgttggactgtgacgtcaagctttggagagtgacggtttccgaagctattaaaggctcaaaggtgcaccatgttggaaggttgctgggccttattttccacttgtttgtatggctttcaaactttgttgagttcaagggtgcggggtacatctacataaaaggtatcaggtctactggtctatggtatcagtccaaacaatctaggtaccaagaagtcgatacccaggcgttaggtacctatgggtatcaggccttcgcgctaatgagagcaacaaggagaagggaaatgagacagggcaagcacagagatgagatggctacccttcttacaaactga

SEQ ID NO: 71967 - DNA, 187 bp, Oryza sativa
  Clone ID: PAT_MRT4530_7238C.1
ctcgcctcgatctcgctcgcgggcgggcggagggatcgcgaccgggatcgggatccggggcgcgcgaagatgagcgtgttctacatccttgcgcggagggactccatctgcaaggatgaccacaagctcgacctcaaggaggctcaactgcgcgtacgtcaagcgcgaggaccccttcgaccgcctg

SEQ ID NO: 71968 - DNA, 1716 bp, Oryza sativa
  Clone ID: PAT_MRT4530_72390C.1
atgaggaatttgattgctctaggagtaactgatgtggtgtggtcgattttgataggaaattgctatgcatacagctcaattgtccgactcatgcccaggtcccacccaccgccgccgccgccgcgcctctctccaaggctcgtcgacgccaccgtctcccgatgtccctccgacgccctcgccatcaccttcttcctctggtgcgcccgctgccccgcctacttccaccctccctcctccttcgaccgcctcctccccgctgccgcccgcctcgcctcccgcctccgcaccgcccccgccatccttcaccagctccgcgccctcggctgccccatccgcccccacaccttcctcctcttgctcaggctctactggcgcgggggcatctacccgctcgtgctccagctgttcgaccaaatgcccctctggggcttccaccccaacgccttcgctcgcaacgtcgtccttgacgtcctcctcaggacgcgccaccaccactccgcgctctgcttcctacgggacaatccctcgcccaactaccttacctacgccatcctcctcacccacctttgcaggtccgggaactggccaggggtgcgggcctgcttcttagccatgctgcaccagggttttctccccagcgccgcctctctcaatgcggtttttgcctgctgcactaaacttgctgccacgtccgagctactgcagcttctgggcttcacacttgtatcgggatatcagctcacttcggccatgtggacatgtctcatcgctcgtttgtgccgcgagggaaaactagatgaggctatcaggatgctggcaaagatgctggcttctggttctcctcccacagttgtcacctacacgccgatcgtcagagctctctatcgtgctggaaggcatgacattgccactgagcttttcgcatccatgtcatccaccaattgcagcccagatcttgttctccataatgttctcatggactgcatgaccaaggataagagatatgatgcagccctaggcgtttacttaaatcttcacgagagccagatgaagccagatgcatacactttatctactttagtccgcgcgttgcatttgtcacggaatgtaagccttcttcctaggttatttctggactcagctgatatcccttatgatctcgtggcctgcaattctgtgctgaatgctctgcgcaaatctggatttccatctcaagccgtgcagttcttcatcaatatgattaagtgtgacatcaggcctgacagctacagttatgttggtcttttggacagtctgtgccagttgggaaggattgaccatgcaatcaatgtctaccacagtattgtttcaagtgatcctgattcaaacgcttatgttcatgctgcaatcctctgtggccttgttaaaaagggccacaaccgtatggcgctaatgattttgaatgaggctcaagctgaaattgctttatcagagttgatccaatcctctccggaggaggctctacatgactacatccttggagtccttgcacctgatccaccttttagtgatgaaatatttaagggtacaaaacctaagccgttgcggtcaactaactcccgcatcggggaagaagatggcgagggagtgaatgggggagaagaagggcctacccgggaagctccgccaaccaccgactacccgatctgccaccaacggccaccgccgacttaa

SEQ ID NO: 71969 - DNA, 287 bp, Oryza sativa
  Clone ID: PAT_MRT4530_72391C.1
ttgtttggttgaaaacgctatcaatgtccagccaaatattctggatggcattaatattgtccttccccaattcctgggcatttttcacacaatgcaggagaggtgcatgaaatcattacaggcgctcacttcatctggaccgaatgatagtggatatacccaactttagaaagatttctcagaggtgttggatcttgtaatcgattccaatattacttttgtaactctttgtctacgcttatcaacctgctgccttattatctcgttctttttttgtgaatagctaa

SEQ ID NO: 71970 - DNA, 1876 bp, Oryza sativa
  Clone ID: PAT_MRT4530_72392C.1
ggtgaagtcagtggagcgaggtgggcgtgaacgcgtgagccaccggagtcgaggaatggggccgtccagaagcttccagaaccttcttctcctcctcctccccctcgcgctggccctgtgctccgccgcggccagcggggaggcttcgagaaggttctgggtcgagaacgacaccttctggaaggatggcgccccgttccagatcgtcggcggcgacgttcactacttccgcattgtccctgagtactggaaagatcgccttttaagggcaaaggcgctgggcttgaacacaattcagacatatgttccttggaatctgcatgagccaaaaccgctgagctgggaattcaagggtttcacagatattgaatcatatttaagacttgctcatgaattagatatgctggtcatgcttcgtgtaggtccatatatttgtggagaatgggacttggggggatttccaccttggttactgaccatagaaccaaccatcgaactgcgttcttcagattcaacctatctttccttgtcattgccgtttatcaccacaaattgcatacttagggtaggaaacagtagaaggtatacaactgatggtggtgccattggaaatctaaagaatggaacaattcttcaggatgatgttttcgctgctgttgattttgatactggttccaatccatggccaatatttcaactacagaaggaatacaacttgccaggaaaatcagctcctttaagctcatggctcatggtgggactaattttgggttttacaatggtgcaaatactggtcaaaatgaatctgactacaaggcagacctcacttcatatgactatgatgcaccaattagggagtatggggacgtgcataatgcaaaatacaaagtggtatcaagcagcactaagaagagttatacatgaatgcactggcattcctcttctccaacttccttccaaaattgaaagagctagttatgggcttgtagaagtacagaaggtcgcttctttgtttgatgtcattcataacatcagtgatgctctgaaagtggctttttcagagcagcctctatccatggaactgatgggccagatgtttggttttctactgtacacatcagaatatcaagaaaaacattcatccagcatcctatcaattccaaaggttttcaactcatccttcgttccgtgggtacatgacagagctcaagtgtttgtgtcctgctcacacggtgatgtcagaaaaccgagatatgttggcatagttgaaagatggtcgagtaaaacactacaaataccaagcttaagctgctcatctaatgtcagcttatatatcctggtagaaaacatgggtcgagtaaattatggaccatatatttttgaccagaagggcatactatcttctgttgaaatagatggcattattctccgtcactggaaaatgcatccggtttcacttaatgcggtgggcaacctttcaaaacttcaactaatcatgcagatgactgatgctgaagctagcaaagtatccatttatggtgattcagaaaataagttgcaggatgtatcgctctatctaaatgaagggatttcagaggaaccggcattctatgaaggccattttcatattgactctgaatctgagaaaaaggacacattcatatcatttcgaggttggaataaaggagtcgcttttgtgaacaacttcaacattggaaggttctggccggccattggaccacaatgcgctctgtatgttcctgcgccgatcctcaaacctggagataatgtcattgtgatctttgaactgcatagtccaaaccctgagctcaccatcaagttagtgaaggatccagatttcacatgcggccagtga

SEQ ID NO: 71971 - DNA, 852 bp, Oryza sativa
  Clone ID: PAT_MRT4530_72393C.1
gtctcatagcatttctgcttcaaggaaacgaaaccaggggttttgaatctttggcacgtacgtttgttatctctggagctgtagttgctgctgatgtattgctcaagactatatatgtttttgggtttggtgtctctttgttcattgatgttgaccaaggaactggtgggaagtggggcctatggtttctacacaaattggtgcttactggtgtctatggcctgattgtgttcatgtatcactcaaggtggagagacaggttacctgcaaaaccagcatattataactatgtctgtgcgatgttactactgaatggcatatcactgtttggatgtttccttgttgcaactggagctggatttggtttatggttgtacaatctcaccagtgtatgttatcattctctttaccttccacttctctatgtgactttcctagcagactttttccaggaggaagatatgctcctagagaacgtctactactcagagatgaaagacgctgggttctttgatgctgactgggattgatctgcagataccacgccgtatgaccactttcatgtgaatttgcagtcgtagctttcatttctggaacttaatcttagatgggaaaattgtatgtaaacaaccgttataatcaaatgaaatatgtaaattgatatcgatatgcttaatctgtagtaggtatcttttatgacaggtggttagcagcccaacttagacaatggatgaggaagggtgtttttaacaactacgtaactgtcaccctgatgaatgaatttacgtttccgtagcctcgtaaaaattccgtactaatcacctcgatatgctgttggaaaaaaaaaaaaaa

SEQ ID NO: 71972 - DNA, 342 bp, Oryza sativa
  Clone ID: PAT_MRT4530_72394C.1
gatacacaaaaacggggagacagcatacatggccgagggataaaaccaataacccccaaacatctagcaccacatgcaaatgtcttaagacccgcacacggcacaggaaaccaccactggcaaacatggcaagcaccagtattatcaggcctgaccccagaacataagcccacaaaacgacgactccttaggctcgacccatcatcaccgcctcattctggaaggactcaggccaacctcctcgaaatccttattcaacgcggagagatcctcaccggcctcagagaactcacacttctacatgccctcacccacgtaccagtggacgaaagcgcccttgga

SEQ ID NO: 71973 - DNA, 2371 bp, Oryza sativa
  unsure (1)..(2371): unsure at all n locations
  Clone ID: PAT_MRT4530_72395C.1
ctaggcggtggacttggggattctaagttccaacaatccaatctcctcctctncctcctctccttgagatccgatccaatccaaccctgcggcagccgcctcgccggaggaggaggatgcacggccggcctcgccgcccggacaagccggaggacgcggcggcggcggaggccaaggccgccaagctccgcgtcctccaggcacaggtcctgcacaaccaccactcccgcacctacaccaaggaggcactcgggctgagcttcaagctgctagagattaatcctgaggcgtacacagcatggaactaccggaagctcgcgtttcagcacaacattggggagctttccgagccggaggccatcaaatctgccattgatgatgagctcagagtggtagaggttgcattgaggcagaacccaaaatcctacggggcttggtatcaccggaagtggttgctaaatcaaaagctcgccccagtggatttcaagtgtgaatttggcctcttggataaactactgaaggtggacgcaaggaatttccatggatggaattaccgcaggttccttgccagattcatgggggttccagaagaggaagagcttaagtacactatggataagataagtgacaacttcagtaattactcagcatggcataatcgcagtatacttctgtccaatctgctaatcaaacagagcaagggtttcgagtcaaagcagaagatcttttcagaggagtttgaacttgtaactcaggccctttttacagacccaagtgatcaaagtggatggttctatcacctttggcttttagctcagacatctagtccagagaatccacagctgattgcttcgtggccttctaatggttcaaacctcagtttatcttccttgagctccatttgttgttactcactgaaggaagggattctaccaattgttctttattttaatgagcctgtgaaagggttaagttcatcgagtgtgagcttgaattctgatttggtggttagtaagaacattcagtggaggcccctttcagtaacagattctggacattctaactgttgggtcacttatcttgaagtatcaaacttggaatgtaacagtttgcagcaattttcagttgaagtaagcataaccaattcagatgaaattgtgtccagaagcggctctaattataactgtcccgtgcatttctcatttacctttgaactcagcaacaatgatagtacagccaaggatattgatccaattcatgaactaatctcctgggatttctcagagccactcctgtctcatgtaaaccccagttgtatctgttttgagcagttaaagatcactaattcattggttcacaaggagtcaaattggcatttggagagactatctgatgaaatagacctatttagagaattgcacgatgacaatagcaagtttgcaaagttgacattagcacgcttattgcttgcctgtgctgcaataaagtcccgtggaagttctcttgttgaaaggaagggatactgtgaagagtcgctcgggctctttaatgacttgatcgacctggatccatctcataaaaggtactacgaggatgagcggagcctagtcttaatggatcagttaacatgtgacatggaggctttcaagaaatactgttcagtcaaagctctaccaaagttagctccattaaaccatgttcagctttgcagattatctttaacgcgtattggatttgctgaacgcttgttgtgggtccaaatgctggacctaagccacaacaacctcagatcgattgaaggtttggaggctttgcagcagcttgtatgcttgaacctcggcaacaaccagatcagtagtttcacagcacttgaaccactcacgaagataatttctttgaaagtactggatttatcttgcaacgagattggaactcacccaatcgacacaacccggtacatctgcccatctccattctcacatagagttgaagcatgtgaagcttttgaagaatgccggaagaaaaatattaacgtggaggaattctgggatgccatactgttcttcaaacatgtgaatttggtacagctttgccttgaaggaaatgcagttaccaacaaggagaacttaagaactcttgtggtgacactcaatccatctctaaaatggcttgatggcaaatttgttcattagctgtctgtcttcttatacaaactttggataggatggtcatgttgtatactgtttcattatcggtttttaggaacattaggtggcaatttttgtatggcccatttcaccatttgtactggaatactgggtttcaaagcaaatttgagacacgatcatggtaaaaaaaaaaaaaaaaaaaa

SEQ ID NO: 71974 - DNA, 474 bp, Oryza sativa
  Clone ID: PAT_MRT4530_72396C.1
atggagggagtagtatttattggctaccacaacaacgagcttagcctgataatggataggctaatagtaggaaatgagctctactattatccttgctctcagaagtcctcggttcagtggtttctcgtgaaaaccaaccggttcacactggatcgattgcgtgagtggtccttgaatcaatctgagccagtgagggtgggcacggaaacattcaaaagtttggagaacccagaggaattagctttttctccagccctcatgcttgaaatcgattggatttgtaatataatcgcaaaatttccaaagtttagaaatctgtcgatcgatcggggtagcagagaaagaatagagatctctgaaactgcaaaatgcagtaactataaactacaccaacttgatgaacttcttttaaatcttcactactataacctttttacgctgattcggtgcctatctgctggcaccaaccgggga

SEQ ID NO: 71975 - DNA, 1473 bp, Oryza sativa
  Clone ID: PAT_MRT4530_72397C.1
atgaccatcctcctactcgttgtgttcttctgtcggatgttgggtaacatggcgggcaagaacaagaggaagaagcaacctaagctaccacccgggccagctactatgccggtgttgggtaacattcaccagattctgatgaacaagccggtgttcaggtggatccaccgccttctcgacgagatggacaccgagatcctgtgcctccgtctcggcagcgtccatgtgatcgccatcgcctcaccggagatggcccgggaggccctgcgcaggaacgatgccgtgctgacttcccggccggtatcgttcgcgtggcgggcgttcagctttgggtacaagaacaccgttgggtcgacgggcgatcagtggaagaaaatgaggcggatgctcgcgtcggagatcctctcatcggccatggagcggcgaatgcttggccagcgcgtcgaggaggctgaccaccttgtcaattacatctacaggaactgtaataatggcactgtagacatccggcacgtaacgagacacttctgtggcaacatcatcaggaagctggtgtttggccggagacacttcgccttcggcgctggcaatatcggccctggccgtgatgaggaggcccacattgacgcgctcttcacggcgctagactacctcggcgcattctccatctccgactacttcccgtcgttggttctcaatggcctgatgagtacattcagacggctgcatgatccaatcataatggagaggatggaagaatggagggctcccaggagaaatggtgatgagaggagagaagttgccgattttctggatgtgttgatctccttggacgatgcacagggaaaaccgttgttgtcacttgatgaggtcaaggcagaaacgctggaaataatccttaattcggtagacaacccatcaaatgctgtagagtgggcactggcagagatggtgaacaatccaaaggtcatgaagaaagcagtagatgaactcgatatggttgtcggtaaagaaaggcttgtcgaggaatccgacattcacagcctcacatacctcaaggcgtgtatccgggaggcgttccgcatccacccctaccacccattcaacccttcccatgtcgcgatcgctaacatcaccatcgctggattcatgatcccaaagggtagccatatcattttaagccgaattgggcttggtcgaaaccctagagcacgggataacccactcgaattccgaccagagcgacatttgaagaatactgataatgtggtgctagctgagccagagttacggtttttatcattcagtgctggggagctttctctcgctttaagcgtagaggggaagagtgtggcagcactaaagaatggttcacaagcagctggccccacgcttccatatttcatcgccgtgcattgcacatttgcaccaaaacttttggccactgctcattgccaagtcgttgttgcctaa

SEQ ID NO: 71976 - DNA, 415 bp, Oryza sativa
  unsure (1)..(415): unsure at all n locations
  Clone ID: PAT_MRT4530_72398C.1
agccttcgtcgacagaaagaaaaaaaaaatccaaacctcagagaaaccctaggccgggtcgcgngnagtcggcggcgatggccggttaccgatgccggagccggagctacagcccgcagccggccggagtacagccggagccccccgcggtacaagcgtacgatgacccgcgcgaccgtatcctcgcggcggaggtggaggtggaggtngaggcgaagggccccgcgcgggtatggccggccgctgcgcgaccgggctcctcgtccgcaacatctcgctcaccgcaagcctgaagatattcgtattncgtttgagcaatttggccctgtaaaggatgtctaccttccaagaatttccatacaagggattacgtggctttgggtttgtaaattccgtatccagaagatgcttcagt

SEQ ID NO: 71977 - DNA, 4085 bp, Oryza sativa
  Clone ID: PAT_MRT4530_72399C.1
ccgacagggacgcacccggccctccaaccccctctcgcacccaatccaacccaatcccctcctcatccactccgctctgcggccatggccgcctgctgctcctccctcgccaccgccgtctcctcctcctccgccaagcccctcgccggcatcccccccgccgcgccgcactccctctccctcccccgcgctcccgccgccaggcccctccgcctctccgcctcctcatccagatccgcccgggccagcagcttcgtcgcccgcgccggcggtgtggacgatgcgccgctggtcgggaacaaggcgcccgacttcgatgcggaggcagtcttcgaccaggagttcatcaacgtgaagctgtccgactacatcgggaagaagtacgtcattctcttcttctacccgttggacttcaccttcgtctgcccgaccgagattaccgctttcagtgacagatacgatgagttcgagaagttgaacactgagatcctcggtgtttcaattgacagtgtgttctcccatcttgcatgggtgcagacagacaggaaatctggtgggcttggtgatctgaaatacccattgatttcagatgttactaaatcaatttcgaagtcctttggtgtcttgatccctgaccagggaattgctctgagaggacttttcatcattgacaaggagggagtgattcagcactctaccattaacaaccttgccattggacgcagtgtagatgagaccatgaggacccttcaggcgttgcagtacgtccaggacaacccggacgaggtgtgcccggccggatggaagcccggtgacaagtcgatgaagcctgaccccaagggaagcaaggagtacttcgcggccatctaagcacacatatgcatatgcctggtgatggatgtagggagtttttttgctttcgcgagagccattgcgtttcgtctccaaagtgtagtaccgtgtgctcgtctgatcggattttgttacttgttcgccaccagctgttactttgttccctaacaaataaggctttgttttggtcgtgttatacatgtatacatgttagtgcgtttcaagatcgcttctgttttgggaaaaaaaaataaaaaaaatagcagaggcaaattctgatgtctcagggcaactgcagaagcagaaagagctatgcgaaatccaggaggagaaattaacctttttgacagaaaacaaccagaggttaacggaaggaattggttctgtgatggaagaactacatttggatgataaatatggatcattggatctaatgaagcttgatgtaatcgtgcagctcatcttgcatgagatcaagtgcttgctgaatactatttctgatgctcaggacgtgaagcaaaaccagatcctcgagaagtctcttgtcgtcacgcttttggagcactttggacgcgaggtggctgatctaaggtcagagaggagtgttctgaggcaagagtggcaggcgaagagcgaagagcttctgcagctgcaaaatgaaaggcacgacctcatgaagatcagctgcgagttacggaaggagatggaggctcgtaaccgtagggttgaggagatgaaaggtgaggcaaaattcttggttcgacaactctcagagctgcaagagtcgcggcagtcattgcaagctgaagtcatcaagctgattgaagagaactcctcactgtcaggcaaactttatgactccagggagaaagagaagacggccaacgatgatttcaatactctccttggtgaagcaatcagtacagacatcctcggtgtcgttttcaaaagtcttcatgatgagaggacatctcagctgcagtctttgcatgaagatttcgggtctctccatgcagcaggcaatgagctttaccaggagatcaagctgatgaacaagaagcttggagacctgcaactcgagaacaactatctcgagaaggaactcagtaaaaccatgagcatctgtgacagctctggttcagaaatcggcgctgggagaaggcgtactatgcgaagagacacaaagctattgaaatctggcaggaagagccagcaagagagcacggtgaacatcgaacagcgcaaagagatcgaccacgctggccttgagaaatcgaatgagttgttgagggagaagctccacaagctgcagagcgaggtgcaggcactcagaagcaaagaacagccggtgatcgatgtcaagtcctgcgatgccgagatcacaaaactgcttaccaacatgcagatggccactgccaacgcggctctcttcaaggagaaggtgcttgagctcatcgcgtcgtgcgagagcttcgagataagcgagatggtgcagaaggaggtcctgaaggaggagatcacccggaggaactcctacgtgaatgcgctcaaggacaagctcaacgccgtcgagatcgagaacagtaggctgaaggttgatctcaatggtgacttcacactgttgggagcattgcaaactgaagtcagtgccctggagaagcaaaccatgtcactggccaaagattgcttaccatcaaataagctcaggatggaggaattctcggtgtcaccgcagctgtccaagatcgcggtgaagcccatccatggtgagccgaacgcgacgaagatggtgaaggacatggagctggagaagctgcacgggacgatcaaggcgctccagaaggtggtcaccgacaccggcgtcgtcctcgagcaggagcgcctcgacttcaacgccaacctcctcgacgcccgccgccagatcgacctcctccgcctccgcgacgacatggccgccgccgtcgacgacagcgacgccgccagcgacccagccgccgcggcctacgaccgccgcttgctcaaggacatccagctcgacctcgtccagaccacaactccgaccaaccggagccgagctgccaccgccaccgccaccgccgcggcgtcatcgcagcgtcaccaccggaggaggaacggcggctcgacggaggcgccgccgcttgggctgtggagcgtggtcagagcgagcaggcggcggcagcaggaggagggtggcgatggcgatgacgacgatctccggccgccgcagagcgaggcgtcggcggagaggggtcggaggtcgtgctcgtcggaggtgagccagctcacggtggtaaaggatcttagcgtggacaagcaggagctcctcctcccgccgcggccgccaccacccgccatggcggaggcgccacacagggagtggaagaagaaggtgatcgagcggctgacggccgacgcgcaggctggtcgacctgcagtcgatcgttggcgagctccgggcgagcgcggaggcggcgcccgagctcgacgacgtcaccgcacagatggtcgacgccgagtccgccgtggcgcagctcatcgacaccaacgggaagctcctccgcaaggccgaggagttcacctccgccgacgccgccggcggcgccgccggcgacgacctccgcagccgcagccagcgcaagatcctcgagcgtgtccgcaagatgtcggagaagatcgcgcggctcgagcaggagacgcagcgcttccagcacgcgctgctccgccacgaggaggagcgcgccacccgccgcgccgccgccgccgcggcgacggcggcggcgagcagcggcaagtcgtccgccgccgtgcagcggcgatcgtcgagggtgcagctggtggagtacctctacgggcgccggcgcgacagccgccggcagcggcgcgggccgtcgtgctgcatgagagccaaggccatcgacgactaactctaatcaagaatctccatggatggatggacaaagcaagaagcgtttaatttttatttactacttcgttttaatttcattttacccagttttaattaatcaaaagtgaaaaactcgtaatcattttaatgtcgtgggggtgtagggtaaataatctcgtggactaatcctagtttcgtgctcttaatcatatatatatcatgaacttcgattaagcatcgttgtaaatggttaattaattagtaaaaaaaaaaaaaaaaagggcggccgtcgcgatctagaactagt

SEQ ID NO: 71978 - DNA, 564 bp, Oryza sativa
  Clone ID: PAT_MRT4530_7239C.1
atggcggatggtgaccgtcaggaggccgaggcgcccgtggccgggatcaagagggtgaaggaggaggaggcgaccgcgtccccaagtggtggcgagaagaagaagatcctcccgaattggaggaagtcatcgatcccgtgtgaggggagtgagatcctgaagaagaagaaggaggcgattgcggcgaggcctctctgggtgtcgagggatgtcccgggggcgatggagtgctggattgaggagcgcgagaaggccttggcggaggaggaggccgacatcgcgtccgggaagaagaagaggaagaaggtggtcaagtacaagatgcctaatgaagttatccaacagatgatgagatacccctacacctacccggagtgcaccgaggaggagctggcccgacgttctgcctcaaatcgccagctccaccgcctcagaatgttcatcgatggcaagatgttcgcctacgagcagaccctcatcgaccagtacctcaaacatggctatgcgttcgacgaggcggagatctccgacgaggaggaggaggaggaggaggagcagaagtag

SEQ ID NO: 71979 - DNA, 182 bp, Oryza sativa
  Clone ID: PAT_MRT4530_723C.1
ttcgtatagggcatctccagcctcgagtgctgcgggggcgctttggtgaccaagatcaggtctgagggttcgaacatgactgatgcttggttcgccttgatcgtgtgcaacggcacgtggtgtaccgttctcaccctcttctctattaccaatggggggcgtgaaatgcagcgggttacccg

SEQ ID NO: 71980 - DNA, 1676 bp, Oryza sativa
  Clone ID: PAT_MRT4530_72400C.1
atgtcggtggcggccggggttagcgacgccgccatcacggtgcgcgacaagctccgcgggaagattggccagaccaaggtgaagcggtactggcccgggaaggcgcccgagtgggccgacgacggcgaagacgacgccgatctccggactgccaataaggtttctctcgacaaggcgttccccaaggatgaggacggcgacgcgccgcccctcaaggatgaccgccgcctccgccgcctcgcgcagacccgcgcggagaacaaggaggagctgagggcggatcaccggaggattcggcaggccgagattgtgtctaccgtggatgaggagaacgagaggcaggaggctgagctggaggaggaggacgatgaggaggcgcaggaggagaggaggaggaggataagggcgcggcagctcttgagggagcaggaccggttgcttcctcaggaggaggagcccatagaggaggaggaggaatcagaggaatccgagtatgagactgactcggaggatgagcagacgggcatggcgatggtgaagcccgtcttcataccaaagtcacagcgggacaccattgccgagcgcgagcggctggaggaggaggagcggcagcttgaggagctagtcaagaagaggctggaggctaggaaaatcgagactaggcagattgtggtggaagaaatcaggaaggaggagcatattgagaagacactcaatgaggaggccaacattgaggatgttgatacagatgatgagttgaatgaagcagaggagtatgagtcatggaagaatcgagaaatagctagaatcaagagggacagggaagaaagagatgcaaggttgaaggagaaggaggagattgagaaggtgcggaatatgaccgaggaggagcggcgagaatgggagcgaaagaatcctaagccacttcgtgagaacaagcagaagtggaagtttatgcagaagtattaccacaagggtgccttcttccaggaaggtgctgatgatgttatccaatcagctggtaaagatgatatttatgctcgtgatttctctgcaccaactggtgaagataagatggacaaaagcatcttgcccaaggttatgcaagttaagcacttcggacggagtggcagaacgaagtggacacatcttgttaatgaggatactacagattggaatgcaccgtgggctacaaatgggcccttgcgagcaaagtacaatgcaaaaatggcaggcatgaatgctcctattgccaaaccaaagggaagtaagaagatgaaagactgggacacaaaacaggatgattaaatgaatactagatgaagtctggtactgctctcttactttcatagggacagactaatggtagctgcaaaacatgtttatgcagatagtttgtttctcttctttttgctgcataagacatgcttctaccgtgccatcaactgtcttacagtttacatctgctaccaaaatttctgcaaagtatgtaaacgatcgattggtagccgcttgtcatgtactgtcctgttatgcttaattagagaagaattgtgtatatgtttgtaaatatacttttgaaaaattgctatgcttagaacctgtcacaaaaaaaaaaaaaaaaaaaaaaaaaaaaggggggggcctcgtgccgattcctgcagcccggggatcca

SEQ ID NO: 71981 - DNA, 1093 bp, Oryza sativa
  Clone ID: PAT_MRT4530_72401C.1
atggccgcctgctgctcctccctcgccaccgccgtctcctcctcctccgccaagcccctcgccggcatcccccccgccgcgccgcactccctctccctcccccgcgctcccgccgccaggcccctccgcctctccgcctcctcatccagatccgcccgggccagcagcttcgtcgcccgcgccggcggtgtggacgatgcgccgctggtcgggaacaaggcgcccgacttcgatgcggaggcagtcttcgaccaggagttcatcaacgtgaagctgtccgactacatcgggaagaagtacgtcattctcttcttctacccgttggacttcaccttcgtctgcccgaccgagattaccgctttcagtgacagatacgatgagttcgagaagttgaacactgagatcctcggtgtttcaattgacagtgtgtggagcagagcatttacgtcttactttattgctttgtacagttatgatatgtcaatccctttgatacaaaagacgttccacttttgttccatattcatcacaatacaattatgggggcatatttatcataaaaggcatcttttaaatctcatgctaatacactatagtaaatattatggtcaaagtgacaccttgaaaactacgttctcccatcttgcatgggtgcagacagacaggaaatctggtgggcttggtgatctgaaatacccattgatttcagatgttactaaatcaatttcgaagtcctttggtgtcttgatccctgaccagggaattgctctgagaggacttttcatcattgacaaggagggagtgattcagcactctaccattaacaaccttgccattggacgcagtgtagatgagaccatgaggacccttcaggcgttgcagtacgtccaggacaacccggacgaggtgtgcccggccggatggaagcccggtgacaagtcgatgaagcctgaccccaagggaagcaaggagtacttcgcggccatctaagcacacatatgcatatgcctggtgatggatgtagggtaaataatctcgtggactaatcctagtttcgtgctcttaatcatatatatatcatgaacttcgtttt

SEQ ID NO: 71982 - DNA, 849 bp, Oryza sativa
  Clone ID: PAT_MRT4530_72402C.1
atggacgtatcaaagctcttctacccatcaatggcagaagcactggaagcagaggctaaagcgaagaagaagaagaatggcgccaacaaaatccggagcatcggccgtttgccaacaccgagcatacactaccaaccacatgtgtcggctacgtctaatccatacaatttcactaatgtgtttgctctctttggtgagaacaagaacaagatcctcttctcagacatggaaggccactccagcacctacaacaccgagttgcattccttcatgatcatgcctgatctgaattcacccaagggacccaattgtttggctgctcatatcacccgcactgctgcccacgcaaggtatgactttgatatccggcctgatgtggactacgatttctttgcctataatccccatggtgagcacactgacagcctctacttgatggacatggaccaaggcaaaccaagctcctttgaactgcttgcatactatcctgtgggggaatggcaatggtgctcactcccattgccgccgttctttgatgacccggagcacaaggcctgcagcaacatatcctacgcagtcatcgatggtacccgaatctgcatatcatctgccactgcgacctactcttttgacacagtggccctcgagtggagcaagattggtgattgggtgtttcccttccacgccaaagccgagtacattcctgagctcaaactatggcttggcctgtcagctagcagtccctctgacctgtgtgctttggacctctccactgctgccatggattcttgtgatgtgctacccatggtgcatcatgttgggcttgatgctgaccttcctgagggttga

SEQ ID NO: 71983 - DNA, 561 bp, Oryza sativa
  unsure (1)..(561): unsure at all n locations
  Clone ID: PAT_MRT4530_72403C.1
naaaaaaaaaaaaaaaaaaaaaaaaaaaaaaaaaaaaaaaaaaaaaaaaaaaaaaaaaaaaataaacataaaaaaataattgaaaaaaaaataaaaaaatattgtaaaaaaaataaaaatgaaaaaaaaaaaaaagaaaaaattccctcccccccaaaattgttgtgttccccttaatgggtttttttgaaaccgccactggtgaaaacaccagtgggcagtatccccccccaaatttttcccggggtccacttttttcgtttttttgggcaggccccttcggttgcccctgtttaggttttttcccatgaaaattttacagggggccccctcctctgtgttggggtgtttcatgcaccatccgggggtggtggctttttccaactgtttttttatttaccaaatgatgcttcccttgcaacaagttttttgtgctggactcgaaaaaatgcccctgatgatgaatttggccccccttatgccatatttgtgcaacttgcccccgttttttttgcttctctcttcttgcggatgttgtttgataaaacgggggttacatgt

SEQ ID NO: 71984 - DNA, 412 bp, Oryza sativa
  Clone ID: PAT_MRT4530_72404C.1
tcgcccacgcgttcgcccacgcgtacgcccacgcgtccggggacgcgtgggcttattgctgctgtacctgtacgtctactggcgtgtcttcttttgttctatactgctagagtactatttgaattggatgatgagggcctgaaagtgaaagaggacgatcagttggaggagtcatgtgaaaatgtttatgtaagtgtacagaatccatggaggtactctacatttgtgaatggggaactcgcttggtacacaatgacctatcttggtttattgtacggagacctacacaataccctgatggcacattcattcgttccctgtgattgttaacagacgacagctctatgatgctatggtggagcgtgctggaccttcaccaactagcggaactgagtagtgagtgcttccctaa

SEQ ID NO: 71985 - DNA, 384 bp, Oryza sativa
  Clone ID: PAT_MRT4530_72405C.1
atggccggccggtccggagcgccacgccgccaccccaccgctgccaacgggggagtcggggacacgggctcgacgcgaaatgggaccccatgctgcagcgaggagagggggatatgccgtatgcggccgatgcggtgcgggtccaagtggccccgcggccacctggtcctgggacattccttcctttccgccggagtctacgaaggcacgcagcacgcgagcgaagaggaagacgagccgttgcggacaaacagggagcaatcgcacaaagcgcttcccaaaaatcttattgccgcctactcccggtgcagaacgtcgaaggcagaggttccggagacctgctctcccgatcgcaggtgcacgccggcgagcgggatggagtaa

SEQ ID NO: 71986 - DNA, 202 bp, Oryza sativa
  unsure (1)..(202): unsure at all n locations
  Clone ID: PAT_MRT4530_72406C.1
gccgccaccaagaccgccgccgccaccaagtccgccaccgcccccaagaccaccaccttttccgaaaccaccaccaagtccaccgnccttcccaatgncaccaccaagaccaccgccgccaccaagtccgncaccaccaatgccaggnccaatggnaccacctaaaccaccacctttgncaaatccacctccagcaccatgt

SEQ ID NO: 71987 - DNA, 515 bp, Oryza sativa
  unsure (1)..(515): unsure at all n locations
  Clone ID: PAT_MRT4530_72407C.1
attatcccccccatagaggagaggtttctcacaaaggaccaaggatggactgccccctgctcgcccggatttgcggagggacaaagctgctgaaattgtttggcgccacccnctatggtgggtntggtnggcacagtgtgaccactgtgacaatggtgtgtctgaagtgtgggtgctgactggctataaggaggaacctcgctntgtcggttggtcngtaatgtgtgcaatgtgtgccctgtgttggtgcgaatgcgcaatggtggtgttgcaacaatgcaaacanatgcctaatggttgcggcagtgctgactggagaaactgatgtgttttgactgctgtgcngtggatggttaaaccggatgtgggaacctggggatgcnatcttgtttgctcggtgctaaagttatagggttcacattcttgttgcgtttctgttgagtggtatttattgtttcctttggcttccgttgtaagtccgcttattttngttccaaaaaaaaaaaaaaaaaaaa

SEQ ID NO: 71988 - DNA, 2227 bp, Oryza sativa
  Clone ID: PAT_MRT4530_72408C.1
ttttcttttttttttacaaaatcaacgatgtcttggacaacatatgcagtgtaaaagcccaaattttaatgaacaaaccatcgaggtagcagtctgctttacatgtccacaaacgaccatggtcgggccttcagctgccaacctgagctgcctgataatcaggcgtaccatgcaagcacaccgagctcacgttacagtaggcagtttgggcaagttacactggatttttcgctacttctccctaatcggagcacgttctcagacatgacatatcttacacgccctcgtttgggccaacgaatatatgtacaggatgaaagaatattgtacaggtgagcggtcagtgccgctggtattgcaacgggacgagcctagcgttaacggcttcaatgtatgtgcgcaggcggcgtcgatcatctcttgttagggacagagcggggttcagggcgagtgacggtgcctcagtcaggagaaagcgcagcatggatactgccttcgagtacagcaccatggcagatgctgatttccccatcatctcatcaacaccaccatgtcttcccaggttaagcgcggtctgaaatatgatttctatcgcatctggcatttctgtagcatcaattgtctgtcctatagtgttggcaagttcttcagcatattccatttgaaccaaaaactgactctctatctccatgcatgtatcatataacagttgagagtttgcaagcaaatggggagcatttgagccaaaacccttcgcggtgacatcatgggaaggattctctcttgtggcagaagatgcataagaagtgcagatgtaaattgcttgcttccaggttgcaagaacaactagctgaatcgagaatccctctaagtgcttggcatctttaatcttttctttcaccaattctgctatggtagacgcatactgctccaataatctaaccctggtcagacaatcagatggtggttgatccatagcatcgttgagatctgcagatccttgtgaagtaccagatactggagagcagtgactgtccaagctaccagttccaccagattgctgtctgttaattgccatgccatgtattggccttggtgcactcacagcagttaataacttcggtggtgaaagagaagaactgtcaagttttgatggcatggtgcgctgtcgggagtcattcatcgaagaggaggatccctctgggtgcacaaagacatattcctgatctacaaactctaatgaatcaatgataggggaatcttctggataaccacctttagggttgtgcccttcatcacccttgttttccttgattctcctaggatggtccaggcgttgactactagatgcgtaattatttcccctaatatatttagagaccagacttgaatgtttcgttggactctgacctgaagttttatcaagccttttactcgtggcaaacccataggattttattgcactcttactatcagaaacaggaccttcatcctgtccagttgactcatcatccaaaggaaaaggcatacaatcttcctgagaactttggcttgaaggtctcgtaggactgctattaatgaatggaaagccatctcttatgtccgatggtgtccggctcaaggttctctccaaagcatgttcagcgagaaatggatggttcacaaactcttcaacggtaaggcgttccactgaattgattcgcagtaactttctgcataagtcaatgcagccatggctcaagtcgcaatcagatggaaatcgtatttctcgtgtattgagtatatttctcagcaactttgcatcatacttctgagcttgcatgacttctggagccatgtaaagcggtgaaccgcaaagtgtttcagccagagaagaaggttctaaaaactttgcaaatccaaagtccgcaatcttcaagagggaattttcattatttgcaactagaagaatgttcctgatggactcgtggagggcgatgacgttgggatgacggatgcgccggaggatgtcgacctcggagaggaggctctcgcggagcttgctgctaagccgctccacggcgatctccttcaaggccacctccgtgccccgcgtgcggtgcttcccgagccagacccgcgcgtacgcccccgacccgatctgccgcaccagcacgtagtcccctaccctccgcacgccgcttcctccccctcccccgccgccgctccccgcggcgcggtcccccat

SEQ ID NO: 71989 - DNA, 318 bp, Oryza sativa
  Clone ID: PAT_MRT4530_72409C.1
ggagaggagacacgaccatctcaatcaacacccaccacaatctacggaacaacagaagccaacatacgccaagacaagacgtcggctatcgacttcagggataagcacggctagtcccctacggtgtctccggatactgtcaagagagacgaaagcgctatctctgatctcgccgggcacggattcgaggaggaagattaccctattgtcgactacgagtcagaccttcagaccgccatgtcgacaacagttagataggctacctaaatattgtactggtgtgattatgactttctttccattttcaaaattcagggg

SEQ ID NO: 71990 - DNA, 919 bp, Oryza sativa
  Clone ID: PAT_MRT4530_7240C.1
agtgatctatagcattttcaaagtgtcaaagaaaattcatcgtagaaggccaaaactgtaaggaaaaagtacgaattacccccccacgaactatcgcgaccgaccgaattacccccctgaaccacaaaaccggacatccctcaccccaactatgcaaaccggacgaattacctccctcgacctaatccgcggtggttttggtctacatggcgtacgcgtggcagtccacggcaaggacggggggccggaggcggcagcgaggatggcggcacgcgtggcgcggcggcgcgcacgcacgtggccggggagtggaggcggtggcgaggatggcagcacacacggcgcggcggcgcgcacgcacgcggccaggggacggaggtggcggcgaggacggcggcgtggctgagacgcgcacggcggcgcacacgcacgtggatagggcccggaggcggcggcgcagcgctttgaggatctcctcctagtactccaaagctcgtgctgttgtggtcaccggtggcttcaagtggaggtgtcagtcatcgggccgcgtgatggtgagctcctgcggcggcggcaccgatccgatggagggggaggtgaaagggaaggaagagaaagcgcggggcggagggaggtcgacggagcgtgcagggcatgccgccgtcctcgccgctgcgtgcgtgcgtgcgcgctgccatgccgtgcgtgccgccgtcctcgccgccgcctccggccccgtcctcgccactgtgcgcaatgctgactggactgccacacgtgcgacacgtagaccaaaaccaccgcggattgggtcgaggggggtaatttgtccggtttacatagttgagggtgaggaatgtcctattttatggtttaggggtttctattataattacatagaacaaagacataaagatta

SEQ ID NO: 71991 - DNA, 444 bp, Oryza sativa
  Clone ID: PAT_MRT4530_72410C.1
ctgttaacgccaaaatttggtaagcccaaagtcttcatcggcctagagtcagtatcgtcttcagagtcttggaatcggccaatgggagttgtcaagtcgccagcagttgtgttcttgatggagtcggatgtttagccgatcgtaacaaaggtttcactgtttaatctaatcttgtggattttatgacatcggacctccagccgatatatactttaaccttcggatcaatgcttatctgtcatatcattattagccgattggtttctattggattatattattgttatattttattatcatcagtcgattgtcttcatatcattatctacattgaacatatagcctattgctcaaaaccctatcgacattgactggaatcggcatcggctattatcggctatcggctggaactactctatcggcttatcagccaatcggctcatt

SEQ ID NO: 71992 - DNA, 405 bp, Oryza sativa
  Clone ID: PAT_MRT4530_72411C.1
atggtgccgcacgcccacgtcgggcccgggcggccgacgggctgtcgcccgcctcctgcagtcctgctcctgcaggcgtacaggcgatggccgccggcgctggcgcctgccgcagccgcagagcgagaggacgaggatgcgacgaggcgaggagtggagaatcgggactcgggagaggcggagacgagacagaagcgaagcggagcggcggggtggtccaaggaccacccggactacctgctggagccgcccctgctggtgcagatgagggcgaggaccatcaagatcaccttgcaaagggacagagcaccaccaaaactggagctgccatgctttgtcatctctaacttggctgttgggttttcggaatttatagagcctggaggcaggcagagtgtagtgtag

SEQ ID NO: 71993 - DNA, 1275 bp, Oryza sativa
  Clone ID: PAT_MRT4530_72412C.1
ggagagagagagagagagaactagtctcgtgttttttttttttttttttttttcgcataacagagctatatatatctttattattgggatgaagttcacgcaagctgtagtacttaacctgcaactacatcgttcacactggttacccagtagtatcaatacgatgacatatgctgcgtggttcgatgccgatcactgtagcaaacctgcacggcaatgggcagattctgaagaatggattctagcgttcagagtttcacgccttgcctgagccacctgcgcccttcagtacctcgtaaaccgctgagaaatccaggtcccctagtcccaagcttcttgctttcttgaacgcctcgttggaagcagctgccactggcatggagacagcgttctcgtctcctagggcaagtgccaacctcatatccttctgctggtgtttcaggggaaatgcagggttgtagctgccttgcagcatcgagggccctttcagcttgaacattggattcgcgatggcgccaaggtccaggacatcaagaagtgtctgggggctcaaaccactgttatcagccagagagagtccctcagacaaagcattcatcatacttcccatgatcatgttgaccaccagtttcatctttgctccatttccaatctctcccaaaaagaacgactttttcccaagtacatcaaatgcagggaccatatcatcatacaataccttgtcccctgcagcaagaatgaccaattggccatcttcagctggctttttgcttcctgaaactggagcttcaacaaaagccccacctttttgttttatagcctcgcttatcttgcaagaagtggcggcatcaacagtggacatgtccacataacccttcccttccccaatctgctcgagcacgccgtccttgtcgaatacaacagatagcgcggcgctggggtcggagagcatggcgatggtgtatctgcacttggcgacgacggccgccggcgtctcccccacggcggcgcccagcgcgacgagctcctggcacttggagagagtccggttccagacggtgacgcggaagccgtggcggaggaggttggccgccattgccttccccatgatgcccagccccaggaaccccacctccatggcccgggcgcagctacctcctccctcccgcccttgcgcttcctcctcctccctccacacacgcacgctgcacacttgtgtctcctcccccccgcgttctcctctcgtgttcttctcccccagtgttcttcctctct

SEQ ID NO: 71994 - DNA, 691 bp, Oryza sativa
  Clone ID: PAT_MRT4530_72413C.1
tcctccgccacggcttccgcgtcaccgtctggaaccggactctctccaagtgccaggagctcgtcgcgctgggcgccgccgtgggggagacgccggcggccgtcgtcgccaagtgcagatacaccatcgccatgctctccgaccccagcgccgcgctatctgttaagccctagcccctgcttccttagtgtttgcaagatggcgtcctccctgatttttttttgtttttttttgggggctaaattcatctaggttgtattcgacaaggacggcgtgctcgagcagattggggaagggaagggttatgtggacatgtccactgttgatgccgccacttcttgcaagataagcgaggctataaaacaaaaaggtggggcttttgttgaagctccagtttcaggaagcaaaaagccagctgaagatggccaattggtcattcttgctgcaggggacaaggtattgtatgatgatatggtccctgcatttgatgtacttgggaaaaagtcgttctttttgggagagattggaaatggagcaaagatgaaactggtggtcaacatgatcatggtatgatgaatgctctgtctgagggactctctctggctgataacagtggtttgagcccccagacactttttgatgtcctggaccttggcgccatcgcgaatccaatgttcaagctgaaagggcc

SEQ ID NO: 71995 - DNA, 348 bp, Oryza sativa
  Clone ID: PAT_MRT4530_72414C.1
atggcatctgcaagtggtggagggtggcagcggctgaagcgccgcctcaaccggatgtggtgccgctatgccagatttagccagctacgaccgaagcacaacttcagagacccgatggtcttgaggctccatccctacgtgcctccagaggcacttgttgaatgtgcatgtggtggtggctggtggttgacaacatcttctgtgcagtggcttcagcacattcctctcatgcttagcttcctccagggcatggtcgcggggagcttcggcttttcttgccgagcagagaaagctatccggaacttctgtggttcttcctatgaagttccgggcaattctgtggcttga

SEQ ID NO: 71996 - DNA, 1593 bp, Oryza sativa
  Clone ID: PAT_MRT4530_72415C.1
atgtggcctcacatgtcatcctcactaccctcttctttgtatctatctttttcttttctttttcattcttttttcttcttttgcttcgcgtccggcgcttggtgggagcgccgtgccggcggagagggcggccgacgggagcgccgcgagggaggcggcgagctcgtcgggccggcagacaggagaggagcggcggcgctcgcaggccggcgggagggcgggagaggagcggcggtgcgcggggaccggtgggagggagcggcgtgcggaggccagcgggagaggatcagcggtgcacgctggctggagggtgggagggaggggagcggcggcccatgccacgccggcggagagggcggccgatgggagtgccgcgagggaggaggcgagatcgtcagggcggccgacaggaaaggagcggcggcgcgtgggagccggcgggagaggaggcaacgcgcagcggccgacgggagggagggagaggagcgacggcgctcgccggttagcaggagggaggtgtccggctccgctaagaaggtttggaagattggcacggacgatccccggaaggcgacgtacggcgtcaaggtgggcgtcgcgctcaccctggtctccctcttctactacgtcaggcccctctacgacggcgtccgcgggaacgccgtgtgggccatcatgacagtcgtgctcgtcttcgagtacaccgttggtggtagcatgcacaaggggctcaaaagattcgcggggacgatgagcgcggccgcgctcgcgctggggatgcattgggtggcgagcaaatccggcgaaacgttggagccgttcgtcgccagtggctcggtcatcttgatggcggctgccttagtagcctatgacgaggatttctttggcaaattaagtagtagttttgataaggactacccaacaaaaatttcctggctacgccactggtcatggcaacatactactacgtatgttgcagctactgcagccaccttctcgcggtttataccgacggtgaacgcgcggttcgactacggcgtgtccatcttcgtcatgacgtacagcttcgtcgccgtgtcggggtaccgcgtcgacgacctggcggcgctggtgctggacaggatagccaccatcgccatcggcgtcatcatctgcctcgccgtctgcacgctcatctgcccggtgtgggccggccaggagctgggcctcctcaccgctcgcaacatggagaagctcgcgtccgccgtggaggcctgcgtcgaggactacttcgccgaccccacggcggcggcggccaggtcggaggggtacaagagcgtgctcggctccaaggcgtccgaggactcagcaggccgcgcgatgggaggcccccgcacgggcggttcggcttccgacacccgtacgaccagtacgccaaggtcggcgccgcgatgcgccagtgcgcgtgctgcgtcgaggcgctcatcagctgcgccggcgcgtcgtcgcgccagcgagccccgcccccgcgtctcctcggcgatgcgtgtacgagggttggcgcgtggtgcgcgcgggtgctcaaggaggcgtccgcctgcgtcgccacgatga

SEQ ID NO: 71997 - DNA, 149 bp, Oryza sativa
  Clone ID: PAT_MRT4530_72416C.1
ttgagttttgagttaatgccattctttgtcactctgcttatatatgtatgaccatgtcgtcgtgttctcaaaagtactttgttgcagcagcaacagcatcaactgcttgccctatagggatgttttgttgaagaagttatatactgatg

SEQ ID NO: 71998 - DNA, 590 bp, Oryza sativa
  Clone ID: PAT_MRT4530_72417C.1
gacgctgctggtgttaggcactctcctttctataatcagaacgtgttcgacgaaatgtctagacaaaatatctagtgagagcaacaaagtttcaagatcaatcgcctgttcgcttgtattgtctaccgccggctgccctactgcatcactggtcactccctcactactctcgcttcggcactctctccgccgcccggtcgccgacttctttcatcgttgttggctgcccagactgccggtgccggcgtgctgcactgctgcatctctgcaccacggcaccaagccaccgccacacaagccatccagaattccagcaagcacaagttgcacaacacatctgcactcctcatctggtgagtgaatcactggcatgtttaaatgtttctcaattttagcacacaggtttatctagtatatattttagtatgtgcactaaattaaattttatttttttcatcttgtattgagtacatgtatatataggtttctatagtattttaaatttcaaaccaatatgtcttgtgcaaatcggatttgaaagtttgatttgggctgtggaaagcggaaaaagtaaaaataaataaatagga

SEQ ID NO: 71999 - DNA, 625 bp, Oryza sativa
  unsure (1)..(625): unsure at all n locations
  Clone ID: PAT_MRT4530_72418C.1
gaattgtnatacgantcactatagggngaattgggtnccgggnccccccncnanttttttttttttttttttttttaactcncaaatctactaaacctaacattcntcnctgtnaatccnaggatttacagaagtcncaganncnaaggttaaaagcattccgtcntnagcnaagannancataacatcnttttgcttacaaacaattgttaagcnaaggannanggtctgaaaaatanggggnattttgtcntatccttatgcgaaaatcacgaattcntttcctcntcttcntcaatctttggngccananaaaatctaatgttncccntctctgcaatcttatnctccaccaccactggcanctcnnannaaagggtgattgttacttgttcaaaaaacgggcttgccttggtnaaagaattcatgttcctcaggggnaaagtttatganccggttcctgcatctctatgantgtncatctcnggctgtcacancttgttctgcctgcaaanaagtttgnagttccatatctccacggtcaaaaattaaaccncctggtcccaaanaaaaatntnccaagcgcccatcttgcatctgaaatcnagagnngcganaaagctnc

SEQ ID NO: 72000 - DNA, 402 bp, Oryza sativa
  Clone ID: PAT_MRT4530_72419C.1
aaacaaaaaaatgtcgtaacgacggcagtgcacctatgcttcctcactaacgggaatagcctgcggttaggactgcggtgcaggcggcatgcgttccctttcgagggctacccctgtatcgcacccttactacttcatttggacaacgctggcctgccgcctgcctgccgccatctgtgttgcctgcatgctcaacgacttgcgcctggcgcacggtcacctgatgtgcctgacattgagcacaagacgcgacctcctgacctccatcgatcgactctgtgtgcatcttgtgcaccactcaccctgcccgaccgacgatttggcgacacgacaactgccactctgcatttggactccttgactcttgcaccttgtctcgaccgaccgactgtgacgtgtcta

SEQ ID NO: 72001 - DNA, 336 bp, Oryza sativa
  Clone ID: PAT_MRT4530_7241C.1
atgagggtggggcttggacgccgccagccacctgactcacgactgctacgagcagcggaagcagcagggcgaggaatcgccaccaaggttgagcgcccattgtcgccgattgaattgcaagttactcgaggagagctcgatcctgtgtctgctagatcaaccacaaacaaaagccagtactgcttgagatcacaacacacaatcgtcacagctgcacaaaagacaaagattggcatagattaccttggcccttggggcgacacgggccatgagagcggcggcggcattgacgacattgttctcaatgaaactgattgtggagttgatgatgagtag

SEQ ID NO: 72002 - DNA, 379 bp, Oryza sativa
  Clone ID: PAT_MRT4530_72420C.1
aaaaaaaaaaaaaaaaaaagggggggggggggaaaaaaaaaaaaaaaaaaagaggggaaaaaaaaaaaaaaaaaaaaaaaaaaaaaaaaaaaaaaaaaaaaaaaaaaagaaagggggcggcccttttagaggggtccagccttccttccccttccttcccccttcttgccttttctttgggggggggggggggcatttccctccccttctttttccaccgcctggcctggaaaacccctgcctttccccaactttatccttttgcaccccttccccttttcgcccgttggctttttagggccgggccccgttctggtcgccttccccaccctttgctcacctctattgggtattggggccccccctgttgcggcccttt

SEQ ID NO: 72003 - DNA, 153 bp, Oryza sativa
  Clone ID: PAT_MRT4530_72421C.1
atgaagccctatcgcgaccatgaaattcaggtgaccaaatccactctagaggggcttcatcctgcgaccttgaagaagttcagcgaagcgctttcaaacaacagtgcaattcatgacaatgctgacttcgtcaatgggcttccagatgattga

SEQ ID NO: 72004 - DNA, 1725 bp, Oryza sativa
  Clone ID: PAT_MRT4530_72422C.1
atggtgtgggcgctgacccccgtcgacacagtgcgcggggcgcagaggtgctacatcttcgccgccgggacgtacaaggtcggccgcaaagattgcgatgtcattgttcaaacggacacatcgatatcgcgagtccatgcagagattgtggttgaaaagatggtggcctgggatccacaatctggcgcaccagctaacccttcctatgtccgtgtagttgaccgctcaaagtatgggacatttttcaacaaggtacagggaacacagggtagtcgccttcataaagatgaagatgcaatgcttgctgatggggatactgtaacttttggaactggcaatgcaaccttcaggttgtcatttgtccccatagtagtcttttttcatggaaaaaagtcagggaggattagtccatgtttgcaggcagtaatgacatccattggtgcatatgctactcggaagtggagtgatgaatgcactcatgtccttgttgacgagtcatgttcattgacacctgagctcctagatgcggttttggcgaaaaagcagatcgtcctgggagactggtttaaggtgatggctgaaaagaacatacacaccgaaatgccttcttctacacagtatattccaaagttgacccttgatgggatggagatacaggtggtggagatcaagctcatagagagctgccttgcaggctatacttttatcttggggtcatcagaaaagtataaatttggagacaaactacatgctttactggaatctactggagcaaaatatctgcacgttgatgagttttgtgcaaacagccaggactctggagctggtgaaaatgataaagatattcttcttgttcctgcaaaatctcctttggaattcagtaagatacgcgggctatttcctttgtccaagatcaccgatgtaaagctctttgctgctattttatctggtcacttagaagcaactgccattgaaccgccagcttacattgttgcatcctcaaattcgacggatgagactattgtggtggactctgatgtagaaattgatactgcaacttctgatcatactgttgctgctagcaagtctgaacatcacattgagcatatttctgatgataaaaaggaagtcgttgctatatctgaagaagatgctgtaaatttggtggaagcaaagaccagcattaatcttcacagtgaccaggagaaagatgagattgtgaaacctatggaggaggatgtcaaggtcatagagaaaacagcaacaatgcgtggtttcaaagttgaaggcgaggacattcctgttatgaccaaggtgccaaaggatgaaactttggacagcagagatgagacttgtcatgttatatatacccagaatctggttgtgaaaagcatccttcagtcagctcgtgccgaatccatagaaactggtggcattaacttcaaacgctttagaaagagaggagcagtgtctggaaacagcttcaaggacctaatcccgtattcacgagaaccatacagagaatctgattacgagcgtggaacggtaactgacttcatgcgagaggagaagaagcggaggcaaatggaagccattgcagaggacctcttcaacaatgcaaagaaacagtggtaccctgtcaacgcatccagaacagcagatgagaaggctcctgaagagacaacatacagcagacgcaggaatgctccaagtttggtactttga

SEQ ID NO: 72005 - DNA, 168 bp, Oryza sativa
  Clone ID: PAT_MRT4530_72423C.1
atggatatgtcgcctgccggccatatgcaggggcgcacggtcacggatagctcccccgtttgggcggaaatgcggtgggcgcgtacgtgcgccatgctacggccgcgccacctgctggttgctgggcaagttggccttgtcaacttgctacgcgacggaggattaggt

SEQ ID NO: 72006 - DNA, 540 bp, Oryza sativa
  Clone ID: PAT_MRT4530_72424C.1
ccggccggttcgccttcgagctctccaccccgaccgacaccatgtacttcatcgccgactccgagaaagagaaggaagagtggatcaattccatcggccgatccattgttcagcactcccgctccgtcaccgacgccgaggtcgtcgactacgacagccgccccaactccaagcccccaccgcagccgaagacgagcgaagagagtgaaccgtcagcgtaagatagcggtgatctctggctctcaatatgcatatctattgtatgattttatctactcaagtagtagtaattgtgaatttttagtttttgttttcttctcttggttaattatatgtatattattgactgctacctgagaataagttcaaggttttgccgtgtggctagttcttttacagtaaaaaaaaaaaaaaacagcataattcggttggtgtttacttgtttcatcctgtatgaagttactggcttggatcatcggtgctgcgaaaaattttaagcactcagttctttaatttccattatggggattttcgtttgtc

SEQ ID NO: 72007 - DNA, 682 bp, Oryza sativa
  Clone ID: PAT_MRT4530_72425C.1
cacgagggaaggcaccagcggaaaacaagagagaggggtggagtgccgcggcaccgatggcgccggccgcttcccgcggtggatccgacggcgacgacggtgccggcggtttcccccggcccgatccacccgcggcaacggcttcccgtggtggatctgacggcgatgacggcggtggcggttgcaacagctacgatatactgggcaagctgccttcgtcaccgggacgagatggtcgccgccgctgccgatctgagcccgactcctggccaccctcgaagctcctccccacattgaaacttctagaagatccttcatagtccctccaagctatttttattgtcccttcaagttcgattccccccacaaccgatccaaagatcgggtcgtcgtagccattgctgcagctccagctatctcaggctcctccaggagagcccaatccgtgttgccgctagctgtgatgtgaggctactatctgcaattacatgtggtgatggcttccatgtcaaaattggtggttgagggctaatttgataatattgctttgaggactaattcagcgttgaggactaattcgataatattgcttcatcccacataatgtcgtgtatactgaaatattcagcgatatcgcgaatcaacgtgcttaattttaccagattgtagtgcatggtgccca

SEQ ID NO: 72008 - DNA, 285 bp, Oryza sativa
  Clone ID: PAT_MRT4530_72426C.1
atgggcgtttctgctggcgatcgccgcaagtccggccggtggctgatcatcttcgtcggctgtgagcggctggccacgaggagggaaaagccagcgaggggcggcgccggcaaaggggcggcgcggaggggcgacgccggcgaagtcgcggcggcgtcatatgcgcgggcggcggccttggcggagtcgtggcggcgtcgtaggcgcgggcggcggcctcagcggagtcgtggcggcgtcgtaggcgcgggcgtcgtcctcggcggagtcgcggcggcgtcgtag

SEQ ID NO: 72009 - DNA, 1617 bp, Oryza sativa
  Clone ID: PAT_MRT4530_72427C.1
atgccgtgccgtgccgccgctcgccgcgccgccgtctccgcactgcgattagtacctgacctggatgtggaaccgatgcttgaagtctcaaaaccaggttttggggattaccagtgcaacaatgctatgagtgtattttcaagaataagaggatccgcaacaaacttccgtaaccccatggcagttgggcaggcaattgcaaataacctcccccagtcaaatattatcgaatccatctctgttgctggacctggttacattaacataacgttatccagcaattggattgcacagaggatacaagacatgcttgtttgtggtatcaaaacatgggcaccaatcttacctgttaagagggcagtgctggatttttcatcccctaatattgcaaaagagatgcatgttggacatataaggtccaccataattggagatactctagctcacatgtttgagttcacaaatgttgaagttcttcgacgtaaccatgtgggagactggggtacacagtttgggatgttgatagagtttctgtttgagcaattcccagattgggaggatgttgggaaccaggctgttggagatcttcagagcttctacaaggcatccaagaaaagatttgacgatgatcctgattttaaggagagggctcggcaagcgggagagagcttttacaacccctacattccacctgttttggaggaattgactaacaaaggtttgattgtggaaagtaaaggcgctcgagtaatattcgttgaagaccaccctttgatagtgattaaacaagatggcggcttcaactatgcctccacagacttggcagctctttggtatcggcttaatgtggagaaggcagaatggataatatatgtaacggatgtaggtcagcaacgacactttcatatgttgttcactgctgcaaagatggctggctggctcccagaacaaaatggaaagaaatacccgaaagcaagccatgttggatttggcctagttcttggttcagatggcaagcgcttccggactcgttgttctgaagttgttcgactggttgatctacttgatgaggctaaagctcggagcaaagcacaactcatcaaacgtttcactggaaatggtcaaattgctgactggacagatgatgagctcgataggacttcagaggctataggatatggtgctgttaagtattcagatcttaaaaacaatcggctgacagactacacatttagttttgatcaaatgctgagtgacaagggaaatactgctgtctaccttcagtatgcacatgcccgtatctgttccattatcaggaaagccagcaaggatgtagagaagttaaaaatgactggagccattacccttggccatccatacgagcgtttcctcggattacatctcatccagtttaccgaggttgtggagcaggcttgtgccgatttacagccccatcgtttgtgcgactacttgtatagcttatccttaacattctccaagttttacacaaactgccagaaatattataccggcgaaaatatttacagaaatagaccctgcctccctcgggcgccctccctgagggcggcagggggacgtgagggacagccgagatga

SEQ ID NO: 72010 - DNA, 243 bp, Oryza sativa
  unsure (1)..(243): unsure at all n locations
  Clone ID: PAT_MRT4530_72428C.1
gaagggcaaataacancancggggganacgcccancaccncacgagaacagaggaagaaacaaaagctaaaaannaaaaccatcaacagcccgancgagnnngcaatactagatacacacattgcagcccttcccttccctccctccatgtatcgatatatcaacccggcccacgcacaaaacattttgtttcaattccctactcgagctgccgccgtaccacaacccccttggaaccttgac

SEQ ID NO: 72011 - DNA, 963 bp, Oryza sativa
  Clone ID: PAT_MRT4530_72429C.1
gtattcgaaaacgccgtggcgcggatttctcatcaacacgggtgtagggatcatcgcagttgaagcacaaccccttccgccgtcgctcatccatctccggcggcgtcagacggcaaaccgtgcggctggccacctgagcggacgattggcccactgaagatgtcgtatctgagaggcaaagaggtaggcgcagccgatgatgatgccagcacccaagcgtccctgcacggcatggcgcagcacgcatggcgaactcacggcgttcataggaacgcgctaaactcatggcgacctccaaggtggttgggtattgaagctgcatgtcgatgcttaacggttcttggagaccggtggtgaagagatccatttgctagtcctcaatgaggggaccggcgcgagcgagcaggtcgaggaagcggtcgatgtagacagccaccatagtcatacgccggcaggcggcgagctcgcccagggcgcctagcgcaggggcgatccgaaatgcaaattaagaaggtcggagaagcgacgccaggttggggtacccaggtcacgttcgacgcacatgtaccattggcgtgccgcgtcgagcagatggtaagacgcgagccaaaccttctcctcttccggcgtacggaaatggagcgggtcgccctaatcgtcgaacttggggaaatcaatcttgtggtagcgcggtggccgatcaccgtggcgaccgtcgctgtcgcggtccccatcagcatcacggtcgccagggtgctgatgacgttcgcggccagcccgttccaggcgctggatcgcaatgtgatgcgcttcctgctggttgtccaggtcagaaagtttcccccggatggagtcaaggtgatcaaggaccttagcgagaccctttttccagttttcgccgacgttggtgacggttgtcatggcgcggcggcggtgttggtgagcaggatcgtggaagtctga

SEQ ID NO: 72012 - DNA, 396 bp, Oryza sativa
  Clone ID: PAT_MRT4530_7242C.1
atgtcaacttccgccagcccgtctatcgcgccatcggccaaatacacagaggtaagtatccatcggctagatcctctcctttcgcaatagattggttcttctttgtctcatcttgttttcttcttctctattcttgtttgcatctgtagcatctgtccaatctggtcgcgattcctagcctgtcgcatgagcatcactattttcttggtccgattggcaaccctgatcctattgagttcatcatcgctgaaaccaataggattccttttagattggccaacccgaatctaggtcactggaagaacatgttcaagtcttggccctctcttgagaaaacttcccccgagaagagttggactgtgtggtataagcatatatcggctagcaagcaagttc

SEQ ID NO: 72013 - DNA, 258 bp, Oryza sativa
  Clone ID: PAT_MRT4530_72430C.1
atggctgcggcggcggcggtcaacgccggcgagaggcggctgctgctgcggcggctgcggcggcgaagtggctggggtttgggaggtcgctgctcggagaagaggaagatcggggggaggtggagggcgaggggtgaaacggtaaattcggagaaaatgccgcgtggttgcgagaaagcgagcaggctgtcgctgtcgctgacctgtggccgcgggaccgggcgcaactgtttggcggtggccgcctcgtgtggatga

SEQ ID NO: 72014 - DNA, 438 bp, Oryza sativa
  Clone ID: PAT_MRT4530_72431C.1
atgcaggttttaaaaaaacagtattacccaaccgaggaggtggaggtgggcgacaaggcgatgctgctcctcttggaggcggaggcgagcgattccccctcccccttcccctctcggtgcaagacgacatcagtggcgtcgacagcggggtggagaatagggatagagatgactaatgagtacggggatatggtggcagcggcgacggacgtggaggtgaatgactatccagcgctaagagccaatcctcgccataaccctaaacgtccactggggagagaaatgtccgtccaggacatggtggcggcaacgacgaatgcggaggtgaatgactacccgacgccaggagccaaccaccgccataaccctaaacggagaagccgatgcagcacaccatcactggcgttgacggtggaaggcgaatgccagccgcaatga

SEQ ID NO: 72015 - DNA, 477 bp, Oryza sativa
  Clone ID: PAT_MRT4530_72432C.1
accgctcgctcgctgctccccgccggggactgcgaaacaacccgccgccgccgttgcgcgccgtccggtcgcatcccctggcctggccgtcgccggcccgcccgcggcgcactcctccatggccgccaagtgggcgcagaagacaatcgtcatccccgcccagcgccggggatgccacctcatcacccccaagattctgagggagattgagggcgacctgtccgggttcaagtgcggcttggcgcatctgttcttgcagcacacaagcgcttccctaaccatcaatgagaactatgactccgatgtacaagctgacaccgaagctttccttaaccgaattgtaccagagggccgatctgctccttggaagcacactctacaaggacctgatgacatgccagcacatattaaatcatcattgtttgggtgtgccctgacaatccctataactgatgggcatctccatatgggcacttg

SEQ ID NO: 72016 - DNA, 2922 bp, Oryza sativa
  Clone ID: PAT_MRT4530_72433C.1
atggcgcctccgccgtcgcttgcttggatacccaacatcctcttgcccacagtaattcattattcatccaccaacatgtctgctaatcccaaccagtcgttcgacgatttcaacaagcaagcctccagcaatttcaactccttcctagccatcgtcgtcgtgctttcagtggtgagcattgctggatcagtcgccattgtttacctcgtgtacagatgtgtcaagaagaatggcctcccggccgtcaacatcaacaccaacccgacggcggcggcggcgatgtacgccgtggtgccggactcccagatacgcgacgccaccgtcgagaggtttctcaaagagatcgccggcgagaagcccatccggttcacggcgcagcagctggccggattcacgaacaactactcggcccggctcggcgccggcggcttcggcaccgtgtacaagggcatgctcccgaacggcctcacggtcgccgtgaagcgcctccacgtcggcggccatggcgacgggtggtcgacgtcgcaggagcagtttatggcggaggtgggcagcgtcgggaggattcaccacatcaacctcgtcaggctgttcggcttctgcttcgacgccgacgtgcgcgcgctggtgtacgagtacatggacaacggcgcgctcgacgcctacctgttcgaccggagccgcgccgtccccgtcgcgacgcggcgcgccatcgccgtcggtgtcgcgagggggctccgctacctccacgaggagtgccagcacaagatcgtgcactacgacatcaagcccggcaacgtcctgctcgacggcggcctgacgcccaaggtggccgacttcgggctggcgcggctggcgagccgcggcgacacgcacgtctcggtgtccggcatgcgcggcaccccgggctacgccgcgccggagatgtggatgcaggcgggcgtgaccgagaagtgcgacgtgtacagcttcggcgtgcacctgttcgagatcgtccgccggcggcggaacctcgacgacggcggcgagccggggagccagcaccagtggttcccgatgctggcgtggagcaagcacgaggccggacacctcgccgaggccatcgagggctgcgacgccatggacaagcaggagagggagacggtggagaggatgtgcaaggtggcgttctggtgcgtgcagcagcagccggaggcgaggccgccgatgagcgccgtggtgaggatgctggaaggggaggtggacatcgacgcgccgccggtgaacccgttccagcatttggtcgcgtcgccggcggctgcgcttaggtggacaagcactacagattcagctgaaagggttgcctcgttcagctccggggcgccgctcgcggcggtgctggtcaaggtgtaccggggcgccgagagctgcggcgccgcggtggccgccgagatgaaggcgacggcgcactacgccgtggtgcccgacgccgcgatgcggagcgcgacggtggagaggttcctgtgggagatggcgcacgagaagcccatccggttcacgccgcggcagctcgccgggttcacgcgcggctactcggcgcggctcggcgccggcgtcttcgggacggtgtacggcggcgcgctccccaacggcctcgccgtggccgtcaaggtgctccgcggcggcatggacaggaggaggtccgaggagcagttcatggcggaggtgggcaccatcgggaggacgcaccacatcaacctcgtcaggctgttcggcttctgctacgacgccgccgtgcgcgcgctggtgtacgagtacatgggcaacggcgcgctcgacgcctacctgttcgacctgagccgcgacgtcggcgtcccggcgcggcgcgccatcgccatcggcgtcgcgcgggggctccgctacctccacgaggagtgcgagcacaagatcgtgcactacgacatcaagcccggcaacgtcctgctcgacggcggcatgacgcccaaggtggccgacttcgggctggcccggctggtgaaccgcggcgacacgcacgtctccgtgtccggcatgcgcggcacccccggctacgccgcgccggagacgttgatgcagtccggcgtgacggagaagtgcgacgtgtacagcttcggcatgctcctcctcaagatcgtcggccggaggaggaacttcgacgaggccgcgccggagagccagcagtggtggccgatggaggcgtgggccaggtacgagcgcggcgagttgatgatggtcgacgacgccgccgccgccatcaatcatccgagcgacgagatctgtagtggcagcgacggcgaggccgtggtgaccgtggccgaggccgacgacgagcggcggtgcaaggaggcggtggtgaggatgtaccaggtggcgttctggtgcgtgcagcagcggccggaggcgcggccgccgatgggcgcggtggtgaagatgctggagggcgagatggacgtcgcgcctccggtgaacccgttcctgcatctcatggcggctccggcgccggtgccgaatccatgggcgacgacgacggcgagcagcggaaacgccgtctcagaaaacatgaggacggcgacggcggcggtaggggacgagcgcggcggcggcgggggattgcgacggcggcggtggggcatggacgcggcggcggcggcgtcgtcgacgggggacgggtgcggcggcgcttcctcctctggctacttcttctcgccagcggtggcaccggctgctgtgaggaggcggcggcagcgtcggctgctgcaaggaggaggcggcgtcgaaggcctcgatagcctggttggaagccttcacgccctcgaagtctgctgccatggcacgctaggcgctgaggatgggttcggcggcggtggccggagccttgatggcctcgaggtcggcggtcattga

SEQ ID NO: 72017 - DNA, 327 bp, Oryza sativa
  Clone ID: PAT_MRT4530_72434C.1
atggcgtccgtgcccattccctcgctcatcctctctctctctctctctctctctcggaggccatcctactcggattccagcgcgctcgtcccccagatgggcggtgggaatgaaagcttcggagtagtgttactcgagatgttaaccggtagacgatcaatggacaagaagcggcctgctgggtttgggtatgtattcaaaggatggattgatccaaacatcacatctcctgcaaaactcggtactgatcttacagttgttgtcagaagtttggagcaggatgcacttcaaggtcacagagaatgggtggattatggcctttgttaa

SEQ ID NO: 72018 - DNA, 1149 bp, Oryza sativa
  Clone ID: PAT_MRT4530_72435C.1
gccccccccgagttttttttttttttttttttttttttttttaattacgcttacagttctcaatcactatatgtcgactgtcaaacaacattaggcatagtgttcgactgggcatagtgttcgacggagattaaattgggaaattgaaatgtatgccttttgcatgcaatatataccctacgatgccgaagcagccctatatgaattcccaacaaactgacaatcacacaacattaccatacagttttattatatatacatgaatcttgaatgcttcggctatcaaattgcgagaataccatcaagctatcaaattctcacatgtaattgcgagaataccatcgatcttcaggagaccatttgtcttcataccttccgagcgagtaccccacagcaggcatatcagcaagatgcagaggatctggttctatgccatagtctgtcagtggtcggtgctcaagaatcttatcatgatcaatcacgaaatctggaatttcaacttccccctttctgatgtccccccaaagatactccagccgactaacatacttgattttccaatacaaacctccacttaaaaagagcctgccaagcgtggcgatggccaacctagagcgaagcccaggatgcaagaagtataagatctgcagtctctccttgtattcaggtggaagatcttcatagacccccctcaagattgacataccagggttgttatcatctgactgcacagtgctgtgcatgtacaaaaggcagaatggcccctctggcaattcggtgcgcagcttgtgaagaacatacttcttcagacgatcaccacctatgacaggagcagggaagaacctgccgacgacgcggacgatgcgcctcccggccctgtcggtgccctggacgcggacgacctggagctcttcgaggtcggagaagtcctcgccgtcggcgggcgcggagaggtcggggaggcagtcgtgccactcctcccggtcggccgggttgaggagcacggcgccggcgtcgaccgcgaagtcggagcccagcaccaccacggagaagtcgccggtgccctgcgcgagcgccatggccgccgccgccgccgcacctcacgccgtcacgcggtcgatccccgcgccggccatcccggacgcgtgg

SEQ ID NO: 72019 - DNA, 203 bp, Oryza sativa
  Clone ID: PAT_MRT4530_72436C.1
cacaaacgacactaatttcctttccattttatctcccaagaacttgtttagaaccccacacattctgacattcacatatgttatagtgttcattgcattatgtctggtaggaaaaaatgaagaagaataggaggatatagtagtttaaaaatataaatgtgatgtttagttttctagaaatgcattggccaaagttgttcaag

SEQ ID NO: 72020 - DNA, 549 bp, Oryza sativa
  Clone ID: PAT_MRT4530_72437C.1
tttatatatcaaacatcggatgagtgaacaagaaattcgacaggttgatagatataaatgggcaaatgatcgggaagattaagattgcatatacacaatgattttcacttcatttttgcttctattctgcaaaccatggatatgctctctgttttggtaatcgtccaataactagcaataacatgctctgaattgtgatgattgtgaactaatcctagcgaccaacttgatgatgttatagtcaggattgtaattactgtttctagggttctacataaattggcttgctagggttggatgaataatgaatgaatgaatgctgatgcaagtgcagtactggaactagaaaagctaatataaatcatactaacataattaagtccttgtatatgcttgcatgatgaaataactgaatttggcacatcagcaggatcatattctaaaataaatcatattgaatgatgcagtaatttacatggttctatactttgaaaatcatgccaagatatgaactatagagaatggaattataaccccatgaaacctgac

SEQ ID NO: 72021 - DNA, 354 bp, Oryza sativa
  Clone ID: PAT_MRT4530_72438C.1
atggagttcggatgggccctgcgacggcctatgcgacttttggattcacctaggcacgagaggggactgcccactgccttgcgatgagtgggggtaaaacctgaggtgtggtatgtttggttagaggtggttatgcgaagggtcctgacacggcctctttccgacgtggatctgtatgtcaactttgtcgtttgtgtaccctggccggtcctggacatggattttaatgcacattctgcttggaattctattcgggaatttctgggcgtgacacccttgatggctacaaggtaacatttacttgtcgctgtgcttcttagaatctcacccagggcccccggccgaaccggcaaa

SEQ ID NO: 72022 - DNA, 507 bp, Oryza sativa
  unsure (1)..(507): unsure at all n locations
  Clone ID: PAT_MRT4530_72439C.1
atcgacttggtatggcctgtactncggtccaaaagttcttctggagtcgcatccgtgatcctgagttgttccaggattagggcttgtntgaccgttggcttacggtcggcattgacttcggtgacaggtatgtcatcgaatgaacgagggagaggtatattctctcgctcgtaaacctccggcgaaggattcgcaggaggaaaaaccagtctcttacgggggactggttcactcgcaggccggttcacggctgtgcgacgcaagcgattcccttcgaatcgctgatcatcagccttctntaagactgatgcaatttccccaggaaacatgtcctgtggaagagaacggagccatttcgctagctccgtgggagtcggccccgtgggaccgatggaagtaagcacgcgnttctggcgttgcttaattgtactcgacnnggtgttgccaagttgggtgcttcctgcgactaagtagtccttataggaagaaaaaaaaaaaaaaaaaaaa

SEQ ID NO: 72023 - DNA, 1098 bp, Oryza sativa
  Clone ID: PAT_MRT4530_7243C.1
gcacgaggctcaagagtgtcgcaacagcttgtggacacaaacatgccaaccatgccggccgtcgtgtccgccgccggcgccgccgcgccgtgctccaacgtcgtcgaggacctcgtcggcttcctccgcgtcctcagcgacggcaccatcctccggtcgccggggccggtgttctgcccttccaccttccccgacgagcacccctccgtggaatggaaggaggccgtctacgacaagcccaagaacctccatgtccgcatgtacaagccgtcgccggcgagcggcggcgtcggcgccggcggtggcgggaagctaccggtgctcgtctacttccacggcggcgggttctgcctcggctcgtgcacgtgggccaacgtccactccttctgcctccgcctcgccgcggacgccggcgccgtcgtgctctccgccgggtaccgcctcgcccccgagcaccgcctccccgccgcggtcgacgacgcggcgggcttcctccactggctccgggaacgcgccgtcgacggcgacggcgacggcgacggatggtggctcgccgaggccgccgacttcggccgcgtgttcgtcaccggggactcggccggcggcaccatagcgcaccacctcgccgtgcgcgccggctcggcggcggcggcggcgcccgacgacccggtcgcgatccgaggctacgtcctgctaatgccgttcttcggcggcgtcagccggacgccgtcggaggcggggtgcccggcggaggtgttcctcaacctggacctgttcgaccggttctggcggctgtcgctgccgccgggcgccacgagggaccacccgatggcgaacccgttcggcccggacagccccgccatggacggcgtcgagctccccccggtcctcgtcgtcgccggcggcctcgacatgctgcgcgaccgcgccgtcgactacgccgagcggctgtccgccatgggcaagccggtggagctcgccgagttcgccggcgagcaccacgggttcttcacgctcggccccggctccgacgccgccggcgagctgatcgccgccgtggcgcgcttcgtcgacgtggcagcgccgccaccgaagtag

SEQ ID NO: 72024 - DNA, 408 bp, Oryza sativa
  Clone ID: PAT_MRT4530_72440C.1
atggagggaggcggcgggggtggagggggccggcggaggcatggacgaaggggttcgacggcggcgcgggtggagggggccgttggcggcgcggggcggagggcgtcggtgatggcgcctacgagcgacaacgacgactaccgcgccacgacgacgactaccgccggccacgtcgcttcccctctccgcgacccctcctctcccagatccggcggcgcctcagcggggagggccggtggcggcagcggttcggcggggaggtccggtggcagctcggcgaggctcggcgacgaggagattacaaagatgccagttctagaatccggcaccgatgacagaagtggtgccgattgggaaaaccggtacctaagggggtttcccgaccggcaccaattgcagtttctgtag

SEQ ID NO: 72025 - DNA, 165 bp, Oryza sativa
  Clone ID: PAT_MRT4530_72441C.1
tgcttgcaagggtgaaccgatggccacgatggtagtagatccttaaccaaggaggtggtatcaggtgaggagaacaaactagaatgtaaatggggaatgtgatgtgtaacgggatggggtggccccccaattggctatgcagagtgtgatgatgatgactacagt

SEQ ID NO: 72026 - DNA, 1264 bp, Oryza sativa
  Clone ID: PAT_MRT4530_72442C.1
ccggcgcgtcggccgcggagacggcggagatggcggcgaccgccaggacgagaggatggcgagggccttagatccggcggcggccatcacttcgattcggtggctggtcgtcggcggcggcggagagaaggttctagaaggcggaggaataatggggagagagagagaggatgttttgcttgtgctcgtttggaggttttttttttttttttttttttgaaatggaagcagtaataatatactactagtaatcagtagcggaagaacactcagatgagagtatctacaagcacacacccacacaaaatgaacacagatcaagcactagctagtactagtagcggcagatctggagcaaaatgagacacgaataataaataataataataataaccaacaaatttcgctagctagcgatggcagtaataataacaataataataatggtgataaatagaaaaatagtagatctaggcgaaggcggcactagccggatctcccatcgacggagagacgggacggggctcagtggcggatggcggcgaagaggaaggcggcggcggaggcgacgagcgccgcggcgaggggcgtcgcggccgcgcaggcggcggaggtggggctgggcgccggcgcgtcggccgcggagacggcggagatggcggcgaccgccaggacggcgaggatggcgagggccttagatccggcggcggccatcacttcgattcggtggctggtcgtcggcggcggcggagagaaggttctagaaggcggaggaataatggggagagagagagaggatgttttgcttctgcttcctcctcctccatctcctctcctccgatgcttcacctcgtcgccctaaatttatcacccagaggcgacttggcaagaggaggccgcggaggagagagagattgataggtagacagatataggtagtgatcgatactagcttcaaaaggagggattttttgttgttcttggatctttagagagagagagagagagagagaggagatgccgaccggggcgatgaagaggctgttcgttgagtcgtcgtcgtcggcggcggcgtcgaactccggcagggaggcggcggtgctgtgcgcgccgcggccgaggagggtccaggtgcacccttgcagcgctgacctcatcctcggccctcctcctttcctcctctcctccaacaacaccaacaagcaaagggaagggaagagtaaggaggaaacaaaattcaattcatctctttctcttctcctta

SEQ ID NO: 72027 - DNA, 1682 bp, Oryza sativa
  Clone ID: PAT_MRT4530_72443C.1
atgacgaggcgaggggggagggggaggaggccggccagccggcgaggccgggcggcgccaccaaccccggctagctccacctcgtcgtgcgccaactgcgagcgagggagtggagtgactccggaagccaagcgcggcgagagggatggagggggcggcgccgcttctggcggcgcgtggggaggaggaggtggtggaggggaggcggcgcgggggagggggcggggcgacgtcggcgcagacgctggggaacgtggtggtgtccatcgtggggaccggggtgctcggcctcccctacgcgttccgcaccgccggctgggtcgccggctcgctcggcgtcgccgccgccggatgcgccacgctctactgcatgctcctcctcgttgactgcagagataaattggaagagaaagaatctgaagaaacctaccatggtcactatacatatggtgatttgggtgaaaagtgttttggcactataggtcgatgcttgacagaaatcctcatccttgtttcccaagcaggtggatctgtagcttatctaatattcattggccaaaatcttcattctgtcttcagccagttgatgtcaccagctgccttcatctttgccattctcctgcctatgcaaatcgctctatcattcatccgttcactatcttctctctccccattcagcatatttgcagacgtctgcaatgttcttgctatggcaattgttatcaaagaggatcttcagctttttgatcacccatttgcgaatagaagtgctttcaatggactttgggcgataccattcacttttggagttgcggtcttctgcttcgaaggattcagtatgactttggcactagaatcatcaatggcagaacggagaaaattccgctgggtactttctcaagcagttgtcggtatcataattgtctatgcatgttttggagtttgtggttacttagcctatggggaggccactaaagacatcataacacttaatcttcccaatagttggtcttctgctgccgttaaggttggtctttgcatagcactggtattcacatttccagtcatgatgcacccaatccacgagattgtcgaggaaagattccaatcaagtggatgtttcccgaagctctcgcacaaggttcgcggggctgaatgggtgggcctgcactcaagccgcatcgtcatggtaactatcctgtctgtggtggcatccttcatacctgcgttcgggtccttcatctcctttgtcgggagcacggtttgcgcgctgctctccttcgtgctgcctacgatcttccatctgagcattgtgggttcctcgatgagtccgtggcgacgctggggggactacggtttccttctcttcggccttggttttgcgggctacgggctcattagggctctcttctcacattgactgatgatcccaatggcaagaaccacatgcaggattcaactcagaatatgtccatctgggaagtgggaacgaaggcattgagatgagatgtatttactgcctttgttgttcacagtgtaatatatgtgatgccagatctaggattatgcgataatgatcttttgttggtgtaagttatatgtatattaccagtgtcacgcagtgacgcatggatcatgctatcccaatcattttcatatgtttttaaaaaaaaaaaaaaaaa

SEQ ID NO: 72028 - DNA, 539 bp, Oryza sativa
  Clone ID: PAT_MRT4530_72444C.1
tgccgctgatcctgctcacatgtttatcttctgagcctagagaaaggtgcgataatggaggtccatagatctgagctattggagaacccaggcgataatggaggtccatacacttacaagcttatttgctttctcttctcttcttgttttgtcatagttctaagctgcccagacagaaatgggaaggcatgttagcaggcatgaagatggtcctagcagtagagttggacgctacagatatctataaagatgggaagatgtgctgctgtgatcaaaaccaagcatcaagttgttctgtgagtacatgataaaaacaactcgggtatctgagatcttaggcagctatttggcttggtgagcctatgtttatgggttggtcccgtagatacagatcgacgttctacatgctgtcccttgttattgtcgttgtgtttttcattcctcttgggtattcgattatcgaaatatagctcgtttttttgcttgctgttttttttaaccagcaatgctttcgattgatgtgtaaaaaaaaaaaaaaa

SEQ ID NO: 72029 - DNA, 536 bp, Oryza sativa
  Clone ID: PAT_MRT4530_72445C.1
ctcaattcaccacacaaatcaaattcatccagtatcaaatgggtttgggtagtacaatatgcaacaatgcgtgtaacaacctgcatgtcttgcccagcatgaattggcaagctatgtgatattaataaaaaaataaaagctacgagagtcatagtcattattacatttcatcagcatgcatatattagatatgaatggtgcttgcagaaaagtacagtaacaatgagtctaattagctagtagaagaaaattaacaatgtaattaataaggggacaaactaacatatcttgcgataaattgagatctgcttgttctccagatcaaatcctatgttgtggtcaagttggggtgataagcccagtaccgctgtcccatccaccgtcttgtcaacgataaggcacacatagcgctcctcttggtcgccattcatggaggtgatctccataaaggtggcattcctggacaactgcaaatcaacgccaccatggaaatgcagcgttatagtggcattgtcagcaatatcgtcgaaacagca

SEQ ID NO: 72030 - DNA, 129 bp, Oryza sativa
  unsure (1)..(129): unsure at all n locations
  Clone ID: PAT_MRT4530_72446C.1
tttaataagaatggagnatnattggcaccaacatgaggcacgctgcagctcatgccgaaaggctgcgttattaaaatgtacacattcgccatacaaaagattttaaagtaaacagctagacatttgatt

SEQ ID NO: 72031 - DNA, 855 bp, Oryza sativa
  Clone ID: PAT_MRT4530_72447C.1
atgtcggaactgcgcgccgcacatgctggagccgtcgccgtcgccgtgcacgccgcaaccgtcgcctgtcgccgcctcaacatgactgtgctcggtgaaggaatgggcttgggtccttatccattcattcaagggtacaacagctcaggcaccgcgtcagatttggtagcagaaatgagggccctcgaggcccaggcacgcgcgtgctacagcgagcgccccatgggcatggactccgcgtttggttcaccgtcatgggatatgacgggtggatttgtaggttctcatcatcgccgtagtcgtgttctcatcgtcgttgcgacggcgctcgtctcccgcgtcggatctccgagcttgtcgccgcctcctcccgtcgacgcggcgctcgccgcctgcatcgtcgtcgtcatcgtcggaccgtcctatccagtcttcgcccagcaaccaaacatccaccaaaaacaaaccgtcatatcctattcatccaaatcctcctatccaaacacacccttactggacggctgcttcatccttgagttcttcaagtgcgccaccgaggaacccgacgagctccgcgacgtcgactggggccacgtcatcttctcgaccgacctgctcctgatggagaaccagctgagttcgagcgtggtggaggccggcgacggtctgggtggcgaaagcaggatcgcggacggcgggaggcggcagagggagctcgtccacccgatcgccgccgccactgccggtgacgacaagctcgcatccgccatcaacgccctggaggagctcctccacaagggtagcccggcgctagcggcgtacgagcgccatgtgatcttcctgaagcgcgcgtag

SEQ ID NO: 72032 - DNA, 651 bp, Oryza sativa
  Clone ID: PAT_MRT4530_72448C.1
atggcaactgaacatacaattgatatgattagagatagcaagagaactatgctggagactgaagatattggagtcttcctcttgcaggacctacatcaacagcgcggacgtctgatacatgctcatgatatattgcataacgtggatgataacatcggaaagagcagaaggatcattggggccatgcatgcccgatttgggttgggaataattggtatgtcacttgaagatcatggctgtcaatttttggcaggaaacatggtgaagccatctgattggcgcctcgtcctcactgccgtacatgtactggacgagaaggttcaggaggggctctctgtcgccccgcacagtaccggccacgtatggcggtgtagagagcctctcgaggacgaagaacgggacctggacacctggttctccatcaggagcaggtcggtcgagaagatgacgtggccccagtcgacgtcgcggagctcgtcgggttcctcggtggcgcacttgaagaactcaaggatgaagcagccgtccagcggcgagcgccgcgtcgacgggaggaggcggcgacaagctcggagatccgacgcgggagacgagcgccgtcgcaacgacgatgagaacacgactacggcgatgatgagaacctggcgatga

SEQ ID NO: 72033 - DNA, 315 bp, Oryza sativa
  unsure (1)..(315): unsure at all n locations
  Clone ID: PAT_MRT4530_72449C.1
ttggcgggtagttgttggcggcgntggtgaggaacccgtgggcgtagaggagggtgtagcgtgaggggggcagntggtgcccccatgggagggaggcggaagcgntggaggcggcggaggcgcgggtggaagagcgcctcggagaaggaggggtagagggagacgaggaggagcggggactgcgaggcgaggaggcggcgcaacgccgggaggagcgcgcggtaggaggcgcgcagggagaagaaatcctccagggacgtcaagcggcgggctatgtcagggatgagatctagcgacggtaacgacgagtcggcg

SEQ ID NO: 72034 - DNA, 132 bp, Oryza sativa
  Clone ID: PAT_MRT4530_7244C.1
cactttaagaggggacagacagaggcagtgtatcaaacggtatcaagtgaggccagatatctagggagatacaccgattttaaacagacgtagactatacggcatagtatatacgacgagactgtggaaaga

SEQ ID NO: 72035 - DNA, 1176 bp, Oryza sativa
  Clone ID: PAT_MRT4530_72450C.1
atgccacgtcggttcgcgggtgccacggtggccaggggacgacgccaatcatcctggcgttgtcccgttggaccacgtcgccagccactctggcgcccaaaaaggatcatttctgataagttttttcaggggtctatttgtaaaataagttttgaaaaaggaccaaatcgaaaaaaattcagctttacctttctagttttcgctgctcaatgcgatcgtgtcgtccttggaagcttcggtggaggcaacattgggcgccctccgaggagatcaatggagggcgcgcggcagagcggcggcgcgctactcgccatggaggaccacaagtggcgctgcctacaggacctgctatctcgttgcgcaggctcaggcaccgcgtcagatttggtagcagaaatgagggccctcgaggcccaggcacgcgcgtgctacagcgagcgccccatgggcatggactccgcgtttggttcaccgtcatgggatatgacggtccatattttgttggatatgccgcctcctcccgcccgctgccgccgacgccgcctcctcccgccgacgcggtgctcgccgcccgcattgtcgtcgtcatcgccaggttctcatcatcgccgtagtcgtgttctcatcgtcgttgcgacggcgctcgtctcccgcgtcggatctccgagcttgtcgccgcctcctcccgtcgacgcggcgctcgccgcctgcatcgtcgtcgtcatcgtcgggttctcatcgtcatcatcaccgtcgtcgtcgcggcagcgctcgtctcccgcgccagatctcctagctcgccgccactccctcttcctgccgacaccgtcctatccagtcttcgcccagcaaccaaacatccaccaaaaacaaaccgtcatatcctattcatccaaatcctcctatccaaacacacccttactggacggctgcttcatccttgagttcttcaagtgcgccaccgaggaacccgacgagctccgcgacgtcgactggggccacgtcatcttctcgaccgacctgctcctgatggagaaccaggtgtccagtacatgtacggcagtgaggacgaggcgccaatcagatggcctccggcagtccggcgaaagggaggtcgaccaccttgtccaactgtactacgagtgtttcgtgtccaatcgggtggcgatgcgacga

SEQ ID NO: 72036 - DNA, 307 bp, Oryza sativa
  Clone ID: PAT_MRT4530_72451C.1
atgcgtggcaatcatcatgaagcacgtcaacctaacccgacaacgtatgccgtgccatattgtcagattcagactcaatcggctaaccccgtcccactcgatctctgctgaccctagtcgcagccgattcggacttcagccgatcctcactctgtttccagggccgatttccacctcgaactccatctcgatttcttctttatctccgatccttggattaccaaatttggtcgttaacaccgtcccggccgacctctcgattcagcggtccgccggtccaatcggtgggtcgggcagttgaaccgtg

SEQ ID NO: 72037 - DNA, 206 bp, Oryza sativa
  Clone ID: PAT_MRT4530_72452C.1
atggcctccattcccacacacgacccgcttgtcagcggctcggcttaccatgtggagggagtacgcggcgcggcgctagggtgtggagcggggcgcggtgcatgcgcgtggctcgcgggggtgcggatgcagcgggcccacgcgcagcctcacggctcgcggtggaccgcgcgcgcgagcggggcggagggaagcggcggaccggg

SEQ ID NO: 72038 - DNA, 247 bp, Oryza sativa
  Clone ID: PAT_MRT4530_72453C.1
ataaaagaaaaaaaaaaggaaaatcgtgtctcggctcgtctcggattcgtctcgggggattcccgagcagcttctcgaaaccctcgcggcctcgattccggcgatggcggagcccaacccgcaagtggagagggaggtggaggtggaggaggtgaggaggcctcatctgtggtacttggagcccaggcaggggggggaaggctaagccgagatcggggtagaggggctctactcgcttgtcaaggac

SEQ ID NO: 72039 - DNA, 315 bp, Oryza sativa
  Clone ID: PAT_MRT4530_72454C.1
atgacgctctggcgacgggcggcgctcaggaagaggcggacgagcggcagctgcacgctaggatgggaggggagagagtttccggcgatgggaaaaggtggccgaggttctccttgtccttgtggagcagagagaggtgacggcgtggaccaaagcggtgttgcgacgcggctggaagtggcaatggcgacggatagaggtggtgcgcgtggcggcggcgtcccggaggtggaatgggaaaatggagtaggggccggggtggagatcgacacggcgatgccgatggtggtgtcggcgcggctcggtggtggctag

SEQ ID NO: 72040 - DNA, 562 bp, Oryza sativa
  Clone ID: PAT_MRT4530_72455C.1
accaaaaaatgatgcatgtcaaaattgaatatgccgaccttaccatgactaacaaaacttacacaaagaaaaccaaggtgggttcaccctaatgtcctcccttttgcaaagcacctcagactaatacacctttgagattacatactatataaatatatatataactttacatgaaacttgcagaaaacatttcttctagtagaaacaatgatgctagaaaagcatgcattcacttgtagttttggattatcttagataaagatgagtatgtgcccacaccagcacagcagagcccaacaacaatgatgaatacacatagcagtacctgataccaagtcactgttctcctaaggattgccaagaagcatgcacatggtagaatatacgccacaaacatggtgaggaaggacccaactagtgacataacaagtccgaagaatggaacagagagagccacaatgagggaagatagcacaagtgctgatctaagcatgactatgtttgagtatgtctgtcgattaggaggtagcaactcctccatactaagggcaagaggagtcat

SEQ ID NO: 72041 - DNA, 261 bp, Oryza sativa
  Clone ID: PAT_MRT4530_72456C.1
atggtggtagtaatcgaggatggcagcatgaatgggataccaggaaaacggcggcatcggctggagacgacctcggctccgttggcgtcggtggctggggacgacctcggctccgtcggcggcagcggcggtggcggatggggaggacgtcggctcaggctgcagccgatggggaagagggacgacctcgagtgcacggtggcgatggtggtggcggcggcggcggaaggggccttcctcggcgccggcgccggcggatag

SEQ ID NO: 72042 - DNA, 558 bp, Oryza sativa
  unsure (1)..(558): unsure at all n locations
  Clone ID: PAT_MRT4530_72457C.1
gtacctaatacgctgttactatgtctgacatgagctacccatgtcaacactgacattttatttaacttttcctatgtgaagactggagcaggaaagacatacagcatggaggggccgagcatcttgcattgcaataagcagaaaactggactagtccagagagttgtagatgagctttttcaatctctacaatcatcagaaagcatggctatgtggagtgtgaaattgtcgatggtggagatatatttggaaaaagtaagggatcttcttgacttgtccaaggacaacctacaaatcaaagagagtaaaactcaagggatctacatttctggagcaacagaagtatccatccagaatagttcagatgccttggagtgcctttctgaaggaattgccaacagagctgttggagaaacacaaatgaacctggctagtagtagaagtcactgcttatacantttntcagttcaacaaggatcaacttctgatgagagggtgagaggagggaagatattctttgtgatttagctgttcagagaaggtgagaaaactgtgctg

SEQ ID NO: 72043 - DNA, 1630 bp, Oryza sativa
  unsure (1)..(1630): unsure at all n locations
  Clone ID: PAT_MRT4530_72458C.1
ggaataaacgcctcgaccctcgcgtccgctgcctaccatttcctcattngaaaaaaacagagagaaagttcacangaacccaaccccagcagcacactctccatcgctagctctctctcttctttttgttcgctcggttttggtgtgttctgctcaccagccactccttcactacaaaagcctgcttctgcagggacagataacactagaagtaaagcatactacacacatatacaagcacagttcagctgcacacacattttctgaatacaacctcttctcacacaacccagctgcccangcacaacgctagctcagtgaaggagcagtgtgctctttgcctctttgctttgctttgcttgctgctnagaagctnggcttggctaactcangctatgagaaccatcacagcaagaaacccccatgattccctctccttctctaggaggcatttcaagtggccggttcttggcaagagctacagccatggcgccacgagaggggaggaggattacatgaagagctcggaagctgaagaggaggaggatgaggcgacaatggcgttctcctctgtctgtccgagtttccattctgaggacttcgtttctcctcccaagaagccgccgcggcagcagcatcctcagcagcagcatccgccgcagcgtaggaaggtccgcacggccgtgtcgcgcctgcgctcggcgctggcggcggccgtgacggggcggcaccggcaggtcggcctcggcgcgcggctcaccggcacgctctacggccaccggcgcggccacgtgcacctcgcgttccagctcgacccgcgcgcgtgcccggcgctgctgctggagctcgccgcgcccaccgccgcgctggtgcgcgagatggcctcgggccttgtgcgcatcgcgctcgagtgcgagcgcgccaagggcggccccgcccccgccctgcccaccgcgacgggcggcgggaagaggctgctcgaggagacggtgtggcgcgcgtactgcaacggcaagagctgcggctacgcggtgcgccgcgagtgcggcgccgccgactggcgcgtgctgcgcgcgctggagccggtgtccatgggcgccggcgtcatacccgccgccagctgcggcggcggcgagggcgacgtcatgtacatgcgcgcgcggttcgagcgggtggtgggctcgcgcgactcggaggcattctacatgatgaacccggacagcacaagcaccagcagcaacagcaacagtggcggtcctgagctcagtgtctacctcctccgggtttaacggagccatgtctgatttttttttctctctctgttccttgttctttgcccatgtcatctcatcatcactggaaatggattaggaagttgctgtttagactttagatgaatgttcatggtggtttagtgttgattatgcatagtgttaggtcatggactcgtggtgataagagagtcatgctgctgtcagactgtaatgactctatagatgaaggattagtgctctggcaaatcaagtactctctggtgtggtttctaaatgcaagtggtagaatagtggtacattactgcgtttattgtaataatcaataaagaaactctttaattttcaaaaacaaaaaa

SEQ ID NO: 72044 - DNA, 456 bp, Oryza sativa
  Clone ID: PAT_MRT4530_72459C.1
atgaagcaaaaactacacaacgatgaagcacatcagatccccaatctctggcgcctagaagaaccaatttcacgaatcaccaagcagctacacgcgtcggatcagatcacggccttgcgcaaaccaggcggagagtgggatgggcaggacgcggagattggggggggaagcgacttacatgaagaaagaggcggtgaacatgaggccgacggcgaccatgacgacggccagcgtcgggtaccagtccaccggcacggggctcgagatcgccttcgccgcctgcacacacaccacaccaccacccatccccacaacggcgaggtcagccagcacatcaccgcagccttgtcaaaccctagatccctaggagatatcggtcgcggggcttaccatctcgccggatctgagagcctctgcgccgccgctcttcgtctccgccgcggcgatctgtggtga

SEQ ID NO: 72045 - DNA, 801 bp, Oryza sativa
  Clone ID: PAT_MRT4530_7245C.1
atgcctgcgagccccccccccaccagtggcacgtgtgtctccggcggcgccttgctgtgcgagtacgggatcgagtacggcaaccgcgccaccaccaccagggtgtacagcacggagaagctgatgctcaagcccggcgtcgtcgtcgagaactttggcttcgacagcggcgaccaccagcacggcccctacaagaagttcgatggccttctcggtctcggtggcgcgccggagtcgctcgtcggcggcggcgggttcatcgccctcggtgtgcccaacagcagcaacacggcggccggcttctcgttcactccgatgcgccgcatcccctcagtgccgacgttctacgtcgtggcgctcaccggcatcagcgtcggcggggcgccgctcgccatcccgccgtcggcgttctcgagcggcatggtcatcgacttcggcacggtcatcacggggcttctggcgacggcctacgcggcggtcacagcagcgtcggacgtggcggcgatgcgcgtggtggcgaaggtgctccgtgcacacaaggcgctcgggtggagcactggcgacccttgctctccgtccaaggcctggcgtccctgctcccgccgccgccctgccgtggccgagccgtcccggctcgggccggccgccgtcgcgcctctgctctgctgcgaggaaagaagaaagggaaaaaatagagaaaggaagaacggtgtccaggggtattttgatacttacacaactctttctctctctatctcgaccggaaataataaaattatgggaggagtgtccagcagctaa

SEQ ID NO: 72046 - DNA, 175 bp, Oryza sativa
  unsure (1)..(175): unsure at all n locations
  Clone ID: PAT_MRT4530_72460C.1
aacatataattacgatgaatgantactaatatatataaagaaggcccagcccccgtccttcctaaggtagttattccccttcgaagggggcaccccagagcctttaacgcgtacccagctttctttgtaacaaagtggctccctatagtgagctcgtattataaggtacgcgctg

SEQ ID NO: 72047 - DNA, 343 bp, Oryza sativa
  Clone ID: PAT_MRT4530_72461C.1
atgggtaatttttttttttgtctaattttgttaaactatttttaatattgttagtttttaaattagtgtaaaccaaatgaagaggaaaaaaccatttcaccggaatggcaaacaaggcccctaaggggcagcacaactgcatgcctaacaagtaaaaaacacggttacaagttacagccactgacttacaataactgggcacagtgtaaaaaaaaataaaggggttcctcacacaaaaaagtttttacaatgcccaaaaggctatacagaaagaggttttcctcccgtaaaaagaaaaaaaaaaaacttgtggggtgcttttaaccgcacgggggggggcccc

SEQ ID NO: 72048 - DNA, 231 bp, Oryza sativa
  Clone ID: PAT_MRT4530_72462C.1
atgtcctcacgtcgcccttgtacccggcggagtgggggtgggtatgacccgtcacgtccgagcgtcactcgaggaagggctgtcacaggcggggggcggcgcctggttccactcgagaaccggttgttgcttagcttccgggagaaggcacggtttaaagcccaggaaaagtggagtgggatccccctccgatagagggtaggtagagtatggtcacacttattacgaaca

SEQ ID NO: 72049 - DNA, 285 bp, Oryza sativa
  Clone ID: PAT_MRT4530_72463C.1
cacggagggggggggtgcggcgccgacaagcgaggcccgcatgtcagcggcgcacgggtggccggtctaccgtggaccgggaccacgcgggtgatccaccgccggtccacgggatcgacggcccggatcggcccggggccgatcggactgtgcggcggcggccaggctaggctcggctcggcacaaagccggccgagcggtcatggggacggtgcgcgcacgcgcacgcgccgttgcgaccacggcaaccgccggtggagaccgctgcgcaggggcccaaaggcg

SEQ ID NO: 72050 - DNA, 222 bp, Oryza sativa
  Clone ID: PAT_MRT4530_72464C.1
atggccccccctcttcatagcgaacctccactcaactctcgttttctttctccggttttcctcctctttgcctctttggtttcccctcagtcggggtctttggtaaactcttgcgaggacggtggccaggagtggcaaatatgcgtaccatcatacctgtacacagcgctgaatgttggtttgcacagggaaatgttggatatcattctgcaaaattggtga

SEQ ID NO: 72051 - DNA, 369 bp, Oryza sativa
  unsure (1)..(369): unsure at all n locations
  Clone ID: PAT_MRT4530_72465C.1
ccatcaaaccaacatttcttttatttatgaagctatttggatgcattgatatctcttgtantatatcttaatgaacttttgtcttgacaggcccccttggtatcttattcagcacattggaatcaatcttcttgtagaatttcttgaggtcttgaccacctttggcaaccaaatggtctacttcagtctcatatctttcatacagcgcaggcaaagtgagagcacacaaaaacccaacatatagtagagttgtgaaactgcatgtctctccaataactgccaatatccacagagatcctatcaccgcaaggaacttcctgagttctttcccgcatgaaatgtcatacaggactgctgaaaagtgcgcca

SEQ ID NO: 72052 - DNA, 357 bp, Oryza sativa
  Clone ID: PAT_MRT4530_72466C.1
atgacgtcatcaccggcggcggctcggcaccccgtactcaccggcgaacgacggcgcggcggcgcaaacggagggcaccaacgggtagagggcgacgcgacgaactcaccgatggctcggacgacgacgaacggcaaccgacggcgacggtggcgaggtcgaagcggcgtaggcgttcgggtcgacgacgacggcgatgctccggcgatcttcggtggaaacggaggacgggacgaggacggcgatgacttggcgaacccgacggcggccttcccgagcgacgacgacgaccggagcggcgacggcgcacgaccggacttccttcggcggccgcggcacacgggctctagtggctag

SEQ ID NO: 72053 - DNA, 798 bp, Oryza sativa
  Clone ID: PAT_MRT4530_72467C.1
ttaggttagcggcacctctcccttccagttgcccggcgggtcgtaggagcaggtgatgaagacgccgccggcgacgcactcggagcggccgcagccgacgagcttggtgtcgttccagacgatctgggtgaagtggccgcacatctgccccgggttgcagctctgcccgcgccagtcgtagacggaggactcgccggcccagctcttgacggcgtccgtggcgcgccagccccacccggtcccccagaacacgttctccccgtacggcgactccggcgagtgcatcatcacgcagtcgaaccgcctcgccgccgaccaccgccgcgcgtacctggccagcttgttgctccacttcagcggctgcagcccgtactgggcgcgcaccttgttgtgagcatccaggaactcgtgcgccatgtacttgtacgtcccgcgcccgccggtgaacgactgccccggccccaccggcgccgccgcctccggaccctcctcctgatcatcgccgccctccccctcgccctcatcgtaattgttgttgttattgctatcatcatagtacggcttctgattctggttctggttctggtcctggttctgattctggttgccgatgccgatgccgccgccgatacccacgccgacgttgacgcgaaatgacgcagccggccggatcaacaagatgaggtacaccaccaccaccagcgccaccaccacgacgcctggacctgcagatgcggccatcatgtatgtactctcctctcctctcccggacgcgtgggtcgacccgggaatccggac

SEQ ID NO: 72054 - DNA, 5724 bp, Oryza sativa
  Clone ID: PAT_MRT4530_72468C.1
atgggcaaccccaacctggggctcggcctcgcctcctcctccgatcacgccgcgggaccgcctcctccttcccgccgcgccccgcgtctggccaagcggcgccacgcggcggcctcctcccgctcccgccagccgccaccggcgtcacccgctgcggcgccgtggaatccgttcggcggagggggcggcggcggtacggacgcatcggggcaggatgggatcggggggatcgcgccgggtggcgttggtgttggcgccggggagggtcaggacggcggattcgtgtttggcggtgcggcttctgccacgagtcagcagcctccagtggcgtcatccaatggagaagcccccttcgtgttcgggagcgtcagggacagcttgcctcggttcgacgagggatgggcggcttcggcgaagctgcccgagaaaatggggaggatgaatcttcagactcgtggtgagagtagcgtcaatgccaacaagaaggataggagctccatttttggagttgatatacctggtttggttctcaacagtgaagtgaatgtgctcccggagaaattgacgcagttgaatttaggcaccagagtgccgttgcagggtgataatgacgtgccaaaaacattcgtgtttggaggcaatggaagcgggccttcttctgatggtactagttctgatgtccaccgtgcaggttcatatgcttctgccaatgcaaatggtgttgcagagaagctgacacaatatggtataggcaatcaagcgcctttgggaaggatgggcactgaatctaccaatgatgcaccaccagtttttgtgtttggagggaacgtatccagtgaccatgcggataggactaatgatgtttcttctggtgctaataccaatccatctgatacattcaatgttactgatggcacaggtctgtgtcctgagaagataagtgatgttccctttcagcagaagggaagtggaggtagtagtcgtcaagccgaagcgtttgtctctgggagtacttctaatgagggcagtgttttttcctctgctgccaacagtgatgcttttgttccacctagtagtgttaataatttgcctccagagttgccatcatgtttgaatataggaggtggagttacacagtgcaaacaaagtgataattctggttatccatcagaggcatttgtatttggaagtgatgcttccttgagctcacactcttcaaaaaaggtaatggacgatcgtggcaattttgtcactggtgcaaattcaaaggcatttacctcagttcatggtaacatggagagcacacttccagccaggatgacaaaactgaacttaggccatggagccccatccaacaacaataaagatgaaactgctcaccagccaccagaagtatctggttttggaactaatgcagccacaaccttttcttctgcccaggcagcaagcatgccattcacaagcattcaaactaatgtatcctttgaactaaagggtaatggagggaacttggctaatgaggatattggaaacattacacattctagatcagataatgatcaaggttatgggcctagtagttttgttttcagtagtggtagcaatgccgtccctccttccgaaggatatgcagaacatgcattacaagaggacatcaagaaattaaacatcaatagggaaggggcttcagtcggatctactaaagtgaatggatcttcccaatttgtgttcagaagtaaagcagaagccattccagtatttggtgctattccccagcccaatgttccggagtcacgcgcattttcacattcaaatcattcatctagcttctctacttctggaaatgatatgccatctttcagtttcaaaactacaaatacagcaagtgatactattcctggtgaatcttgtgcagtcagacaagagccagcctggtgttcaagagagagcttatttggtattgactatataaaatcagcatatagagataaaaaggaagcgcataaaaacgcaaggaaaaataaaaggcccaccaagttaaagcagcatgctcaaccccatcactttgcttctcaagaaacatgcaccactgggccagacatggatttagcaggtgactactcaccaatggattgttctccttattcagctacagttgaacaggtagcaaaagaagcatcagtgatgtctgatcagtccgttcatatacatgattatggtgtctcaaaccagagctccagttgtgctgaagatctagtttctgcaactgagcacttggttattgatgcagatcttccaacatgcgaagatgaaggtagaattcccaatgtagacacatctgcgaacagctttgctagcagcttttctagttttgatgaagaagtaactatacctatcgcaccacaaccttcttcctccaatatgcatgacactgctaatggtaaacctaaatcagccccagctgaagtttgggatgatgcttataggctcaacaatcaagggcaagcctatgaagagaatggctacagaacagcgcacgagattggtgaacatgccactttccaagaaagctcagaagattttagtgggctgaactttaccttcggtgcttctacatctccccaaagctccgtgtcaacacaaagacgtaacactagaaggaaggtaagaactaagtctggtcaactgcctaagccttcagttactcaggcttatgtacagccaaaatcatcacaagacaaaaagaccatgcagttttcccctgaaaaaaataaagcaggggattcagcagatgagcagtcaacaagaggtgcatcaacttctgcagccttggagacttgtgaaacctggcgtacaagtggaaatcaagcctacacaaatggtcactttgctacagcggaggagtattatacccgtggaataaattctgtttccggtcatgattcttctggatactgttcccgtgcactgatgctttgctacagcaaccgtgcagctaccaggatgtctctcgggagaatgagagaagctcttcaggattgtttgattgctacatcaattgatcctacctttctcaaggctaaagttagagctgcaaactgtcaacttgcactcggggatcttgaagatgcattaaggagttacactgcctgtttaacgtccagtaagacttctggttctgacagaaaaatgctcgctgaggcttctgatggtcttgaaagagttcaggtactggtaatggcttggctttcagctcctgataagtatactatactgctgatgtccgctctacacaactacacctctgtcaccctccaaagcttgccagtggctgtttggaccatctggccgactaacaggacaaagctgatatggatattaaggagtgtccactgtccagtgatgttgggaggagaaagccaacaagagagagaatggaaggaattggtagtaaatgcttattctgccaaaattatctgtttgcacctgatattacctcggtttgttaagatatacttgagttgcaattatcttgggcttcctcttacaattcggaaaccaaccaaggctgacctgctgcctttagtggacaaagtagcggacaatctcccgggttggaaagcttccttgatgaataaagctggccggctcacagctgttagggcggttctttcagccatccctatttatgcaatgatggcactggatcttcctaaatgggtgcttaaagccattgacaagaggcgccgtggttttttatggaaagggagtgacaatgcaaatggaggaaactgcttggtctcttgggatcgagtgtgtcgacccctgtctttagggggacttggtattcttaatctcgaaaagatggggtgggctttgcgcatgagatggctttggctgcataaaacagactcatctaggccttgggccggtttatccatcaatgtgcccaaaaatgtccactctctttttgctgtggctgtcaaaactatccttggaaatggagaacataccaagttttggagtgacagatggctgcaaggaaagacgattgctgagctagcccctaatcttttcgccttaatccctaaaagagcaagaaagcaacgttctgtggcacaagctttgacaaatagaagttgggttgctgacatccaaggggggcttttggtccagcttcttgctgagtacctggccatttgggatctagtagaagaggtggtgctgctacaagatgtccaggatcagcatgtttggaagcttactgcagatggcgtttacacttgcaaatcaacttatgaagcctatttcttgggttcgattcattttgctccctggaaactttggacggcaatctttttgagactagggttagccgaggctgcgcctcaaccctctaccgaccgctttctgaggtggtggagccaagcaacaaagaaccggccgaaggagagtgtggtggattggatatcgctatcggaggaacttcttaagaaaagaacagtgtccgaagcaacaactgctttacaatttatctccaatgcattgcacataagttcacactcagataaactaatggagatgaaagcagaggcgctactgacgctacggaaatatgaagaagtcattcaactatgccaggaaacagttgtgttagctgaaaagaattccagtgcatctgaaactacggaatggtcagggaggctctggcggacatatctcatttgcaagacttacttcctttcaggcaaacttgaagatgctctcgagttgctaaataagcaccagcaagtgacaaatgtcaaagagagtgaagggagaacatctcaggaatgtttctcatctttgtctactaccattagggaacttctttcccataaggctgctgggaatgaagcatttcaagctcgtcgatactcagaggctgtagaacaatattcagcagcattggcacgtaatagtgattcacgccccttttcagctgtctgtttttgcaatcgtgctgcttcataccaagcactcggtcaagttactgatgctatagcagattgttcactagccatggttcttgatgcaacttatctgaaggcaatttcaagaagagccaccttatacgaaatgatcagggattatggacaagctgctaatgatttacggaagctcatatcacttattgaaaagcaagctaataactctggattgtcaccaaaagttttgaacaagcatagcgatctgaagcaggcgcgcacccgacttttatctgtagaggatgaagcaaaaagagatactcccttgaatttgtatttaatcttgggaattgaaccatcttcatctccagcagatattaagaaggcataccggaaggctgcactgaggcatcacccagataaggctgcacaattgctagtaaggaatgaaaagcctgatgatgggttttggagggatgtcgccaaggaggttcatgcagatgctgaccatctatttaaagcaattggggaggcttataatgttctttcagactctgacaagcgccaagaatatgatatcgaagagaatttaagaaatgctacaaaaagagtctccaagggagggaggatgcacaggtcccctgaacagcggtacaccaaacagtatgataggggttttaaccctcgtccgtggcagtcaaatagatcaagtggatcccgctcacggtggtctggatacgatgatgattactggtga

SEQ ID NO: 72055 - DNA, 453 bp, Oryza sativa
  unsure (1)..(453): unsure at all n locations
  Clone ID: PAT_MRT4530_72469C.1
gggtgggggttttttttttttttttttttttttttgttttttttttttttttttttttttttttttttgggaacaacccccccaaaacggggcaaagttcttttggtggagcgggaaaaaattccaaaattatacccctggggggccctacccgggaaagaaagggaaaaatcccccccccccccccgacngccccaacccccccaaccagaagggggctagccccggcccggcccccgttaagggggaccggcccccgctaacccaccaggggaccccagaccaaacccccctacagctagggggggccaaaccgacgccttcaaaaaaaaaggcgacaaaaaacccgtcccccccgtccgtccgggcttanagggacccagaactggggctttccccccggccaccccccttgggagggggggcccgccggaccaagccctcgggggggga

SEQ ID NO: 72056 - DNA, 287 bp, Oryza sativa
  Clone ID: PAT_MRT4530_7246C.1
gagaaagctgcccatagacgtgaaggggataactctagacagtggtgactacaacattaagactgttccaggctgcactgttgagcaaatgtaaattgacatgggaggcactgcaatcggtgtgggtgcaccaaaagctctgggccaaataaaacacaatggagtactggttcatattatagttgcagtatgataaaacatgattagttggcacatacgtgatacctgtggacagagagactgcttagaacgagaatactattgagggcaagaacactgattacgag

SEQ ID NO: 72057 - DNA, 538 bp, Oryza sativa
  unsure (1)..(538): unsure at all n locations
  Clone ID: PAT_MRT4530_72470C.1
ttgggtgtcggcgccagaggcctccgggcgaccactgcggcgtggaccctctggcgagactgccggttaggagctaccgcgacaccgagcaacaggccgcgaccgccatggggaaggaccgccgcggcggccgtgaccccgccatcaagagccatgacggaggagggggcaacaacggcaaccaagagtggcgatgactatgtgccttgttttgggctgccatacagagaggaggggctcgaagatggcgacgatggccgaaaagggggagacgaggacctgaacgaaaatgaaggaaaggaggccttgcacccaaagcacaggcgacacccgtgccatggacgacggatacacgagaggctctcgcgggctgagggtggtaggcaccagactgcaatgaggagcgcttttgggaagccgcacagtacctgtggtggggagaaccttgtgcagcgtctgctttctgttcgtcgcatggagagcaccgcttaacatggtnggaaggcgctctgccgnggcgaggtcaagttccctggcc

SEQ ID NO: 72058 - DNA, 1712 bp, Oryza sativa
  Clone ID: PAT_MRT4530_72471C.1
atgggatgccactacttagaagctacgaaatcactttatagcatggcaaatttatagtcaaaatcttctcagttttgttatacttttaatttaaagcatggcattgatcactagcatttgtttgcagccgtcctctcttcccagctgacccatatgatcgccagctctatcctgtcggcttcgtcttactggatgtcatcgaccctaccacctactgcctctaagcctgtcagttccatcaaggttttctttttctcctcttcctattctctatttgtgtgatggaataggacgaagaggttcagtaaaggggtcattttctatgcccgcgctgtcgagagctccgactggtgttaatttctaatgagttgtcttgtcaaatgtccagctttccttgcaattatcttgggcttcctcttacaattcggaaaccaaccaaggctgacctgctgcctctagtggacaaagtagcagacaatctcccgggttggaaagcatctttgatgaataaagctggccggctcacagctgttagggcggttctttcagccatccctatttacgcaatgatggcactggatcttcctaaatgggtgcttaaagccattgacaagaggcgccgtggttttttatggaaagggagtgacaatgcaaatggaggaaactgcttggtctcttgggatcgagtgtgtcgacccttgtctttagggggacttggtattcttaatctcgaaaagatggggtgggctttgcgcatgagatggctttggctgcaaaaaacagactcgtctaggccttgggctggtttatccatcaatgtgccaaaaaatgtccactctcttttagctgtggctgtcaaaactatcctaggaaatggagaacataccaagttttggagtgacagatggttgcaaggaaagacgattgctgagctagcccccaatcttttcgccttaatccctaaaagagcaagaaagcaacgttctgtggcacaagctttgacaaatagaagttgggttgctgacatccaaggggggctttcggtccaggttcttgctgagtacctggccatttgggaactagtagaagaggtggtactgctacaagatgtccaggatcaacatgtttggaagtttactgcagaaggcatttacacttgcaaatcaactaatgaagcctatttcttgggttcgattcgttttgctccctggaaacgtatttggaagtgttgggctcccctccagtgcaaattcttcatttggctggccatcaataataggtgttggacagccgatcgtctagctaaacgtgggctgcagcacacagtgatctgtcccctttgtgatcaaagtgaagaatccatccaacacattttgatctcttgtgttttttcccgccaagtttggacggcaatctttttgagactagggttagccgaggctgcgcctcagccctctaccgaccgctttctgaggtggtggagccaagcaacgaagaaccagccgaaggaggtgcggaaagggattaattccttggtaacattagtagcttgggagatttggaagcaccgcaacgactgcgttttcaataacgccaatcctagagtagcgacggtcttgcaagtgatagaaaatgagggccatctttggggtgttgctggagcttctcgccttcaaaggctccttagtgggacggttaacctaggcaactaa

SEQ ID NO: 72059 - DNA, 192 bp, Oryza sativa
  Clone ID: PAT_MRT4530_72472C.1
atgacgtcggcgacggaggtgcaggaggaagagggtgacgggagcatgatccggtccaactcccccatctcccgttacatcgtcctctccttcctcaactccggtcactactcactagtcactactccatcctcttttcttctcgacggctggcagcagggtggggtggtgaccaacgagatggtcggctag

SEQ ID NO: 72060 - DNA, 429 bp, Oryza sativa
  Clone ID: PAT_MRT4530_72473C.1
tggacgaaataggggaaaattgccaaagggctgcaacactcagtgatctgtcccctttgtgatcaaagtgaagaatccatccaacacattttgatctcttgtgttttttctcgccaagtttggatggcaatcttcttgagactagggttagccgaggctgcgcctcagccctctaccgaccgctttctgaggtggtggagccaagcaaccaagaaccggctgaaggaggtgaggaaagggatcaagtccttggtaaccttactagcttgggagatttggaagcaccgcaacgactgcattttcaacgacgccaatcctagagtagcaacagtcttgcaagtgatagaaaacgagggccatctttggggtgttgctggagcttcttgccttcaaaagctcctgagtgggacggctaacctaggcaactaa

SEQ ID NO: 72061 - DNA, 249 bp, Oryza sativa
  Clone ID: PAT_MRT4530_72474C.1
gaactttcagggctgcttgctagttatctgacctttgatgtggttatgatattgtcgtgttctttcatccttgtccattctagttagcaaggtatcgttgttcctactgggtaacctagtggtcagcgaaaaactgtttgagtggagaatcattttaaacatatgagcacattttggcaactctgggttttacatacttctccaggacatgatatagatggataaactaaatgtaaaaaaaaaaaaaaa

SEQ ID NO: 72062 - DNA, 2251 bp, Oryza sativa
  Clone ID: PAT_MRT4530_72475C.1
atggcggcggtgacgccggacgagcacgagcggcagcaggacggccactgcagggccagggtgaacctgcggccggcggcggcgcggccgttcggcgcggcggcgcgggcggcgctgaaggacacgctcttccccgacgacccgttccgcgggctcggcgggatgccgccggcgcggcgcgcgtggcgggtggcgaggtacttcgtgccggcgctggactggggcgcggggtactccgcggcgagcttctggtacgacctcctcgccggcgtcaccatcgccagcctctccatcccgcagggcatcagctacgccaccctcgccggcatcccgccggtcatcggcctctattcgtgcttcgtgccgccgctggtgtacgcggtgatggggagctcgaggaacctcggggtggggccggtggcgacgtcgtcgctgctggtggcgtccatcgtcggcggcaaggtgagggcgtccgacgaccagcggctgtacacgcagctcgtcttcacgtcggccttcttcaccggcgtcctgcaggcggcgctcgggctcctcaggctggggatcctggtggatttcatgtcgcggccggcgatcaccgggttcatgggcggcacggcgatcgtaatcatgctgcagcagctcaagggcttcctcggcatgacgcacttcaccaccaagaccgacatcgtctccgtcctccgctacatcttccacaacacgcaccagtggcagtggcagagcacggttcttggcgtctgcttcctcatcttcctcgtcttcaccgagcaagtgaggcgacggcggccgaagctgttctgggtgtcagcgatgtctcctctgttagtggtcgtcgtaggatgcgtcttctcgtttctgatcaaaggccacaagcatggcatccctatagttggtactctgaagcgtggcatcaacccgagctcgatatcacagctcaagttccagccggagtacgtcggcgtcgccatgaaggccgggttcgtgtcagggatgctcgccttagcggaaggcgtcgccgtcggcaggagcttcgcggcgatgaagaaagagcgcatcgacggcaacaaggagatggtcgccttcggcctcatgaacctcatcggctccttcacctcctgctacatcaccaccggtgcgttctcgaagacggcggtgaactaccacgccgggtgccggacggcgatgtcgaacgcggtgatgtcggtgtgcatggcgctggtgctggtcgcgctggcgccgctgttccggcacacgccgctggtggcgctggcggccatcatcaccagctccatgctcgggctggtcaagcaccgcgagatccggcgcctgtacgaggtggacaaggccgacttcgccgtctgcgccgccgcgctcctcggcgtcgtcttctccaccatgatcaccggcctcggcgtcgccgtggccatctccgtgctcagggcgctcctgcacgtggcgcgcccgtcgacgagcaagctcggccgcgtgtcctgcggctccggtgccggcgccgccgacgacgaccacgccttctgcgacgtcgcgcagtaccccggcgcggcgaccgcgcccagcattctcgtcctccaggtcgccggctcgccggtctgcttcgccaacgccgagtacctccgggagaggatcgcgcggtgggtggaggacgaggagaaggccgtcgccggcgaggacctgctctacgtcgtcctcgacatcggcggcgtgacggcgatcgacagccccgggatcgagatgctgcgggaggtgcacggcgagctggagaggaaggggatgaagatggcggtgacgaacccgaggatggcggtggcggagaagctggtgctgtccgggctcgcggagctcgtcggcgagagctggatgttcctctccaatggcgacgccttggccgcgtgccggtacacgctccagggctccaagcacggcggcgtccctccggtgtagatctcgactctcgaggccgctggatcggtacgcgcgtcagtatatgtacagcacacatgcgtatgtgcgctgtactgtacgtattactaacacattgtgatttgaaaagtacttgtataagttttcataaatattacggaacgataatagcgtatcatgatcatataactataattaggaaggtggcccacgcacatgcgcggacacttatattattatattattgaaaggtaagtttattgtttgttaaaaaaaaattaaaaaaaatact

SEQ ID NO: 72063 - DNA, 114 bp, Oryza sativa
  Clone ID: PAT_MRT4530_72476C.1
gagtactcctgaaatccatttataacggaatagaatggagcatacaattcacagggactaatcacgcaagtggttaaacgaacaaaagatttttccattaatcggacgcgtggg

SEQ ID NO: 72064 - DNA, 365 bp, Oryza sativa
  Clone ID: PAT_MRT4530_72477C.1
cgggagaaaaagggaaggcaatgatcgtaaacaagccaggcacgcccgtgggaaccggccatgccatgcacaagtggagcccgccacgttattcgagcgcgcggggacagagccaggctagcagataccgggctggttcttcttcacctgggccctccaggacgcgaggatcttcctcgcggtctacagaacggtctggccggggaccacgccatcggggcccgattgctgcttagcgatggcgctggcgatcttctgcacctgggccgaaggggcgctccgcttgtgcctgatcctgccgggggccgaccccggccggttcgggtggctgcgcgctggggccctcccgttgacctggggccccc

SEQ ID NO: 72065 - DNA, 261 bp, Oryza sativa
  Clone ID: PAT_MRT4530_72478C.1
atggcggcgaggcgaggtcgagggcgcgggcgcgagtgggaggacgacgacctcggcgtcggcggcgggcagcccccgcacctcgccgcgcccgtcgtctgcctcgcccgctccgccggggacctcgccgccggcgccttcgtcggctccctcgtcggatacggtctctctcttcttggaaatgacaatgcgagtttttttctttcccccaaagaacattgtcataggtctgttcttagtctatctgaaatgtcctgacaa

SEQ ID NO: 72066 - DNA, 2771 bp, Oryza sativa
  Clone ID: PAT_MRT4530_72479C.1
ttggtaatcgccggattcgagctcggccgtcctcgtcccgccctccgttttcgccgaagaccgccggagcaccgccgtcgtcgtcgacccgaacgtctccgccgtttcaacctcgccgccgtcgccgtcccgtaataaatgatgttgtaattggtaataacttgtttagctcctggtttggaatggtatattcctggtttggagatagaactgtgcagccgatgccgcgcttcaagcctgagtacttgttcggtactgagggatttgtccaggagttgcgtacgatgtccttcgccataggatttgggactgcccctttgtatgcccagattcctcatgaccgtgatgaagagaagtgccgtgtcaaggtcaccttgaacactaatcatgaagacatcccatcgctgatgttcgaggctggagggggaaactacattcatgcttgtcaggaggtggcaaggatcgccataggagagcttcgcgattgctacagtgatcagttggccgacactgagtatcgctaccatcctcgccaaccccagggaagtgaccgtggcagctaccttgaacctgcaggaattgagaatgatgctaccacaaggcatttggttgagatgctgtgggccatggatgagttccgcgctgagattgtgttagctgctcaagatcgtgaagaccggaatcgtggtaagatatgtaagcttgaggacaaagttgatcgtttggagaaggaactagccgcgttgaagggagaagcaccaccacaaaaggccagggttcgtcttaccacaaggaagagagctctatttgtccctcgctaccagttggcgcctaaggttcgtgtggtggaagaagaagaagttgtcccagtctcagcgaatccttcggtcgttaacgtaagtgatgatgatggagaagaatcgaagcgcacccattcaaaggtcgagtggggagctactcaagatgatgggggcaagccgaacgagccttcaatcaattccgatgcccggaagatctagacaatgggaatggcccaaacaacaacaacaacaacaacaacaacaatggagagaatcccacgcttgcccaagtcctggtccaacaggcacagctcatgaacatgatgatgcagcaattccagaaccagcagaaccaggggaacaaccatgcacctccccagaacaagttagcagaatttcttcgtgtgaggccgcccactttttctagcactaccaatccagttgaggctagtgattggctgcacgccatagaaaagaaattggacctgcttcagtgcactaatcaagaaaaagtctccttcgcttcacatcagcttcatggccctgcctctgagtggtgggatcacttccgtctcaacaggaccactgcggaaccaatcacttggcttgagttcactgctgctttgcggaaaactcacataccgtcgggagtggtgtctcccaagaagaaggagttcaggacgctcactcagggatctcgctctgtcactgaatacttgcatgaatttaatcgtctagctcgctatgctccagaagatgtacgtacagatgaagagcgtcaagagaagttcttggaaggactgaatgatgagctctcttacccattaatgactggggattatcatgatttccagaagttggtggatatggccattcgccaggaggacaagtacaaccgaatggagcagaagaaacgcaggattgctcacttcaaagctcagcaggggaatagtcagaggccgtgtcttgctatgggacctcaggcagtgtcacagggaggatcttcgttggttgcccgtccacagcgtcagttcttcaacaacaattctggcaacaacaaccgcaaccaagctccacgtcctgttgcaactctagcccagcatcagcctgccaagagggagccgggaaacaagccaagagtgtgcttcaactgtggggaaccaggtcattattctgacaagtgtccgaagccccggcgcgtgaaggttgtccctgcacagaacaactccaccgcaccagtgtccaaggctcgtgtcaatcatgttgctgctgcagaagcccaaggtgctccagatgtgattttgggtacgttccttgttaactcagttcctgcaacagtgcttttcgattctggtgctacacattcatttttgtctatgagttttgcgagaaatcacgggatggaggtagaagatcttagacgtccgttgatggttagtacccccagcaaccaagcactctcgtcacaacgtagcccctccgtcagaatagagattcaaggagtaccatttctggccaaccttattctattagaatccaaagaccttgatgtcatcctagggatggactggttagcccgatataaaggtgtgatagactgtgccaatagaaaagtaactctcaccagcaatgacggtcaagttgtaactgtttacgcattgccttctgagcctttaaggtcaagtctgaaccaagtaagtttggaagagattcccatagtacaggactacccggatgtgttcccggatgatttacctggtatgccgcccaagagagatatagaattcagaatagatctggtaccaagaaaaactccgatccataagagaccttatagaatggcagccaatgaactagcagaggtcaagaggcaagtagatgatttgcttcagaaaggatacataagactttgaagagttccaaggccagcaaggcaagtcacacagatctcaaatgaccatttgagcatga

SEQ ID NO: 72067 - DNA, 2269 bp, Oryza sativa
  Clone ID: PAT_MRT4530_7247C.1
ggccaaatcgcatcacgccctgctctctctctctctctctctctctctctctccgtcgctgactgcaacctccacccacacggacccatggtggaggcgggagaaatcggcggcgccgccgtcttcgccctcgccgccgccgccgccctctccgccgcctcctccctcggcgccgtcgacttccgccgccccctcgctgcggttggaggcggcggggcgttcgagtgggatggggtcgtcccgtggctgatcggggtgttgggcggcggggacgaggcggcggcggggggcgtgtcggtgggggtggcggcgtggtacgaggtgtgggtgcgggtgcggggcggggtgatcgcgccgacgctgcaggtggcggtgtgggtgtgcatggtgatgtcggtgatgctggtggtggaggcgacgttcaacagcgcggtcagcctcggggtcaaggccatcgggtggcggccggagtggaggttcaagtgggagcccctcgccggcgccgacgaggagaaggggagaggggaatatcccatggtcatggtccagatacccatgtacaatgagctggaggtgtacaagctgtcgattggggcggcatgtgagctcaaatggccaaaggacaagctaatagtccaggtgctggacgattccaccgatccgttcatcaagaatttggtggagcttgaatgtgagagttgggcaagcaaaggagtaaatatcaagtacgtcacaagaagcagccgcaaggggtttaaggcaggagccctgaagaaaggaatggaatgtgactataccaagcagtgcgaatatattgccatatttgacgctgatttccagcctgagccaaatttcctgctccgaactgtcccattcctcatgcacaacccgaatgtcgcccttgttcaagctcggtgggccttcgtgaatgacaccacaagcctgttgacaagggtacagaagatgttttttgattaccacttcaaggttgagcaggaagctggatcagcaacctttgccttcttcagctttaatggaaccgctggagtgtggcgcacaacagccatcaatgaggcaggaggttggaaggaccgcactacagttgaagacatggacttggcagttcgagcatccttaaatggttggaaatttatctatgttggggatatcagagtcaagagcgaactgccgtccacttatggagcctactgtcgacagcaatttcggtgggcctgcggtggtgcaaacttattccgaaagatagcaatggatgttttggtagccaaggatatatcgctcctcaagaagttctatatgctctatagcttctttttggtgcggagagttgtagcccctatggttgcctgtgttctttacaacatcatagtccctttgtcggtcatgatcccagagctattcataccaatctggggtgtcgcctacattcctatggcacttctgattatcacaaccataagaaatccaagaaatctacacataatgccgttttggatcttatttgagagtgtgatgactgtgcttcgcatgagagctgcactaactggccttatggaattatctgggtttaacaagtggactgtgacgaagaagatagggagtagtgttgaggacactcaggttcctttgcttccaaaaacccggaaaaggttaagagacagaattaatcttcccgagattggattttcggtgtttctcatcttctgtgcgtcatataaccttatcttccatgggaaaactagctactattttaatctgtatctccaaggactagcatttttgcttctaggatttaacttcactggcaatttcgcctgctgccaatgacgaggacaacaccttgactgtacgaaatgttgtttgcaattattttctgggtataaattcttcggatgacatttcagatcatgatcatagatgcatatggcgttgatctgtgcactaacacctgtttcagttgctagacttccagggaaactttcacagaatactaggatgtgttgtaatcaaatatcagtgatgtgttatgtactctagttaacacgaaacaccaatttgttgatctttttcttggattacttccttgagcgcatgaactccttttttttttcttggattacttccttgggtgaatgaacacaattttccagcacagtgtccctgttccgactgtacacatgcagatacatgcatgattgggtaaaaagcaaacctttttggccctttgggtgcgagtaaaaaaaaaaaaaaa

SEQ ID NO: 72068 - DNA, 720 bp, Oryza sativa
  Clone ID: PAT_MRT4530_72480C.1
atgatgaattcatctgagccggtgaagctgatcggcgctttcggcagcccgttcgtccaccgtgtcgaggtcgccctgcgcctgaaaggagtgccctacgagctcatcctcgaggacatgggcaacaagagcgagctcctcctcgcgcacaaccccgtccacaagatggtccccgtgctcctccacggcgaccgctccgccatctgcgagtcgctggtcatcgtcgagtacgtcgacgaggcgttcgacgggccgcccctcctccccgccgaccccctccgccgcgccatggcccgcttctgggttcacttcctcgacgaaaattgcctgaagccgttgcggccggcgctgttcggggaaggcgaggagcagaagaaatccatggaggagacacgggagggcctgacggtggcggaggcggagctcaggggcaagcggttctccggaggcagctccatcggcctcgccgacatcgccggcggtggcgtgctggctcactgggtcggcgtgctccaagaggtcgccggagtgagcgtcctgagcgacggcgacggcgagtaccctgctctgcgccggtgggcgaaggattacgtcgctaatgaatccgtgatggagtgcttgccggatagagatcggctcctctcctacttcaccgggatcaagcagaagtgcgtttcggtggccaagtctacgctgccaaagtactcccttcttccctaa

SEQ ID NO: 72069 - DNA, 221 bp, Oryza sativa
  Clone ID: PAT_MRT4530_72481C.1
tttgccagagctaggatatgtagtctcagcgttcccaactccatagggtaagatcttattaaaggattggtagttatcaagcaaaagttggtgacactgcgtggggaatcaaaatacttgccccagtgggaacatgaaaagatctgcatgctggttgagaaactgaagatagcttgcaaatggaacacccctgacactaccaaggaaggaatattatactg

SEQ ID NO: 72070 - DNA, 482 bp, Oryza sativa
  Clone ID: PAT_MRT4530_72482C.1
tttatttttttttttttttttttttttttttttttttttttttttttttttttttcaaagctaaaatcggccttggcatcttttcaacaaactttgctttgcttcgcatcatccgcccttcaaaccgatccatgggaaaagcttgcttaccccccttaaacggggcttgaaaaaaattctgccattaaaccagaccagcccaaatttctttggcattggcattaaaaatggcattggctctcctgcgtcaaaaacaaccacaaccacaacggtttgcaggggctcgtgggattccaaacccccggcgggccacaggctcgccggtcctcgtcatcccgggggaattcaaattccggggcgtgcttcaaccgtttttgttttgccgaaaaccggttttaaaaaaacccctagaaggagggctccttcttggcccggaggaaaaaggggtacccgcccctgaagtccatgggggtcacataaaa

SEQ ID NO: 72071 - DNA, 404 bp, Oryza sativa
  Clone ID: PAT_MRT4530_72483C.1
tgttttcggttcccctccccgccggggccccgtccgctgccgccggccgcgcgcggcgctgccggtccccgggggcgcggcgcgtgccgccgcccttgccatggccggccggccggctttgtgccgagccgagccgagccaggtcgccgccgcaccgtccgatcggccccgggccgttctgggccgtcgatcccgtggaccggtggtggaccacccgcgtggtcccggtccatggtagaccgaccacccgtgcgccgctgccatgtggtgcccgcttgtcggcgccgttgtattgtttgctttgtatgtcgcttagattccggttcttccgacgctccggtgtacttcgagatagtcgccgaggttcctccagctgcagagcaaggcaagtcatgcttgccact

SEQ ID NO: 72072 - DNA, 2555 bp, Oryza sativa
  Clone ID: PAT_MRT4530_72484C.1
atagggtgataggcctagcgatcgttgaaagagctcgcagaaggcaggcagcacgaatcaccaatctcagagagggggatgcaaacacaaaattcttccatttgaagatgaatgcaaggaagagaaaaaatttcatccagaggctacgagtgggaaacatgtggaaattaaaacacaacgaaaaagttgccgctctaaaagagcacttccagaccttcatggcgcgcccaggcccacgttcaaaagatctcgactgggacgtcctgcagctaccgactttcaactgctctgcaatcagtggtcccattactgaagaggaagtccatgctgcgctaaagcagtcccctagcgataaagcgccaggctcggacggcttcaccggagccttctacaaagcttgttgggaaacgataaaaggagacatcatggcggtcatccattcctttgaccagctgcgaagcaacaacctcccgatcctcaattcggcaaatgtggtgctcataccaaaaaaaagaaggggcaaaatgcgctggagactacaggccaatcagtctcatacatggaataggaaagctaatttcaaaagtgctcaccttgcgtttgcaaccccacatggggaccctgatcagccacacccagagcgccttcataaagaaaagatacatacacgacaactttatgtatgtgagaaacctgacgagaaaattccatcagacaagaacgccaaccctcctgctgaaactagacataaccaaagctttcgatttggttagatgggattacctaatcgaccttatacagaggaaaggcttcacatccagatggactaactgggtctcaaacatcttagcctcctcgacaacaaagatcctcctcaatggatgcccaggatcgcctataaaacacggaagaggtctcagacagggcgaccccctttcaccgctgctcttcattctagcaattgacccacttcaccaccttctagagaaagcaacggagctagggcatctatccccccttcgaggaagagcccccaggttcagaacctccctctatgcggatgatgcggccatattcgtgaacccaagtgtccaagatatgacagctctcaccaacatcttaagtgactttgggcatgtgaccgacctctgaacaaacatgagcaaaagccaaattgccccaatccggtgtgataacattgatctctccagcataactaggatcttcccagcgggactcacaaacttcccaatgaagtaccttggtctacctctcgtggttggaagactcaagaaaatccacatccagcccctgagggacaaatgtcgatcgcgtctcgccccgtggcaagggaaaatgatgtcgaccgccgctagaatctgtctgacaaaatcagtcctcacggcacaacccatctaccacctaacatctctaaaactgccagacgggaccttagaggagttggacaaaataaggaaaaaattcctatgggcgggaggcgaaaatatctcaggggaaaaatgcaaagtcaactggaaaagagtctgcaggcctaaagattggggtggcctgggtgttctggacctgcaacgcttcgcatcagccctcagacttagatggctttggaacgaatgggtggcgccagacaaaccttgggtgggaactgtgctcccatgcaatcagctagataaagacctcttcgcggccgcaacaacaataacggtgggagacggcaaactgcgcgcttttggagctcgaaatggttagataatcaaacgccgcaactgatcgccctagagattttcatggtctccaaaagaaaaaacagaaccgtgcaagatgccatttcggaaaacaactggatccgagatattgacatctcccgtatcgctgaggcgaatcaactccagcaatatgtccacctttggataatgatcagaaccatgcggccgctcaacgaaagccatggtagcatccgttggactctgactacaaatggacagtactccgcaaaatcggcctatcggctgcagttcctcttggctgcgaaatccatcttctatcagtcaatttggaaggcctgggcgcctccgaaatgcaaattcttctcctggctggtcactcaaaacagagtatggacggcggatagactggaaaaaagaggatggcaaaactaaaagacttgcctactctgctacaccgtcgacgaatcggccttacatctcctggccaaatgcagactcacaaagaggatatggacggaaattcaaagatggactgggactgacctccaaatggacaattggaaaaattgtcactcggttgagcaatggtggactcttgtagcggagtccacaagcaccccacgcaagcctctcaggactctggtgattctaatctcgtgggaaatctggtgtgaacgaaacgtaagaatcttccgcaacaatgcgtctgcgccgtcctcaattctagcaaaaatcaaggaagaaagcggagcatgagtcaaagcaggggctgcaaccttacaagagtttggaatcttgggagatatcacc

SEQ ID NO: 72073 - DNA, 446 bp, Oryza sativa
  Clone ID: PAT_MRT4530_72485C.1
aggccggccgggagacatttttacgtaacgtgaccgagcgcgccagacgacgtcgctcgttacttaatcagccatggatccctacaaggtaacgaacgtgctctgctctgcttctggggcgaggggagtgagagtgcactggttttttgtggttttgatgcggaatttggtgtgatgcgcgtagcaccgcccgtcgagctcgatcaacggcccgctgtggatcaccaactccggcgcccccgaatggaacaacaacaactctatcaccatcgactcccgaggcccgatccttctggaggaactacaacctggatgcgaagctggccaccttctacagggagcgtatcccggaccgcatggcgtacgcctgccgcgaccaatagcaagggctatctacgaggtcacccaacaagatcacacacctcacctgcgccgacttcctccga

SEQ ID NO: 72074 - DNA, 552 bp, Oryza sativa
  Clone ID: PAT_MRT4530_72486C.1
atggtttccaacacaatccgtgtagcagtaggaattctaggaaatgctgcttccatgctcctgtatgcagcacctatattaacatttaggagggtgatcaagaagggcagtgtagaagaattctcttgtgttccatacatcttagctctgttcaactgcctcctgtacacatggtatgggcttcctgtagcttatctaatgatcttatttcagaagtttgtgttgcgaatggtgctacccgttcttgcattctttgcgctgacagcaattttttcaagctttctgtttcatacgcacggtttacgcaaagtttttgtgggtagtattggcctggtggcttccatatcgatgtacagctctccaatggtagctgcatcaccaaacttcattggctgtccaatgggtatccttcagttggtcctgtactgcatttacaggaaaagccacaaggaagctgaaaagcttcatgacatcgaccaggaaaatggtctgaaagtggtaaccacgcatgagaagataactggaagggagccagaggctcagagagattga

SEQ ID NO: 72075 - DNA, 309 bp, Oryza sativa
  Clone ID: PAT_MRT4530_72487C.1
atggcatccaatatctctaagagatttacgctggcctctgtcacccgcccctatggtcgtcgtgtctgtggtgctagtaccgggttggaggagatcaaaaggtcatcgagccggtccattgctgcatccaccgcactaagctcatcgctatggccgctaggtgacagcggcgatacgtcggggaaggatgttaaggacgaatgcattggaggaacatggagtgggtggtgcgaaaagaaaattaatcataacctttatagggtgtcggaaggcttggtacccggtgggactaggcaccgacgctactag

SEQ ID NO: 72076 - DNA, 2069 bp, Oryza sativa
  Clone ID: PAT_MRT4530_72488C.1
tcatgctttattaaggtgctaagcactagttttttttttttggatcggagcaaaaggattttgatcttatttacagatgcagaaattcagaagaatttcagacacatgcgtctttcttcctgaacaatgcctaagtttggaaagtacacacagaacaatgccattactctggcttgcaagcaacacccgccaaacgcgcgtcgcgagccctgtcaactttacacatccgagcacaaagtgcactacacatgggagctcgccggcgccgccgccgccatggcgacctcgccggcgtcgaccagcgatggcagctgtcgcaatccgcgtacctaattgcctcaactgtctaatggtgtactaggtattcggtggaatcaatcaatcacacggtggtggtggtggtggtgggttagaattcggccgtgttgccgcacgacgaggacccgagctcgcgctgccggcggcggaaggacatgaggccgtcggacacgatgctcccggcgcagtcgtcgccgtcgccgcactcgaggctgctgccggtcaggtcggccgcgtcgtcggcctcgttccgcatggcccggagcgtcttcctcgccatgtcgcgccgcacgatgcccggggcgcactcctcggcgacgcggcggagggccgcgtccgcgccggcggcgcgcgcgaggccgcggaaccggaggctgccacggctcatggcgtacatcgccgcgacgcaccactcgtcgagctcggcgctgcgggtgtcgtgggagaggatggcggtgacggccgccacggcgcccgcgtccatcagcgccgcgcggccctccgtgcacgcggccacgttgcagacgaccatgagcgccagcctacggatgggcatccgctcggcggcgctggacgcgacggcgaggagagccttgggcgcgcccgggaagcgggcgatcttggactggttgacggcggcgagggagaggtggtagagcgccatcccggcgtcgcggcgcgcgggcgcggcgtgggcgggggaggtgagcaggtcgaggaggggaggcaccgcgccgagcacgccgatggcggcgcggttgtcctcgttcagggcgaggccgaagagcgcgccggccgcgtgctcacgggcctccggcggcgacgtgctcgagcggagcacctcgacgagcggcggcacggcgcccgcgcggacgatgcgcaccttgttcgccggctcgagcgtgaggttcaccagcgcggccgtcgcgtcgacacgagcgctggcgtggcgcgggatgagcagcacgcggcggagcgcgccgagcatccgcggcgtgcagagcgcgcgccgccgctccgcgctctcccgcgtggcctcccggaggccggcaacggccaagaccacctcctcctcctcctccgcatccatcaccttggcaaccaccacgtcctcgagcggatcaaccgccatctccacctgctcccggaccgcatccttgtttgtcccctccttcacgggcttcacaccaacctcgtcctccgccggaataatctccgacgaagacgtgtacgacgacgtcgacgcggcggacgccggcgacgagtaggacgaattggacgagctcgccagcgccgcccgccgggtcctcaccgacttcgccgcatcgggcggcatcgcgcggagcacggcctcccgagcagcatcgcccgacggcggcgccggcaccaccctaccggagcgcgcgcaccaggtcccaatcgccgccttgagcgccgcgttgggtatcaccgcgtcggaggcggaccccatcccgggcgggcaggaacgcgagctccgcgcaggcctggaggcaggcgcgctcgtacgtctgccccgacgggaggatcaccgggtcggccatgagcgcgcccaggatcgagcacacgaactcggccggaggcgcttcttcctccgcaacaacaacaaccgccgaacgcgcaggcgagtggggctcggggtccggcggggaggagggagacgacggcgcgctgcggtggaacggcagcttccagcggcgagggcggcccgcacccatgaaacgcgcgcgcgg

SEQ ID NO: 72077 - DNA, 385 bp, Oryza sativa
  Clone ID: PAT_MRT4530_72489C.1
atgtggtgccgagggcagcaaggagatggcatcggcggcggcgtgcgggcagcggtgttgacaggtggcagcctagctcgcaagctgatcggctgcggcttgtgggctgcccggcggcgcagcgcgcgggctgaacggcggcggcaacggcagggtgacgccaacaagatgttcgacgaaatgcgacgagggatgtggatacgtcgcatttcgtttgatctgaaacggagggagtacgtacgtgtgcgacattataatattcttgactctgatggcattgcattgcatgcctctgaacctttgccaaacataaatgacgaccgtgtagaaccaaaatccaaattaatggagtataataagtacataaatgaccatatacaaatct

SEQ ID NO: 72078 - DNA, 347 bp, Oryza sativa
  Clone ID: PAT_MRT4530_7248C.1
atgacgggtcctgatccgaaccagaaccaaaaccatgatgctctggtcatcgaggatccacagattgaagaagtggaagccatagcacatcacccaacgcaaacccatgatgttcagcgacggtcgacgtcaagcgttcgccctcaattccttaacattcctattgcctctgctccacttcccaccacattgaaagactatcatgacatggttgaagacctggtgaacaagcggctgaagcaaatctccatcgagcaaacaccccgaccaatggagagtgagcttgagaagctatatgaagcttggcacgatttagtacctttcccggcagggtggcacccacccaa

SEQ ID NO: 72079 - DNA, 339 bp, Oryza sativa
  Clone ID: PAT_MRT4530_72490C.1
tcatgcagtcatgctcaggtacgcgtcacctccggcgagcacgccatcgtctccggcgacgccgccctcgacctgtcgtgtgcctgcagcatcgtcatgctcatcgcctacctcttcttccaactcaagacgcatcgccaggaattggatgccggtgtcgttgaggatgctgacaccggcggaggcgaagttggcgcagacaagcaggttctcgcctcggaggtcggggctcaggtaaggcagcgcgggcatgtgagtcaggaagtcgatcccgtacggcggcgccgctcgcatccgtccgccggcgccgcccgcgtccccgtccgcccgccccgccat

SEQ ID NO: 72080 - DNA, 550 bp, Oryza sativa
  unsure (1)..(550): unsure at all n locations
  Clone ID: PAT_MRT4530_72491C.1
gggagtttgtggtggagatggagagcgaggggcgcgncacaacatggggggacaccattagagatcgcctctcctcgcttggtaaattcactgattaatcactagtagtagtagtaactcagtaatcatctgctcttgatttgttcttagtaacagaaatgtctactgttcgatgtggtgttgcttntttangttattcgtctgattcatgaagagatttgctcacgaagtgtcgccttttttattgagattgatctttgatcaattgggcagtggttgcgttgactcagtcggatactcggagtaacgtagtggggaaagaacccccaaatatccattattcactttgtttagttgatcaccttcataaacaaaaacttaatgtaatgagtttttacaatcgaccggagggatgtacagtactgcatctctctggatatttcttggtgtccgggctgttgtaacgtagcctgtcagctctggtgcacaaatnnggccaaatcgtcaattggccagnactactttattatgacggatagnntncaatact

SEQ ID NO: 72081 - DNA, 528 bp, Oryza sativa
  Clone ID: PAT_MRT4530_72492C.1
atggcgaggcccagtggagtttggcaagttacagcttgtcgattgcaagctggtgaggatcagggtcgattgccactggttgttgactttgtcgggcggtggaggagcggcgaggcaaacaagaaggtagacgagtcctgcgacgacaaggctaatggaaatgagccagaagaaggtaacattgtgctccctagactctccattattgtcgccgcccgcgcttcccttagccaccgctaccgcctaggcatccccgtggcaaacagtcagcacagccaacacacacgggcacgtgggctggcgcaattgcacctcctgcgtgaactggccggatggccaccaccgccgatctgctctgcttaccgtgcctcgacaaacctgccggagctgacggccaccggcgacggtgagaccgtcgtggtcgtcctcgacctggctggcttctcggcctacgtcaccggcgccgtccactccggccgggcgcccgggccgtcatcctcacctccgacatcagtgattattaactga

SEQ ID NO: 72082 - DNA, 350 bp, Oryza sativa
  Clone ID: PAT_MRT4530_72493C.1
gatatacactcgagagggtggttttgaacttgcagggaacactatgcctgtgctgcttatcatacatgggatgaaactcccggacgtgatgactgctcccgagcaatgtgctaggaccaatgtgcaggataactggataatagactgtatcttgtgacaccagcgacatagcctgcacatgttctgcttagtctatgacgatgtaagcgcacgactcaactactggcacatggaggtgtggggtgacaacacctacaccataatcaatacggatagatagccgcaccgtgtcaaattcgactgatagcctacgtgtgatgataagtgcctgtgggacgatgaagctgtga

SEQ ID NO: 72083 - DNA, 169 bp, Oryza sativa
  Clone ID: PAT_MRT4530_72494C.1
atcaatacaaatctattcttgccaagggatttaataaagccggcgctaggggaagacgcactactggagaaggggggtcttaaagaagcggggcatggacatgggtagctagctccaaagggccatgggaactcaattggctcaggccaaaggtagattgcataccaaa

SEQ ID NO: 72084 - DNA, 1641 bp, Oryza sativa
  Clone ID: PAT_MRT4530_72495C.1
atgtccgcgcggcgggcggcggccaagtgccagcacgagccggccacgccgccggcgccgcggatcctcaacatgccgaggaggccggcgggtggcgggaggccgacccggagcgccgggcgcgcgcagcagcagcagcggatggcggcgccgggggcggtcaacctcggcgcgctgttcgagatggagcggcgggtgcgtgggctggagtccgcgccggcgtcgccgccgccctactcacgggccgcgcggtcgcaggaggacgccggggagcaggaggagaagtggcggttccaggccgagatcctccgcgccgagtgcaacttcctccggatggagcgcgaggtcgcgctgcgcaagctcgaccgccaccggggacagatggaggccgcgctcaaatccgccgtcgaaacgctcgtctcggggaggaagaagatcgatgggaggggcgacgtcggcgtggcggcggcgttggacgaggggatcgaggacctggaggagatgatggaggatctacgcgtggagaaggagagcggcaggagggcagtgagcagcaggcgggagctgcagaggagcaacggcaggaacttcgaccgccaggcgtcgtcgctccgccggcgcctcgagaagatgccaccggccgacgccgagccctgcgtcaaggacatccgcgagatcgcgctgcccgtcgcaccgcagtcgccgccgccacccgccgagcacagcgacgtcgacgacgaccattccaacagccccaacctctctgacgtggagatgctgaggatgaagatggagggcatgtcgaaggggatgcgggagaggatggcggagtacagccgccggctggaagccgtcgccggcggcgacaacaacaacgccgccgacgattgccagtccaggaaatgcggcagccgtcacagccgaaagccgagcgcgagcagccagaggagctggagcggcggcagcaccaatgccggcgcgtcccgcgacaccgccgcctcgcacggtcgcagccgccacaccgtggcgccggagaagcatcatcaccatcaccagcagcacaagattatgtctgaagagtgcaaaatggtgggttcaggaagctgctgtgactgcagggaaatcgtggggaagataatggagcaagtaagaacagaatcagagcaatggactgagatgcaagacatgttggagcaggtcaggttagagatgcaagagctgcagtcttccagagatacatggcagcgtcgtgctattgcctctgacatcagtctacgctccctaaattctcaagtgctggagtggaaacatcgcgcgcacgtttccgaacagcacgtggaagatctgcagaagaatatctcggagctggagagcaagctgcacacattcaaggcccatttccccagcccaggtcagcctaaccaagagtggtccgaagcatgcaagatggagaagccgatcagaagcaacaaggctcagcacccgccccggccgtcgcacgagcccggcggcggcagggagaaagagaagcacgtcctcatctgccgcgtgaagcactcgcccagcgtggccgcgaagcgccagccgttccaggagatcggcaacatcagcttgccacggcacgcgccgatgaagcgctga

SEQ ID NO: 72085 - DNA, 386 bp, Oryza sativa
  Clone ID: PAT_MRT4530_72496C.1
gggaccccacccccttttttttggccccagtttaaaaagatggttcccgtttaaaaaaaaaagggggggttttaaacgggtttttttaacccaaattttaaagaaacccttacagattttttgtgtttccttgcggggccccttttttgggttttttagggcctgccaggggggaaaggtttaaaaaaccttggaaactaacctaattggaatttccctttaaaagggttaagggggcaaaaaaactagctgggggggtgttttaattccctaagggccccccggaaacttttttttttttaaataaaacccgaaggaaatgggcccccttagggattggtttttttaatgggattttaatcctttcccccggcccaatttttttt

SEQ ID NO: 72086 - DNA, 542 bp, Oryza sativa
  Clone ID: PAT_MRT4530_72497C.1
aaactctgctttgccgatacctggatacatctatatatatatatatatatatatatatatatatatatatatatatatatatatatatatatatatacatatatacatatatatatatacatatatacatatatatatatacatatatacatatatacatatatatatatacatatatacatatatatatatatatacatatatacatatatatatatatatacatatatacatatatatatatacatatatacatatatatatatatatacatatatacatatatacatatatagatatatacatatatacatatatatatatatatataagtgaggagtataaactaccactatttatctctctctctctccaccgaaaagtgctagaatagcaaaagtttagtatgcatctaaacaccaactagtatttttgcaacgtcaaaacttttgccaccaacactttttccatttgtcattccaaataaatctaaacatactcatagttgtttctacctcacacaatatacaatatgtgggtag

SEQ ID NO: 72087 - DNA, 379 bp, Oryza sativa
  Clone ID: PAT_MRT4530_72498C.1
ctttgttttttcaaccctttgggtttttatttttttttttttttttttttttttttttttttttttttttttcaaaaagcccatatgacaaaaaataaaaaagggggggcatacattcaacaaaaaaactccggaaaacttccaggggttttcagggaacagcagttcaacttgcaaacccaacatgaatccggttcctttaaagaaattttcagccggaagtaaaatttaagagagataagccccctcccccccccttaaagagtttttaaaggctgttcgggaccaaaaaaacttttactttgccccccaagaaaacggggggccggttggactaaaacttggcccggcccacccccgagttcccaggggggggggg

SEQ ID NO: 72088 - DNA, 148 bp, Oryza sativa
  Clone ID: PAT_MRT4530_72499C.1
ctgcaggtgatcatgctaccccacagaggacagagaaacggtcatcggcaattatgtgtttgccattctgtatgtgcggtattgggtattttatcctttttatgtcttttgtgctgcagaatgaaagcagctcagcaagcgattgtta

SEQ ID NO: 72089 - DNA, 1848 bp, Oryza sativa
  Clone ID: PAT_MRT4530_7249C.1
atggtggaggcgggagaaatcggcggcgccgccgtcttcgccctcgccgccgccgccgccctctccgccgcctcctccctcggcgccgtcgacttccgccgccccctcgctgcggttggaggcggcggggcgttcgagtgggatggggtcgtcccgtggctgatcggggtgttgggcggcggggacgaggcggcggcggggggcgtgtcggtgggggtggcggcgtggtacgaggtgtgggtgcgggtgcggggcggggtgatcgcgccgacgctgcaggtggcggtgtgggtgtgcatggtgatgtcggtgatgctggtggtggaggcgacgttcaacagcgcggtcagcctcggggtcaaggccatcgggtggcggccggagtggaggttcaagtgggagcccctcgccggcgccgacgaggagaaggggagaggggaatatcccatggtcatggtccagatacccatgtacaatgagctggaggtgtacaagctgtcgattggggcggcatgtgagctcaaatggccaaaggacaagctaatagtccaggtgctggacgattccaccgatccgttcatcaagtacaacgaggcagcagtagctggcaggcacaatgaactttctgaaaaaaacagaggtgaccagaatttggtggagcttgaatgtgagagttgggcaagcaaaggagtaaatatcaagtacgtcacaagaagcagccgcaaggggtttaaggcaggagccctgaagaaaggaatggaatgtgactataccaagcagtgcgaatatattgccatatttgacgctgatttccagcctgagccaaatttcctgctccgaactgtcccattcctcatgcacaacccgaatgtcgcccttgttcaagctcggtgggccttcggtaaggacttcattcctaattttgcagtgaatgacaccacaagcctgttgacaagggtacagaagatgttttttgattaccacttcaaggttgagcaggaagctggatcagcaacctttgccttcttcagctttaatggaaccgctggagtgtggcgcacaacagccatcaatgaggcaggaggttggaaggaccgcactacagttgaagacatggacttggcagttcgagcatccttaaatggttggaaatttatctatgttggggatatcagagtcaagagcgaactgccgtccacttatggagcctactgtcgacagcaatttcggtgggcctgcggtggtgcaaacttattccgaaagatagcaatggatgttttggtagccaaggatatatcgctcctcaagaagttctatatgctctatagcttctttttggtgcggagagttgtagcccctatggttgcctgtgttctttacaacatcatagtccctttgtcggtcatgatcccagagctattcataccaatctggggtgtcgcctacattcctatggcacttctgattatcacaaccataagaaatccaagaaatctacacataatgccgttttggatcttatttgagagtgtgatgactgtgcttcgcatgagagctgcactaactggccttatggaattatctgggtttaacaagtggactgtgacgaagaagatagggagtagtgttgaggacactcaggttcctttgcttccaaaaacccggaaaaggttaagagacagaattaatcttcccgagattggattttcggtgtttctcatcttctgtgcgtcatataaccttatcttccatgggaaaactagctactattttaatctgtatctccaaggactagcatttttgcttctaggatttaacttcactggcaatttcgcctgctgccaatga

SEQ ID NO: 72090 - DNA, 432 bp, Oryza sativa
  unsure (1)..(432): unsure at all n locations
  Clone ID: PAT_MRT4530_724C.1
ctaatatatatgtcatccttatttattgttgttatatttattctcaccagattatatctgaggagctttattttgcnatatgccatattnatgttctcatgtttcnttnctctgaattctcatcttcggattattcgagattccagggtagttctgttgttgaattctatgattgaatgcaccgtgnncttctcccnttctgttcttgatgcttcgggcttgctcccgtnatgatgcggaagcattatccgtcccatcatccggcaaggcgcggattnccgatttttctcctgcaaggtggctgatcaatggcgcttcgtttgccttgattgcattatattggcatccctcatgctctgcttctnnatgatagcatattgccggggattgatcatattcttgnccatggccgaaggacatcatccgatcaca

SEQ ID NO: 72091 - DNA, 310 bp, Oryza sativa
  Clone ID: PAT_MRT4530_72500C.1
ggggccttggggtaccacgtcacgaccctcgggccctcagcacgcgccaccccgaggccctcgcccggccaccacgtggcggggggaggaggcggagcaagggacaccgctccgcgctttcaatgcgtgcgcccccaaccgtcccgcaccgcatttaatgcggcgtgggcgggcgtgtggcgccgcttgattgacccccgtcaatcaggcatgaccagtctgggcgtcccccgtgtcaggcggagggcgtcgctgggccccacttgtagccaaatgaccatgttgcttccggttgaagcaaaggatagcg

SEQ ID NO: 72092 - DNA, 2802 bp, Oryza sativa
  unsure (1)..(2802): unsure at all n locations
  Clone ID: PAT_MRT4530_72501C.1
atggataggcgcaaaaagggaatcgtcacaaagcaaacggagtcgaagaaagacaccagcaaacccaagtggcaaacctccgagctgggcatcaagagcatcgagcgcctagccgcggacnccgcctccgggcaggcgcaacagcgcgacgccaagatccgctccctcggcaactccatccgcctcctcagcgtcgtcgcctcgctccacgcgccgccgcagccgccgcgccacgccgctcccacctccgcccccgcggcggcggaggcccacacctgcggcgtcccgaactcccacctctccgcctgcgcgcagctctacctctccgtcgtctacaagatggagcgcaacgaccacgtctccgcgcgccacctcctccaggtgttcgtcgacgcgccctaccttgcccgcaagaacctcctccctgacctctgggaccacgtcttcctcccccacctcctccacctcaaggtctggttcaccgccgaggccgacctcgcccccgacgaccggagccgccggatgaagaccctgcagcggctgtacaacgatcacctcaactccggcaccgcccaattcgccatctactacaaggagtggctcaagtcaggaggagccgaggcgcctcctcccccctccgtgccattgccctccatgcccggagatttcgatgcttgggacaagcattcctcttccctgcgcagaagctccatcaacagaggcctgtacaatgcggttttcggcacggcgatggagcaggaagatgtcaaagatacgaagctggaagatgacgagatgtcccaattggttcttgagactgatgttgaattggaggataatccaggttgcttgaagatggggaggattgctcatttcagagatccaaacgggtgtaaggagaaacagccccattttgatataattgcgacagctttagagcctatgcctacctggaacgtcatcaaccatcctaagataccaaagaaggaagccgtgtctgtcgagaaagacctagaatgcagtgagctaacaatgaatctagaacgagcagtttccatggtatctagttcagacagtcttacgcagtgcgaatatgctgtgcaagaagttgccagagcatgttcaaatttgcgagaagatccaaaccttggaacttggctgtcatgtccatcctttattcaagggcttctcgaagtcacattcacttccaaggatgatctagtgctggagtgtgcaattttgattatcggagagttgattttaagcaatgaggtgaatagacagattgtacttaatgcagatccacaacttgaagttttcttgagacttctgagaagcaaagagttgttccttaaggcagctatagtactttatttgatgaagcctaaagctaagcaaatgctgtcattggactggataccacttgtactgcacatattggagtgcggggatgaggtgcaatttctgtcttctgtgaaatgtgctccaaaagtagctgcattatatttcctagatcagctccttatgggatttgacgttgatagaaatgttgagaatgcaaagcagatgattgctcttggtggtttggacctgctcatgaacagaatcgatggcagtgattcccgtgagagcaaaaaatgcatctctctcttgacgtcatgtatccaagcagatggcagttgtcgacactatttagttgataatctgaagaaggaacctattgttcaacttctagtaggaaatcagaagaaggctagttctgctgcccttaacttgctgagtgaactagtctgccttaacagaacaacccagattttggagttcctcaaggagctgaaaaatggtggctgcttgaatacaatgcatattctattggtctatctccaacaagctcctattgcccaacatcctctagcagctgtcatgttactccagcttgatctcctgggagattcttcgcagtacagcgtttacagagaggaagcgattgatgccatggtagcagctttggagcatggttcacacagcagaaagttgcaagaacagtgtgctcgagctctcttactcttggcagggaggttttcatcctcaggggaaccgatcgcggaagcatggctactaaagagagcgggactagatgactccctatccgaatccttccggagaacagagatattcaaagataagagtgcaagggtggaagaagaaaagatagttgaagaacggctgaagaaacttgcgctcatgttgctaaacagtgggaacaaaaagttcctcacagcgctgtcaaactgcatatctgacggaatccctagtttggctcgagcgtgcctcatcactgtaacatggatgagcagctcactctccccgctgcacgggtgcaacacgttccagcctttagcttgctccattcttgcgactaagcttgtagatagcctaagctatgacagagttttggaagagagggtgcttgcttcactgtcactgttgaaccttgtgagacatccagaatgtttggagaagctttacccactgaagaaagacacagtagagtcattgcaagatcttgcagaagtgacatggactgcaaaggagctccttttcgcatgctgtagatgacaaccatctgaagaggaacagtttctcagtctccaagaacagtgtttcaatatgggattagtgattgcttaattacacatttcttttttcttgatatgtaaagcactagagtttctttcccttgtaaagaagaatctggcaatggctttctttcaaaaaaaaaaaaaaaaaaaataattcgtt

SEQ ID NO: 72093 - DNA, 508 bp, Oryza sativa
  Clone ID: PAT_MRT4530_72503C.1
gcgcaccacagcaatggcggagaaccccctgttcgacgaggtggtcgccatttacgatcacctcgtcgacaaccccgacgccgccaggatcgtgctcgacgccgcgcgctccgacttcgcccacaacgacgacgagatcgccgaggtggagattcagctcggctacgtccttcagcgggcgggcgagctcatgaccgagcccatggacgaggtggagcgggaggcgcagcgcgtctttctcgtagaggcctaccacgatctcagggcgcgcgtcgatttcctcctggagcgccgcaggcagctggaccaggtcgtcaacctgctgctcttcatccggacctacgccatcatcaagcgcgccttgcggcgcctcctccccgccgcggccctcgtgttcgtggccggaaccgccgccgtggtcgtgtacgtcgagtggaggcgcggcacggtgcccacgttcgagaccttcgggatgatcttcacccggttgatgtgcttcttcctctag

SEQ ID NO: 72094 - DNA, 1146 bp, Oryza sativa
  Clone ID: PAT_MRT4530_72504C.1
atggcgacgagcggcgcggcggcacgtcctccagtggccaccaccctctccgcgcgccgtggcacggctccctccgccaccgccgccgccgcctcctgccccgcgtcgtcggcgcggcgcactacctggaggccgcgggcgaggctctcctcggggaacgcggcgcgggcgcgggcgcggctgctgcgtgtcgaggcctcctccatggccgacccggtcgaggagagcctccccgcggcgccgcacacggccacggatgctccgttggagactcagccccaggtgcgcaccagcatgtggaattggaagggctacaacattcggtaccagtacgcgggaacttctggccctgcattggttctaattcatggtttcggagcaaacagtgaccattggcggaaaaatattcctgttcttgctctgaaaaacagagtatatgcaattgatcttattggttatggctattctgataagcctaatccacgtgagcttggtgagagcttttatacttttgagacatggggagaacagctgaatacgttttgtgctgaagttattaagagcgaagctttcttcatatgcaattcaattggagggcttgttggtctacaggcagctgctatggaaccacagaagtgcaagggtatctttttattgaatatttcattgaggatgcttcatatcagtaagcagccatggtttggaaggcctttcatcaaatcattccaaagtctgctacggaatactgttattgggaagctgttcttcagcgctgttgctacaccagaatctgtgaaaaatattctctgtcagtgctaccatgacacatccgcagtgacagatgagctagttcagtttattctgcagccagggcttgaccctggtgctgtggatgtattccttgagttcatctgctactcaggaggtcctctacctgaagaattacttcccagagtgaagtgtccagttttggtagcttggggtgagaaggacccatgggagcctgtggagcttggaagagcttacgcatcttttgatactgttgaagattttgttgtcttgccaaatgttggacactgcccacaggatgaagcacctgaccttgtaaatccacttgtcgaatcatttgttacacgccatagttag

SEQ ID NO: 72095 - DNA, 220 bp, Oryza sativa
  Clone ID: PAT_MRT4530_72505C.1
gaaaaaaaaattttttaatccttaagataaaaagacttggaattttacaagaagaactaaaactttttcagagttacaaaataaatgtcacgctacagggaggatcaaaaacttttttgaaaataaggcaatttttacctcctaccaaactaaatgttttacaaaaaaccatccaatccggttgggatccaaaactaaccggacccgtgggcggacacaa

SEQ ID NO: 72096 - DNA, 289 bp, Oryza sativa
  Clone ID: PAT_MRT4530_72506C.1
gcgggccacaaaattcttatttttcttccaaggggccaaattaattcaatttcttcctaacaaaaattaaattaaaccgtatttccatttcggcctaaaaggtccccagttattttttccaattaacagcagttgaaaggttaagaattggctttttaccccattttacaacattggtaggtttgttcctaccccctgcctttggacccttgttcaaaaaggttccttactgtttgggttctgacttttgataaaaaattccctactcaaccctggttgaaaagggaaa

SEQ ID NO: 72097 - DNA, 310 bp, Oryza sativa
  Clone ID: PAT_MRT4530_72507C.1
atgggcccaacccaaatagcccattacgcgcgcaacgacggccacgacgacggttgccggcgcgcgccgcggggttgcgtcgtcgtcgtcgtcgtcgtcgtcggcggcggcggcggatccttttttatattttccggcgtgaaggcagagctcgggcaagcacgaggggtccccggaggagctggagcatgcattatcgatgggaggacggtgatcagggaacgcatggcatgagcatacgatattgactgcatgttacatgtatcctccccagaattttgatatgaccaaccaagagttgttccactga

SEQ ID NO: 72098 - DNA, 680 bp, Oryza sativa
  Clone ID: PAT_MRT4530_72508C.1
aatctacttcaaccagcattggttccttttttattgttgatatcaaggataggatgcttgttttttgggattcattacataatgagggtgacgacttctttcgacctattatggctcagcttaaagctaatttaccaacagcatgggataagtttgtttgctcacctatggattttcgaactttcaagactgttttccctccggtaccacgtcagaatttgagttgtgattctggagtatttgtgatgaagttcattgagctttggtctcccaggattttattatccaatttgctctcaaatgaaaatatttgcaacattcgtgtccaatacgcaaatcgaatattcttccacgaaaagaatcaaatgcttcaaacagaaattcaaaacgtggttttaaattggttcgattcggtcaaatttccttgttctcgcccagcaaccttcaaatgagagagtttagaaaagttccttttatgttgctcttgtccataggattttcatgtaatgaaatgagaccaatctttaagtgtactgaatgttgaaccattcatagtccatagatagccatataatatgcatagtacacagtaaatgtgaaaacctttttctgcctggtttgtgaaccacccagtatatagttcctcaccatccttttagtaaaaaaaaaaaaaaaaaaaa

SEQ ID NO: 72099 - DNA, 2325 bp, Oryza sativa
  Clone ID: PAT_MRT4530_72509C.1
agccgaaacatacatatgtatcaacacaagcattatttgtttatttcatacggcaagccgtccatccatctacaacagatacccaacatacagtatagtagagcgaaaaccattctccagccaaaattataacggtataatccttctctagaattcacttagtaaaggaactacaagaacaggaaccatgtaggggatcctcattcagagatcatatgcctctagtcaaatgcaaaaaattgatcaggcaggcacttgtatcacagccagagcacttgtgacatgttcatcagttgctggtgctagctggaaggtagtagtactggtagtagaccagggctccaagaagggccacgagcgcagctgccaatgctgccatgggtgcaccccatgaccagaaagcctgagatttcttcctcttcaggaccgccttcggaagaggggtcttcgttttcgtcaccgtacttctgtgccgggcattctttttaattgtgacaggagctgctggctcttcctcctgggcttcggcttcatcagacttggcatcggattcagctgcctcctcggactcggcacctccagctgttgcactcctcttccgggccttcttctccttctccttaagcttcttctcagcttctttttctgctcgagcggccgctttcattgcttgtttctcagcctgcttcttcttcctttccagtgccagcttgttcttttctatctcttcctgtctcttcatctctttcaattttgcttcatctactttaggttttgtcttctcctttgggggctcatcatcatggacatctggaatatcatcaatatcaagaggttgttttgcctttgcagctttggcaggtgctttggcacgaatctcatcctttggagtaacatctgcacgtggagcaggagcctccttcgcctgcttcgccggctttttcagtggagcaggctcctgttcagcaggtggtgccacttgtgtttcgagaacgataggcttctcatcaggattcctcattcgtccatctcgactcagctgtcggctgttgagggaaacgagtatcctcttctcataatcctctctaaaggacttgctgctgcaccattgtgccatgaacttctcaacctcattctggcagagctgctgcaccgcttctacttcacccctcgctgaaaggtctctaacactgtttgagattgtgcggtattgatggaaggatgtattattaagatcacgtgtttttctcaattcatttagagcttcaaatgctttatcttttctagcagtagctgcagtgaggtcatcttgaagtgcagcaatctcaccatcaacagcgtggatttgatcttcaagaaccttaatcttgtctcttacagcttgcctatcccttttaacttcatcaatgcccaccccaatttgtttgacctgatcatgtattgtgcctctctcaacaactgtatcttgcattttagctctcttagcagcattctcaataacctttgacctggttccattaagttgttttatttctttgaccaacctcttttcctcatctaaggatatgctttcatgagaaattcggtcattcaagctcttgatcaactgatcaagctcttcaattgatgagcataaacctgcgccttgtgcgcgcatagcattattttcactacgaaactttcctaaactcttttgaagaggttctatttccttcaattttccactcacaacttcattatattgtttattctctgcagccaatggcttcagctctgatataatattggatcgttcactcctcttggtcctcaaagcctcaaaaatatgggaccgagcttgaatcttcttctggcactccttgtcagcttgttcaagttttgccttcaggctaggatcctcatatgaacagattctaacaaagaagaacgtgtgagtttgcttaggttcaggccactcatccacaacatcttttgggggtgcaagatcagcagcacttgtggctccatttgcagtaacaatgttttccaaaccaaaaacagctgcctccccacgctccttggcagtagccctactttccttatcttggaaaaggttatcttctccatcaactgctgtaacctgtgacaatgtagcttcagcaccagtggcctccatttcttgatcctgaaaaatagcggcggcgggaggagggcggcggcggcggagatggagagcggaggctgctggtgctgggcgccggcgtcgagcagagtgaggaggagatggagatcgagaatggcgaagttcgggaagggagcaacaagtcagagagaagcgaagccagc

SEQ ID NO: 72100 - DNA, 911 bp, Oryza sativa
  Clone ID: PAT_MRT4530_7250C.1
cccgggctgaggaattcggcacgaggggggcacgccgccacgccatggcgggagaggaaatcggcgcgagcgaggagcacgggtgcgccgcgggaggcgagcccatgaacgactacgagaggcagcggctggcgcggattcgggagaacgaggcgcgcctccaggccctcggcatccgccggctcgccgcgtcccctctcctccacagcccggcttcatcggcggggggcaaggggaagcggaagagccgagccgccgacgcggacgaggagtacctcccgtccgacggcggagaggatgatgatgaggaggagagctcgtcgaccagcgaccaggatggcgaggaagaggaggacgccgaggcttcctctaggtctcggaaaaagggaaagaaaaaggtactgaactcaggaaagtcttctcaagttacgcatagaaaagagaatgctcacctcgctgattctgtggatgatgatgcagccttacagcaggcaattgctctgtccctggcagaatctttagaaaattctgtgccagcaatgagtggagaaactccaagcacagggatgaaaggaagtggtagcacaccatgcaaaaagaataatactgtacccattcaagactcagctaaaaccatgaggataaaaaagcagggcaagagcaggatacaactgacagaagatgatgtggttgcattcttcttttcatttgatgaagttggaaaaggatatatcacgccgtgggatcttgaacgaatggccacagtgcatgatttcatctggacggattctgagatatcaaagatgatccattgctttgatagtgacagggatggaaagattaaccttgaggatttccgcaccattgtatcccgatgcaacatgttgcaggagcctgagaagtcaggatga

SEQ ID NO: 72101 - DNA, 1188 bp, Oryza sativa
  Clone ID: PAT_MRT4530_72510C.1
atggaggtggtggaggccgacgaaactcggcagcggcggcgtcgaggcggatccgacggccacttcaaggacgacgacggcaacctcgagtgcgacgacgctggcgatgggattgctctcctgctgctgatgctcctgcagtgcggcggcttgccggggatcgccgtcggcaggtgcgtcgtcttcaacttcggcgactccaactccgacacgggctccctccccgccgccttcggcttctacctcggccctcccgccggccgccgcttcttccaccgccaaaccggccgctggtccgacggccgcctctacatcgactttatcgctgagaagctcaagatcagctacctgagcccgtacatggagtcgtcgggctccgacttcacctccggcgtcaacttcgcggtggccggagcggcggtgacgcaaaagagcgccatcccgctcggcctcgacacgcaggtcaaccagttcctccacttcaagaaccgcacccgcgagctccggccgcgcggcgccggctccatgatcgccgagagcgagttccgcgacgccgtctacgccatcgacatcggccagaacgacatcacgctcgcgttcctcgccaacctcacgctgcccgaggtcgagcgggagctcgccgcctccgccgccatggtcgccgacgccgtccgcgcgctgcgcgcgagcggcgcccgcaagttctgggtgtacaacacggggcccatcggctgcctcccccaaacgctggcgctgcggcagaagcccggcgacgagctcgacgccgccggctgcctcgccgagtacaacgccgcggcgaggtcgttcaacgccgagctcgccgccgcgtgccgacgcctcgccgcggagctcggcggcggcgaggacggcgccacggtggtgtgcaccgacatgtacgcgatcaagtacgagctgttcgccaaccacagcaggtacggcttcgagcggccgctgatggcgtgctgcggccatggcgggccgccgtacaactacgccaacctcaagacgtgcgggcagccgacggcgacggcgtgcccggagggggagaggcacgtcatctgggacggcgtgcactacacggaggacgccaacgccatcgtcgcccgcaagatactctccggcgacttctcctcgccgcgcaccaagctcaaggcgctctgcaagtga

SEQ ID NO: 72102 - DNA, 2111 bp, Oryza sativa
  Clone ID: PAT_MRT4530_72511C.1
actatggatagttcattgtatggtcacttgcttccaatccagggaaaacaatcccacctatacaatctgttgcaggctttgagcatagtcgctctgtcctggttctggtgctctaaaccttgtttaccattgtgatgcaaagagtcatggtcatcaagcagcatgtcttactctattggcaactaagctgtcagagtaaatttgatgaaagctcaaaattgtgtttgccagataaactgccaccagaaacttatggaaccaatgaatctgctatactcttcgttcatgagtggagcatgtagcctagaatttgtgtgtattcactcagcatttccaccattatccttgctactaatgcatgaaaaaccatcatcactggaaactagatcaatactttttgaaaggccaagaataagtgatctgcatgtctcactgtttgggacaaaacccaattccaacatcctgttctgcaattctaatgactccttgctgcttgtggtttcgcagtaagctctcatcagagcattatagctttcgttgcaatggacatggaaatcaagaacaaaagccctcagaattaattctgccctattaagggctccttccttgcaaaatccacaaaccaatgcagaacaaatagcttcatttggttggaagccagattcaatcatctctgccattatcgattcaccatctaagctccttcccaacctgcaaaagcaggttatgagtgctcgataagtattgaagtccagtctcacttctcttgagatcatttcaaccttgacatctaaagcctcctccacaatgtcacattggcagaagcactctatgatcatattataaattgccaagctagggctgtgcccatcctctatcatccaatgcaacaaacccctggcagcattagggcgcatatcctcgcacaatgcaccaatcaagcaactgtaactctgcgatgggatgacaacaccatgctttcttataggtgccaccatgttcaagcaggtgagcagcttactgaattttacatggctttctaccacaaccttgagagcaaatccttctgatgagaacccacacccgaccatttccatcagcagaaatcttgcctcccttaacctcccttcgttacagtacccggcgataagaacactataagcaacagcatcagggctcaacccactctggatcatcctgtcaaacatccgccgagcatcgcgcaccctcccggccttgcacagcgcatccattacaactgtatgagagaccaagtctggctgcacacgtctgtatggcattacgtcgaacaggtgcagcgcgtcctggagccttcccctgcggcagtagcctgagaggagggtgttgtaggtgaccccgtccggctcgaatccctgctcctcgagctcctcgaggaacccctgcgcgcgctcggcgtcctccccgcggcacagggcggcgacgaggatgttgaacgtgtgcgcgttgggccgcaccccggcgcgcgccatgacggcgcgcgcggcccagaggtcatcgaaccgccccgcgcgggagagcgcggcgaggagggcgttgaaggccgcagcgtcgggcggggcgccggcggccgtggcgcggagggcggcgcggagcgcgtcgcggaggcgggcgtggcggaggagggccttgacgaggaggcccgggagggaggggtgcggcgcggtggcgctggagcggaggagcgtggggagggcgtcgtggcccgggtggagccggaggaggtgggagagcgcgtcgagggcttgggagaagaggcgggaggaggcgagggagcccgcgaggaaggcgaggtgggtcggcgagggctgcgccggcggcggcagcgcgaggaggaagcggagggtggggagcgggtgggagtggccggcgcggaggacgacggcggtgagctcgtcgctgccgaggtaggggagcagccgggagagctcatcctcgatgggcctcgcctcgtcgggggcgtcggaggcggtgaggtggcccgcgacgaggtcgacgacggcgacgcgcgggttgagggcgcgcgggaggagcgacgtcagggtgctcggcggaatgcgcgacacggacat

SEQ ID NO: 72103 - DNA, 393 bp, Oryza sativa
  Clone ID: PAT_MRT4530_72512C.1
atggaggagcggcgacgcggcatgacgatgaggcgacccaacgatgaggggcgctcaacagggtggccagagaagaggaggcggatggtgacgagacggccagtgatgagggggtggatgacgatgaggagtctggcaacgagggggtgtgcagtgaggcggttgacgacatgggcgtacgacaaggcgggcggcaacgagatgaccagtgatgaggacgccaacgacgagggggcgcgggcacgtaacaaggcaggtggcgacgacggggcacacaacgaggaggctaacaagatggggaggtgcaaccgacggttggggatggtcggatggggattgggaactagagataacgacagtggaatggttgaggaggatctggggattgggtga

SEQ ID NO: 72104 - DNA, 300 bp, Oryza sativa
  unsure (1)..(300): unsure at all n locations
  Clone ID: PAT_MRT4530_72513C.1
gcccgccaaggtcttcgtcgcccgcaggtgatcggggcccacccattgcccgtccggttgggactttcgaagaacattcccgnctttcaaagaagggaagaaagggtggtcttcttaagcttgggcccattgaacgaagttatttggtgaagggggggccgggggaagggaaatcttgntttcccccggcttgcttgcccgggaanggnccggttcnaagggggaatccaagccaagaatccggccggtaattcgggaatggggnttcttcaaggggttccctggcacaaagcttcaaaa

SEQ ID NO: 72105 - DNA, 1605 bp, Oryza sativa
  Clone ID: PAT_MRT4530_72514C.1
atggcggctccttcgaatcgaaagcggaagcgtaggtcagccggagccgcgggagcacgaaagagggctcgcaggcacagcgtcgttaagctacgaaaacagcatgaaagcacatgccacgataggataagtgaactacccgatgacctcttgaccaccattttgggccatttggacacaaggacatcagctgcaacaagtgtgctctcaagaaggtggcaacacttacggaaaagcgtcccaaagcttcgattctcacaacatgacatattgccacaaacagaactatctcattttctgagggcccatgaatatgtttttttcaagccatcgctgtgcccatggaagcggcgggtacgagctaatccagagcgccttatcaggctagttggcaggtatagaacacgtatattcttgagtttgttaactggctatctacacaaatcaaatgctggtgacaagaacggcacaaaaatctcaagccttgtcttgtgttgcaccatggaggatttttatgccaacttgattgacaaattgatcagcattgcaatctgccgaggagttgaacatctgaatctggaaacatacttgtattctgctaatgatcaaagacctagcccagctccgtacaagtttcctttatccttgttcgctgatggtaagggattatctgtaacgaaactcatacttgccgagtgcaccctcagtattcctgtcggctttgctgggttcaaatctctggttgagctatcgtttactgaaatgcatatttctgaagacatgattcagacacttattgaaaattgcccaaatctggaatgcttccgtcttagactttgcagtggtgctagacatctcaagattgcatcgcctcatttgcagctcagagaaatcatggtaaagagttgccttcagattacacacatggagctttttgcacctaagttgcagcaatttacatacagagggccatgcatatcaatggttctttcctctgtgcccttgatggagcatgcgtgcctggattacgaaggtagaagggacggtgaatctgtcaagtatattttagggaagttgtctcaagacttttccctacttacaagcttaagcattgtgcttaacacttatcggttgaagaatccagtaattccagaagttgttcccacgccatttaagaacctcaaaagtctcacgctgggtgcgataatgcactgtaacgatgacattggttgggtaactatgctgctggaggtggcacctgtccttgaaagttttcagatagaacttcttaccaacgagaaacgagaacacccaggcggcgttctgtgggagccatcagacaacgcgcaccgtcatctgaggcaggtgaagttctaccgcttcaggatgagacaggctgatgttgcgctggcagggttgcttctggcaagagccccattgctgcagaccatgacgttttcccgtggatctgttcatcgctctcccggtcagaccgctcagtacgttgaggccgccgccgactggaccgcggagcagcgatctgctatcacacggcggcttgagacatgcaatgcttttggtgcaagattggaattccggtcatga

SEQ ID NO: 72106 - DNA, 384 bp, Oryza sativa
  Clone ID: PAT_MRT4530_72515C.1
atggaggtgacgaccatcgccatctccgtttgtgtcaaggtcacctctatctctttcgcattcccatctctccacacaatgccgaaccacttctttgttgaccacctcccgttttgtgcatcacagccaccggaacatgaccacgccaacgacgccctggagcacgcaccggagcgtcgccgcttcgacatcattgtcgtccggccattctcgtccatcccgaagcaagccgctatgccaagaatctcgcctcgaccacctcttcaagacgcctcaagaaccctagccagaaacatcaagaacacggagaacacatccttttcttcctcgacgctgatccgaactcacctccgccgtcatcgtcgattaccgctgcctcggtaa

SEQ ID NO: 72107 - DNA, 390 bp, Oryza sativa
  Clone ID: PAT_MRT4530_72516C.1
atgggcaacgccgccgcgcggggcatgcgccacgacgactacgcgacggcggcggcggcgacgggcgggaggaggaggaagagatgctccaagaacacggaggccgggagcgtgccagcatccgtgcccgggcgtcgtggggcggagcactcggccgccgccgccgccacgggagtgacggtgaaggtggtgctgaggaggaaggacgcggagaggctgatcgcgaggctgaacgagcagagcgcgatggggcggaaggccaggatggcggagatcaagagcgagatcatggcgggagacggcggccgtggcgcagccgccgcctcggcgagccccgggcggtgccgggacgcatggacgcataggctggccccgattcaggagaattag

SEQ ID NO: 72108 - DNA, 202 bp, Oryza sativa
  Clone ID: PAT_MRT4530_72517C.1
cacgcatctacagctactacagtacgccgcgcgccatacaaatcgtcgagcaatccgcctcgctctcgccgcccgcacccacgctcacgcacgctcgcctcaccacccacagcgcacgcggccaccaatggcgagcgcccgcgcgcgcggcgggcgagccttcttcctcctcgtactcgtgctcgtcgtcctcgcggcgccc

SEQ ID NO: 72109 - DNA, 2169 bp, Oryza sativa
  Clone ID: PAT_MRT4530_72518C.1
gatttttgtgggccgttttctcctcggcccatctcctctcagccgctcctcccccttcccttcccacgtgctgagcacgcgcgtcgtgcccgagccaagagagagcgccgccctctccctctctcgccctctctgctttctcctcacctcggcgccgattcccgccgccgccgtttgaattcgccggccgcccttcccgcgcgcgcctcgccttgaccgcgccacgccgatgctcccgcgcgcggcgccgctcatggccgaccgctgtggccgcgccaccgtcgcccctgccgcgtcgaccgccttggtccgcgctcgccgccaaaccagccctcctcccttttcgctgtcatccgctgcgtcaccatggccccgcctccgcatgccacaagccgccaacgtggcgacgccaatcccacgcgcctctccagcctcgccgcccaaaaacggaaggagcaaggctccctttcctcctcctcctttcgcttttcccttgcgggcaaggccgtctcgctctctcccttgtcctggtgcgggagcgtacacagggcgccgctgacgccacctttgcgccctgtcgcgcccacgccaccaccgcgaccatgccagctcaccgctcccaccttgaccgcgccagccctgcgctcccgtggttcgaaatcggccgtccgatccaccgccttcgccgcccagagcatccacgccgtcgccgctttcgcatcgcccacgaaaccgccgctgccgcaagccgagcgcttgaccgccaaggtcggttctcccccccccccccaaaccgacatcgcctcaccccgcgcctataaaacccaaagccgagctccccttcccatctcaatccctcccacttcacactcctactccaccgcgccattgtcgcccttcctctgctctcgccgtcgccgtccgccgccgagcaccgggagaccggtgcgtgcgaggacgcgtgacgcgggactctgggcaccctccttcctccccttccctccgttctcccttcttgctcgtccactccctccctagctcgtgtggtagctcggctagcccccccgaacacgcatggacactgccccaggtctcgccgccaaaccgccgctcgtcgcccttgcaccgcacgctagctcgccggtcgccatgctctgtcccggaggccgtctctcgtcgccagccaacctcggtgccgctccgtccaatccgacgccgggaacggattccttgaaccccggagatgctcccatccctttgaatcgaaccctcgtcgtctcgtcgtgttttccccttttttgctctccggtgattgccgccgccgcaatccgccatcgtcggcttctctcgcgtcgattcctctcgccgccacgcccccggggatccctttgacctccccctggctgccccaaggccgtcggccttctcctttgtctccgcgccgtgtcgccgcttccgccgctgcataacgccgccgtgcgtgcgccgccggtgaccatcgggtcccgcgtcaccgcgtgcgcgtcgcaacaccataccggttcggctaaacccaagcccgcgcacccttcgctctcctcgcgcgcggccacgtcggcatgccggcgagattggccgccgccgccggccgtcgtcgcgcgtcctcttcctgatccgagccgtggaatgagttccccttctcctcctcctgccgccagtgctagctgccccttccggctcgccgccgttcgccggatcccgccgcacgccgtgagccgtcggatcaacctgcccggcctcctctgcctccccatccgacgtgacttccacgtggacgccacctcagtcccgggcccgcttgattgggtcaagtcgcgcccagtcagcctcctccctccgtcttccctcccgtgcgcgcggtccacggcaagccgtgcggctgcacgtgggcccgccgccatccgtccacccggcgcgccgcgcctccgcgtgcaccctccccaccgtgaacccaaccactgccatgtgggtcccgcgcggtggaccgcgcccaccccgacgggccaccctctctccccgcgcgccccttgggccgccctcctcgcggccgtgccggcccattaggctcgcccgagctgcgcaagtccctcgggccgcgccaatgccacccgagacaagtctgattgacat

SEQ ID NO: 72110 - DNA, 1859 bp, Oryza sativa
  Clone ID: PAT_MRT4530_72519C.1
agatagttcagattatgttgggtgagagaagagggagagacaagcagagcaagccggccagccactggtggtggtcgtcttcaacgtcgtagtacgtacgtgcgtactctaatggcgccggccggccagccggacggccggacgggcaggcgagctggcatacggcgagatttgtcagccgatattcatcgatcgatcgatcgtcttctgactcacttgttactgctcatcaccgagttaccaacgcctattgccgatgcaaaaatgcaatgcagtaattcaatcgcgtgtactgcgtactgtcgcatgtgtatgtacgcgcgtactgatcgaaccgttcgatcggaagagagatcgagaagaacagatcaccatgcatgttcttctgatgtgtatctgcacggccggaaaatcgatcggggatctgtcctaccaaaaattatagagacttttaaaacgattaagaatgagaacaaaaagaaaactattataaaagaaggggttgaagagcattcaaacaccagtgtactacactattacatgcagtgtgaggtaattgcttggcaaattcgatcgatcgatggggtacagaccgatggcgacgccaagtcatcaagatctcacgaccagcacacaggaacatcaagactccatgggaccgagctagcatggtgttcaagcgtgcttaatttggtcaatgtgaccagtagaagaccagtcttgctcaaaattgacaactcatggaaatggacgcatacacgaagaggagaaaaggctgaacaaaatgagagcttggcctcaagaagcaaagaagttaaagccataggagaagatgagcacagacgagtccagctagccgcgctgtccttcccacgcttcactccaccaccaccaccccccatggcggcagcaaggatgaagaacaccaccatgggttgcgccttcctgctcgccgcgttcgccatggccgccgccttcgtccccgtggccgagtccaggaccacccccgtggagaagacgaccaccacccaagcagaggatggtgtcaagaagccggactgcgtgccggcgttcgacccgcgctcgttccccggccacggcggcaccacgactccgacgccgatcccgggccaccacggcggcggcggctcatccgggaccacgccgtcgcacggcggcggcccctccgggggcgcgttgccttccccgtcccacggcggcgcggcgccgtcccacggaggagggtacggggcttccccgccggtgacgccctcccctggcggcggctacggcggcggctccccggcgccgtcccacggtggcggcgcctacgggagctccccttccacgccttctggcggcggctcctccccgacgccgtcccacggtggcggcgcgtacggcggcggcggagctccggcgacaccggcgtcgcacgacggccacggcctcatccccaccacccccgggacatgcgactactggaggtcgcatccgatggagatgtggtcggcgctggggcggtggccgagctcggtgggccacttcttcggctccggctccggcggcgctggaacggggatgagcatccaggacgcgctggccaacacccgcggcgacggcgccggcgagctgatgcgggagggcgccgccgcgctgctcaactcgatgacccgctccggcttcccctacacggccgagcaggtgagggacgcgttcgcggcggcggcggggggaggctccgacggcgccgccgcggcgcaggcggcggcgttcaagaaggccaacgagggcggccgcgcggagtatccctgaggggcccaagctacgcgacagctttcttgacaaagtgtcccata

SEQ ID NO: 72111 - DNA, 4261 bp, Oryza sativa
  Clone ID: PAT_MRT4530_7251C.1
atgtatagtagtcccaaagcattactatatctcttccacctggccgtcctgtacagacggctgggcccaacatcacgtacaccacactttggcccaggaagcaatcatccggcccatttcatgtttacgccttcgctgggccggttacgcgctctccgtgtaccatgtggcccatccgcccatgtggcagagagacaaacaccgaaacagacagacacgaatctcaacgcagcagcgccaccagcctcccgtcctgcctccgacgccggcgctgcggccgccgccggtgacccgcccctcgccgcggccggctgccacgaccgaccagatggccgccgcgccgtcgaggtgcctcctcgtcaccggcccgccggtaaggaatccccatcccgcaaaccccaaccgctaaaccctttctccttccttcgtcaaccgcctcacggccgccgccgccgccgccgctctcgcagggcgtggggaagacgacgctggttacgcgtgtgttcgaaaccctccgcgaatcccacccgcatctcaacattcgcggcttctacacccgcgaggtgagggagagtggggaaagggtcgggttcgaggtcgtcacgctcgatgggcgaaccgggccgctcgcctcctccaaggtttccagccgcgagtctgttagatggcctactgttgggaggtacaaagtagatatagcttctctggagtctctagcattgccggagctgcaggtcaaggacgacactgatcttttcattattgatgaagtgggtaaaatggagctgtttagttcggcattcttccctgctgtaatgagagttattgaatcgaacattccagtgctagccacaattcctgtaccaagattgggccgagacattcccggagttgcgaggttgaggaatcatcctggagcagttatttacaccttaaatactggtaatagggatgccatgagagaaggtgtctacaatcatttgagcagtctgttgcagaaaaggaatgctgttaggatcatgtcccggagaagatccaacatgaagaagcatgtctccttcaaattaaataagctgtgcttcagtgtgctgttcatcttacagcatcaagcccccacctctggatctgatctccatctccataagattcagtcgacatggatgaaacaccggagacaaggaggagaaaacatgggtccgtccagcctaatagcctgtttcagttggcagtttggaggaattattatcgctaagcatttcatggctttctcttcttcaccagcatgtaggcaaggccagctgggtatgcatgcattctagctagaatgccaagccaagaagagattaaggcatctctcccggcatctgttaaaaatttgcaagagcgagaccccatttccacggtgggagaagcaacagtttcgccgctgatcggcggcggccggccggtggttgccggggagctgcatgctaactgcagagaggaggcacgagaggatccttcgtactgctggatctctctggcaacaagtgccaccatgctgcagtacctggacttctctcatgctagcacctcaaggaagtggtcacacaagaagcagggcgaaggatttgaagccccaaggaatagcatggagttcaccctggaggctccacaaagctatggcgtcttccaagaggatgtcccgtactcctgcaacatgaggcaacaatacccaaaagctggtctcaaccacagctcatccccaatcaagaggatcatccatgaggacgtatccttcagaacaaatgaagttcagaagagaccaagtgtcattgccaggttgatgggcatggactcacctccaatgagtacaaccgccggtgagcttgccgccggccacacggaggagaaaaggcaagacatgataacctccacaaggccaatgccaagaagagatccttctgaaatggtctcaaccaagcatgtctccttcgtgcaacacaagggctccatgaagcattcgccgaagcaagctgaggtctgtgcctacgacgacagcatggagctctttggtcagctgagcaaggcgatcagcagcagtgaatgggctaaaccgcagccgcgagagcacccgcaggaggaggagctgcagaagttcaagaaggatttcgaggcgtggcaggcgagcaggatgtgggagcagtcgagagctctggaattggagagccatctcgacgacgatgacgtcaggtgcactgacatcgtgccttacaggttccagcacagagggaaggataatgccggcaagaagcacacgcactccaatggcgacgcacactggaggaggagcaaggagagcggcaccggcaccggcacgtcgatctccggcagccggacgttctccctgacgagcgcggacgccagctcgacgcggctgccgctgtcgagattctactacgaggaggagaggctgctgtcgccgaagaagatagtgatcctgaagccctgtcccgagatgagcaccgacgacatcgaggagtcgtcgttggggtcgccggagatggtgaagaaggagaacaacatggaggccttcctcgaggaggtgaagaagcggctcaaggtcgagctcgaagggaggatggcttccgacgacagggcggcggacaggtgggccgccggcggcgacattccggctgacccgaagcagattgctcggagcatcgccaaccagatcagggagaccgtcaccaaggacctgcactcggcgttgctccggtcggagtcgacgcggtcgtaccgcagcgacatcccgctcaatggccagagccagatggactacatctgcagagatgccaggaagcacctctccgacaggctgaagaatgtgctccgacgagagccggagaccgagccgccggcactgtctcaccggagaagaaccgcctcggcgtcgttcaacgaagagccgaggccgaagccgaggcatgaggtggcaaggaagggcaagataaggagcaaggaggagaagaagcacgcgatcgagttcgacgtcaggtctttcagacgtggccaccacaaggcgtcaccaactccggcgatcgactccgacccggtatcgccgaggaacctcatcaggtcgttctcggcgccggtgtcggggaccactttcgtgaagcttctctcggaggagccgcgggtgctgaccggagcacggctgcagcgcaagcaggaaggctacgggagcaggccgccaccgccatcgtcggaggaggagaggaaggggaggaaggacacgttcaacatcaagggcagggtgtccaacctgaggcagaatctggggctgagagcgaagctgttcggcaagaagctccactccgccgacgagtcgccattccccgatgatctccctccgatcggaacgctggtcaccgccccttccgtcctcatccaccccggcgtcctccaggagaactccaccgaggtgccgccgagcccggcgtcgtggtgcagtagccctcctgatgagatgagcaggggaggttacccgagccctgtctcgccattggaggcttcgttcagcgagcaccgatctcccttgaagatggcggctagggacatgagttcgagtgcttctgaaccagagcatccatcgtcggagcaagctcaaaccgatcaagaactcgcagaaacaagtccaatccaggacgacgacgacgacgacacagacgagatagataaccccatcaaagcttacatcagagcaattcttgtcatcgccggtctgtacggacagagacgaagctctgaccaactcttctcagaccgcgaggtgaaaccgatccccgcgtgggtgttcgaggaagtcgagtcgtcgtcgtcctcctcagccccggccaccaccgactgcgacgctgcggccaccggcgtcgaccaccgcctcctcttcgacctgatcaacgagtcgctgccgcgggtcgtccagtcgtcgacgacgctgtgcgcgttcagcaggtggtacggcgcggcgccgaggagatcccccggcggcaagaggctactggacgggctgtggaacaccgtgcaggcgtggctggcgccaccgccgccgacggactcgcccaactccgtggacgagctgatcggccgcgacatgagcatgtcgccgtggaacggcccgttccgcgaggacgtcggcgcggccggcgcagagatggaggcggagatactggacgagctcgtcgacgagacgctctgggacgtgctgctcaacgtcggcgac

SEQ ID NO: 72112 - DNA, 2182 bp, Oryza sativa
  Clone ID: PAT_MRT4530_72520C.1
tcaaattctcaaaatactccttaaagaaatttcctggagaaagtctactcgccccccttgcggttttgggctgatttctccctccccagcccaacactcccttcggctcacaccctccacgtgcgccgcacgtgatacgcaccgaggacaccgccccctttcttctctctcgcgcacgcgtgcctccccgtctcgctctccgctcgccgcttttgatttccgccgcccgtcggcgatttgaatttcgtcaccgccattgccgctcccgcgcgcggcgccgctcatggccgaccgctgtggccgcgccaccgtcgcccctgccgcgtcgaccgccttggtccgcgctcgccgccaaaccagccctcctcccttttcgctgtcatccgctgcgtcaccatggccccgcctccgcatgccacaagccgccaacgcggcgacgccaatcccacgcgcctctccagcctcgccgcccaaaaacggaaggagcaaggctcccttcctcctcctcctttcgcttttcccttgcgggcaaggccgcctcgctctctcccttgtcctggtgcgggagcggacacagggcgccgctgacgccacctttgcgccctgtcgcgcccacgccaccaccgcgaccatgccagctcgccgcttccaccttgaccgcgccagcctgcgctcccgtggttcggattcggccgtccgatccaccgccttcgccgcccaaagcatccacgtcgtcgccgctttcgcatcgcccacgaaaccgccgctgccgccagccgagcgcttgaccgccaaggtcggttctcccccccccccaaaccgacatcgcctcaccccgcgcctataaaaccccgaagccaagctccccatcccatctcaatccctcccacttcacactcctactccaccgcgccattgtcgcccttcctctgctctcgccgtcgccgtccgccgccgagcaccgggagaccggtgcgtgcgaggacgcgtgacgcgggactccgggcaccctccttcctccccttccctccgttctcccttcttgctcgtcctctccctccctagctcgcgtggtagctcggctagccccccgatcacgcatggacactgccccaggtctcgccgccgaatcgccgctcgtcgcccttgcaccgcgcgctagctcgccggccaccatgctctgtcccggaggccgtctctcgtcgccagccaacctcggtgccgctccgtccaatccgacgccgggaacggattccttgaaccccggagatgctcccatccctttgaatcaaaccctcgtcgtctcgtcgtgttttcccctttttgctctccggtgattgccgccgccgcaatccgccatcgtcggcttctctcgcgtcgattcctctcgccgccacgcccccggggatccccttgacctccccctggctgccccaaggccgtcggccttctcctttgtctccgcgccgtcttgccgcttccgccgccgcataacaccgccgtgcgtgcgccgccggtgaccatcgggtcccgcgtcactgcgtgcgcgtcgcaacaccgtaccggttcggctaagcccgagcccgcgcacccttcgctctcctcgcgcgcggccacgtcggcatgccggcgagattggccgccgccgccggccgtcgtcgcgcgtcctcttcctgatgcgagccgtggaatgagttccccttctcctcctcctgccgccagtgctagccgccccttccggctcgccgccgttcgccggatcccgccgcacgccgtgagccgtcggatcagcctgcccggcctcctctgcctccccatccgacgtggctgccacgtcggcgccacctcgacgcgaccgggtcaaaagctgacctcggtcagccgcctccctccgtcccccaccctcgcgcgcggtccacggagagccgacacgctgcgcgtgggcccaccgcacaccgcgtccacccgcgcgccgcgcgtccgcgtgcgctctccccaccgtgaacccaaccaccgccatgtgggtcccgcgcggtggaccgcgcccaccccgacgggcctccctctctccccgcgcgccctcatgggccttctcctcgcgcccgcgccggcccatttggttcggccgagccgcgttagcctttgggccgcaccaatgccaccgaacaagtctaatatacat

SEQ ID NO: 72113 - DNA, 389 bp, Oryza sativa
  unsure (1)..(389): unsure at all n locations
  Clone ID: PAT_MRT4530_72521C.1
gcacgaggctgtctacaagaaagaaatggtgcctgactgactaactgcaaacgtgctgnctaatggaggatcccaaattgaattagcctagcgtttccgcaattgttatgtgctagtatatatatcaatgtgaaatgacaataaagtttctcatcagtcaataatattcagttttctttcagcaaacgaaacaaagagaagatattgttgagtgggtatttgttttctggaaaaattggagtgttgacttcataaaacagagtgtaatatctttaagcagagagcggaataagcatcttctttttaccatgtctactcccggtctccatgcaatgtttgcaacaggaatgctgcattcgttcatcgatgatagtctgattatctgatag

SEQ ID NO: 72114 - DNA, 414 bp, Oryza sativa
  Clone ID: PAT_MRT4530_72522C.1
tttgggtatttaaaaaaatggggtgttaaccaccttttttttcatagttttttatgggtttacgtttaatgattgcagttttttgaatgcagccggacccggggcccgcccggggaaacgggggccggaaccggcggggcccccgggagccccaaacgggggggcccaaaacactaggggaaaaccgggacaaggccgccgggagggggaaagggtacacggaggaaaacacccaacaagaaaaggcgcgaaagaaaaaagggtaaaggggggggggcccaaggggggaggcaaccaacacaaaccgggtttacctgacgggggcattacaagaggggaagccggccagaccaggacacaaactgaaccggccaccccgggggaaggggcggtcaggagaccgggcccccgggg

SEQ ID NO: 72115 - DNA, 1086 bp, Oryza sativa
  Clone ID: PAT_MRT4530_72523C.1
atggagcctttcaaaggaaacttctcaaacctcctcaaccaaggttcctcaagccaagcaacaaatagtgaggcccaaaactccctttctacccaatttcccacaagttatccccaaaacttcagacctagttttctccaaaatttccatccttttggtcctccaagcaactaccaaccatatcgacaccctccaatctttcaaggtgctcagcaacaagaatattatgggcaacctactccaggaagcttggaaggttttcaacttcaagaaaatctggtgcactcatttaaccaagcatttggatttgcagccaatagatcacagtttgttgatcccatcaaaggcaatgacaagaaatcagaacaatattggaaggctgtagctagagagttcaacagcaatatgcctagtaatgggaacaaaaggaaccccaagcaatgcagaacacattgggacaatgtcaagagagatgtcactaagttctgtggattttattctaaagctagaactactttcacaagtgggtattctgatgatatgataatggagaaagcctgtgaatggtacaaaaagcacaacaaccaaaaacctttcaccttggagtatatgtggaaagatcttaaagatcaacctaaatggcgtagagtccttgaagagagtagccataataagaggaacaagatttctgaatcaggagcatatacttcatcgtcgaaccaagacacagaggaggaaacagagcgcaaagagaagcgccctgaggggcagaaggcagcaaaacagaggcaaaaaggaaaaggtgcaccatcacctttaggggataagccaagtcaaaatatggttctctttcacgaagctattacaactaaagcagcagcattgctaaaggcagcagaagcaacactgattggagcagaagcaaaaaaagagaaggcgattgcaaaaaaagagaaggcaagggcagaaaaataccaaatgtatttaaaactgatggagaaggatacatcaacctttagtgaagcaaaactgaagagacatgaaaatgtgttggaccaattagctagagaacttgctgaggaataa

SEQ ID NO: 72116 - DNA, 1230 bp, Oryza sativa
  Clone ID: PAT_MRT4530_72524C.1
atggagcctttcaaaggaaacttctcaaacctcctcaaccaaggttcctcaagccaagcaacaaatagtgaggcccaaaactccctttctacccaatttcccacaagttatccccaaaacttcagacctagttttctccaaaatttccatccttttggtcctccaagcaactaccagccatatcgacaccctccaatctttcaaggtgctcagcaacaagaatattatgggcaacctactccaggaagcttggaaggttttcaacttcaagaaaatctggtgcactcatctaaccaagcatttggatttgcagccaatagatcacagtttggtatgcaatatagtacttcaattagggctacagccaacacttcttctcatggatcagcttctccatgtcatacaagacataatgagaaagaagtagttgaggttgaagaggcaagtgatagcagtgaagaaggaagaagagggacacgcatcaattggactgaagatgacaatatacgactaatgagttcttggttgaacaattcagttgatcccatcaaaggcaatgacaagaaatcagaacaatattggaaggctgtagctagagagttcaacagcaatatgcctagcaatgggaacaaaaggaaccccaagcaatgcagaacacattgggacaatgtcaagagagatgtcactaagttctgtggattttattctaaagctagaactactttcacaagtgggtattctgatgatatgataatggagaaagcccgtgaatggtacaaaaagcacaacaaccaaaaacctttcaccttggagtatatgtggaaagatcttaaagatcaacctaaatggcgtagagtccttgaagagagtagccataataagaggagcaagatttctgaatcaggagcatatacttcatcgtcgaaccaagacacagaggaggaaacagagcgcaaagagaagcgccctgaggggcagaaggcagcaaaacagaggcaaaaaggaaaaggtgcaccatcacctttaggggataagccaagtcaaaatatggttctctttcacgaagctattacaactaaagcagcagcattgctaaaggcagcagaagcaacactgattggagcagaagcaaaaaaagagaaggcgattgcaaaaaaaagagaaggcaagggcagaaaaataccaaatgtatttaaaactgatggagaaggatacatcaacctccagtga

SEQ ID NO: 72117 - DNA, 720 bp, Oryza sativa
  Clone ID: PAT_MRT4530_72525C.1
atgagcgatcgcccccctactggtatccaatccaatccaccgatgaggtgggggatgggagtgagtgggacgccgatctccaggggaggggagagcagtagggggtgcgggcggtgctctcacctgaggcggatcgctggggggcggccgccgcgccggaggatggacacggggctccgcgacgggtggagaagcagcggttcttcttctctcaggagtcgggagaagagatggggggcgtggcagtgggcgaggcgaagcgcttttattcccttttcgtcgcgagagaaaattgagaatttcggtggtggtgcggcggtggcggtcggtttgctatacagagtccttgaagagagtagccataataagaggaacaagatttctgaatcaggagcatatacttcatcatcgaaccaagaaatagaggagaaaacagagcgcaaagagaagtgccttgagaggcaaaaggcagcaaaacagaggaaaaaaggaaaaggtgctccatcaactttgggggacaagccaagtcaaaatatggttctctttcatgaagctattacaactaaagcagcaacattgctaaaggccgcagaagcaacactgattggagcagaagcaaaaataaaagagaacgcaagtgctaaaagagaggaggcaagggtagaaaaataccaaatgtatttaaaaattgatggagaaggatacatcaaccttcaatga

SEQ ID NO: 72118 - DNA, 1749 bp, Oryza sativa
  Clone ID: PAT_MRT4530_72526C.1
tcatttgatcagctttagcgggcgaatcatggcgttgtcctcatgatccagaatgtggcagtgatagacgtagccgggctcggccgtggcgtcgaacgggtacggcttgccgctgtcgaccatgaagaacttgacgacgatcgtcgtcatgtaccccggcgcgatcttgaccacgttcttccaccccttctcgtgctccggcaccgccacctcctcgccgacggcgtgccggctcacgttgcacctcaccgcgtcgttgagcttcgccatgcagcccttgaacgcgtcctcgtcgacgagcccgcggacgcgcgtcgcctggaacgtcgcgaggtggaggtggagcgggtggttgtccggcgtcaggttgatcacctcccacacctccgtcgtccccggccgcggcgtctccgtcgccgggtcctccagcctcttcccgttgatgtacaggtgtgtcgggttgccggtggcggcgtcctcgtactcgtacatcacgatgtaccgcctctgcactgcctcttcctcggcgacagcgacgtagtcgagcagcttcgccggcaccctggaggtgtccttcgccttcgccggcgagatcacgaacttcatcaccttgccgttgaggtcgttgggcgcttggccgtcggggtacgggtacggcgccgtgttgaccagctccgcctcggagctggtggactgggagaagtcgacgacgacgtcgaacgtctcggcgacggagacgaggaggctcgccgcggtgaccggcttggagaggtagttggtgtcggagccgacgacggtgaaggggaggccgttggtgagggagaggttgaagtagcgcgcgttgctggtgttgatgatgcggaagcggtagcggcggcgggcgacggcgaggaacggccatgccttgccgttgacggtgatggcctcgccgaagtactccggctgccactgcgggtggatgttggggatgatgccggtgtagttcatatagatggagccgtcggcgtagaagctccggtcggcgagcatgaggacgcggtcgaactcatcgccgcaggggaggccgagcggcgcctccaccgccgggttgcggatgacgtaggcgccgaggagtccggcgaggaggttggcgcgggtgaggccgagggcgtggtcgtggtaccagagcacgccgggggactgcgcgttggggtaggtgtacgtcggcgtcgaccacgccgggccggtctcgccgaagccggcggtgaaccaggcgaaggcgctgccatcggactgcggcgggtgggcgccgccgtggaggtggacgacggtggggacgccgccgcggcgcgggatggcggtgggcacggtggggtcccacgggaggatgtggcgcgcggggaggtagttctgccacgtcactgacagtgggaccccctgcgctgcctcgatggtgggccccgggaacgtggccgtcgccgccgacgtcccgaacacgaacacggtgctcgccggcaggtcgcggtggaatttccatttcttctggtacatgccgatggtgagacgaatgggagaggggtgaccgtgtctcatggagaagccgtagatcttgggcatctgagggagctcgtcgacgtacatttccagcgagccggccaccttctgaagtgtgtcctccgtcaccggcggcggcgccgacggcggccgggtcccggcggcgacgccgacgaggaccaagaggaggacggctagctccactttggcgcgcat

SEQ ID NO: 72119 - DNA, 147 bp, Oryza sativa
  Clone ID: PAT_MRT4530_72527C.1
atggccaaaaacctatttttgcaaatggctggatggcccacctccccttcaggtgtcacaattgcacgtgaaaaatccattttcacaggaggggcacttaaggaggccatctgcgaaaacccaattttacaaacgcttgattgttag

SEQ ID NO: 72120 - DNA, 366 bp, Oryza sativa
  Clone ID: PAT_MRT4530_72528C.1
tgttacagacgcccacatcacacgcggaaagccgcattaacagccagccatggcgtccacgctgaccaacgtcggcctgtctaccccggcggtggaggtgtcgaccctcgttaggccggtcaccggagctggacgcgtggtggttccccgtgttggccgcggcggtttcgcggtggtgagggcaagcgggccggcgacgccgtcggacatctcggacaagatgagggagagcatcgacaaggcgatggaagcgtgcgcggacgacaccgggagcggcgagcgcgcggcggagcgtgacgaggtggaggagctgagcgctgcggcaagccatgcttgtgacaagctcatggagacctacgacccgtt

SEQ ID NO: 72121 - DNA, 357 bp, Oryza sativa
  Clone ID: PAT_MRT4530_72529C.1
atgacggcgacggcccgatgcgggagcgagggcggccatctgatcaaacggacggccaagatttcgcccgcactgaagaaatcgctcgccaggggggaatggcggctccatctcagccggctggggggcgcccccgagggcggcgccaagccgttgtgccaaggcgtcggcagtccggcgaggcggcggcgatgcggccggacctcatcggggtggggcaagagcacgaaggcagctgccaagccgacgtttcccgtccccggcgagggacggtggagagacgagctccaaggtggtgcgcgcacggcggtcaaccggcactgccccgaggaggccggtgtgcgccggcaatcttag

SEQ ID NO: 72122 - DNA, 474 bp, Oryza sativa
  Clone ID: PAT_MRT4530_7252C.1
acggcacgaggcctcgtgccgaatacggcacgaggggggaaccccaacctggtgcacgcgcagagcatacctacgccatactagggcggtccaggtggtagctacatagggattacgtacgagggctaaccgcgtacggcggcggcccgctacggcgagggcctacgacaaggtagtaacccaggtggcgcctatacgacccactacggcctacgccgacgaccctagacaccttacgccgagctacaaggtagaaggagctacaagaacggccgcctacgccatgtactaccatagtacggctatactatacgtccaggccatacgtacaccggcaagggccccatacgagaacctactatcgaccacgtacgccaaccccgtacgccaacaacgcctgggcataacgccaccaactatcgtccccggcaagtagagcacaacgacacgatacgagataggtagccaaccaac

SEQ ID NO: 72123 - DNA, 581 bp, Oryza sativa
  Clone ID: PAT_MRT4530_72530C.1
gcacgaggctatggccgatgacgacgatgaccaagatgaggttcaagagtcgatggaagaccaaacagctgctgcagcaggtcttgattcaagagtgaaagccagcttggttcttggaacagaatcatttgcaatcagttcagagtccggtattctatcggagcagctggctgctatgaaggagaagagcatggagatcctgaagggctacatcaccaagcataatgctcccgctgatgtccctgatgaacccatcgagggattatctgatgatgaaggagacgcacctgctaagaacccaccaaagaaacctaagaagcagaagtgatcatccaattgtaatggaaaaggttgatctggaaaagatgtgatcgtcctatcgttggattcatgatgcttagaatttgtaagaaattagctgctcgtacaatagtttgctcaaaggctgaacacactgtatttctccagctagatacagatctgcccattaacttgtatgagtaagatatatcaacttgaggggtacatgtaaactgcagcataagaaattctggcaattgcatatgctatcatgagtattc

SEQ ID NO: 72124 - DNA, 1145 bp, Oryza sativa
  Clone ID: PAT_MRT4530_72531C.1
agcccagaggggaaaaaaaaagggaaggaatttttttcttttttttttgttcgcctccgcttcttcctcacgcagctctcgcctcgcctcgccgcccgccactagagaggagagggagaaggaggaggaggcaaatcccagcaaaagagccaagatgcagatcttcgtgaagaccctgacggggaagaccatcaccctcgaggtggagagcagcgacaccatcgacaatgtcaaggccaagatccaggacaaggaaggaatccctccggaccagcagcgtctgatcttcgccgggaagcagctggaggacgggcgcaccctggccgactacaacatccagaaggagtccaccctccacctcgtcctcaggctccgtggcggtatcatcgagccgtcgcttcaggcgcttgcccgcaagtacaaccaggacaagatgatctgccgcaaatgctatgcgcgcctgcaccctagggctgtcaactgccgcaagaagaagtgtggtcacagcaaccagctgaggcccaagaagaagatcaagaactagagcgtcactcgccgggttcatggactggttaaatcaatcgtcatattagacttttatgcttccgttgttatctccctggatgttgttgaaccgtgttttactgtgctggatgcttcagcttcttgttttgacggtcgtggtatatggtaattggcagcaaactatattggtcatgtcgaaggaaaagagattgaaattgacattgagcccaccgacacgatcgataggatcaaggagcgtgttgaggagaaagaaggcattcctcccgtgcagcaaaggcttatctatgctggtaagcagcttgccgacgacaagactgcgaaggactataacatcgaaggtggctctgtcctccatcttgtccttgctctgaggggtggttattagtaaagctaatgtgctagtacttagctcaataccttcgaatggctgagaaaatttactcttgttggcatggaacttgcgaagggataataacatgctagctttgcacatttgcctagtgggagaggttgtcttccatgttattatcttatatgatttgaggcatattattccagattcaccagtcttcaaaaaaaaaaaaaaaaaaaaaccccag

SEQ ID NO: 72125 - DNA, 310 bp, Oryza sativa
  Clone ID: PAT_MRT4530_72532C.1
gataattaagcataagatgatgtagtacaacgatcatgaccaacatcgcatcatcgctgctcgcagggccatgggattgtcccgctggtccgccacctgctgataactgtggcgatcctgcatatttaggctagcatgacgaggcgcaatgcgaggtccctcgccgtccgctgcgagcacagagccagctgcggaggcggactacagctctaacatctggacgtgtgcctcagacgcgtgccaccgctccggttgctaggcgtcatcagcgcagatctacccaacaggccaaggtgtgatcaagaactgg

SEQ ID NO: 72126 - DNA, 449 bp, Oryza sativa
  Clone ID: PAT_MRT4530_72533C.1
atgtcgcacaccccagctgtgttcaaagagaggaagcgagtcgccgggcgattgctgagagagcaatcatggtgcaggcaagccggtgcagttgctggtggcctgtggttgatgtccgacggtgtcaggagcagagaacggggaggggccaaggttgcagcggcggagaaatcacgatggagcagcggatgggcggagaaatcacggtggagtgcgcggctgatggagaagacctcggctccgtgggaggctggggaagacctcgcctccgcggcggcggcagatgaggacgacgtcggctcctgctgctgccggccgcgacggatggggaagaccacggctccggcggtggctggggaagacctcgcctcggttcagtgtgccgcggcggcggctgcagaatgggacgagacgacgacgcgaggaggagcgaggctcgggttgagagg

SEQ ID NO: 72127 - DNA, 1002 bp, Oryza sativa
  Clone ID: PAT_MRT4530_72534C.1
ccggccggggcccgtcttacactccacgctcccctcctcttcagaccaaaccctagctcgcaccgtataaatcggcgaacatcccgccccggccgcgcccgccgccgcagcagcaaggagctagagagacaaaggggagagagccccggggaagaagaagaagcagcagctagggcgccaagatgcaaatcttcgtgaagaccctgactgggaagaccatcaccctcgaggtggagagcagcgacaccatcgacaatgtcaaggctaagatccaggacaaggagggaatcccgccggaccagcagcggctgatcttcgccgggaagcagctggaggacggacgcaccctggctgactacaacatccagaaggagtccaccctccacctcgtcctcaggctccgtggcggtatcatcgagccgtcgcttcaggcgcttgcccgcaagtacaaccaggacaagatgatctgccgcaaatgctatgcgcgcctgcaccctagggctgtcaactgccgcaagaagaagtgtggtcacagcaaccagctgaggcccaagaagaagatcaagaactagagcgtcactcgccgggttcatggactggttaaatcaatcgtcatattagacttttatgcttccgttgttatctccctggatgttgttgaaccgtgttttactgtgctggatgcttcagcttcttgttttgacggtcgtggtatatggtaattggcagcaaactatattggtcatgtcgaaattgtcgtgcgtttcaatattttctagtgttgttttcgatggcaagcggctctgctcccaggctcccaggtcccagctctctgctcgaccttatgtaaggtgtgcaactgtggcaagtcacacctcgtttgcaatgttaagagcatcaccaagatccatccacaaaatttagtttccgtgaatcccaaataaaatttaaggggcaaaaaataactcccaataataaaaagtggggccctctttagttttt

SEQ ID NO: 72128 - DNA, 447 bp, Oryza sativa
  unsure (1)..(447): unsure at all n locations
  Clone ID: PAT_MRT4530_72535C.1
gtcaagagtaataataataataatgcaatgcagttcactcaagaacacctttatgccgagtatatgtaaactcgcagaagtcatggaattacacggtttatccataaatcacacgtagaattcttatatggttgcagttaaactattgcatacaggatctatttctgaagtggtagctaattaactcagtgttggtttagatcatttctagtattctttggatcaattaaaacctaaataacttcatgcatgatagtgctctcggattaattgtacaacaacatggctgccctgattgacaaaaaaaaaagttggtggagaacttatttgttaaaatcccaaaggggacgctgtcaccactcttcattcagagttgcacttgctgctgctgttgttgctgctgntgctggtgctggtgctggtgctgctctttatcatgttcagcaa

SEQ ID NO: 72129 - DNA, 615 bp, Oryza sativa
  Clone ID: PAT_MRT4530_72536C.1
atggcgaaagaccacccagatccgagccatcgcgatctggcggggaggcagccgacggcgaggcagcgtggtgaggcggcggcggttggcggtggtggcggcagggtctggaggatccagtcacgccggaggtggatcccccctcccccgaggacggatctggtgtggggcgagctcgcggcggtggcggcgctacggagcccgcagctggccgacaacagtagcggctgccggctgctgtggcaaccagatgcactcaagacggcgacagcggcgcggagctcgtggcgacggtggtggcagcggccggacaacggcgagcggtggtcggtcacacttagcggcgaccggtccagtgctagccttctcccggacctgtgtgttggcaatgtcggtgtgtgggtggtgggcgagggtgtggcggcgctggctccggctctttgtcgtcgtcctcctcctcgtcagcagggcaccggcttcggctcttcatcgtcgacgagccgccgccaccactcctcgtcgtcgttgtcgtcaccagggctggtgccggctcgtcgtcgtcactggggccggtgcctgctcatcgtcgtcatcaccagggcggcgccgatctga

SEQ ID NO: 72130 - DNA, 810 bp, Oryza sativa
  Clone ID: PAT_MRT4530_72537C.1
atggaagcacctacaacccctgccggtgtacagtcgtgtcctgaggaaaccagcacagctaagccaccatcgatccctgaagcagcaagtgctacccacggtggttatggtgtacaagggcagtttcttacaaagtgttcaatcacccattggacttatttgtcaaaacgaccgacaatagggcactgtgcccaggagagaagaaatgtccagtccagtctttggcagagaaaggatgcacgattcttgtgtgagggaatgcaccatgtgctcaaggataatcaattgagtttggtactagctaaggcaatgagagaccaaaagacaactttgcaacctgttcgtcaacttatggcactcagtaacagcagtagcaatagttccgttcttcccctagctccatctgcagtggcaacccacagtgatagtaataacattgtcaccaaggttatgagttctctactctggtttcagttgggagcatgcacagcgggaagagtgcacatcaaagatccatcaagaaccactacgaattctagaaatcctcatgatgtttctcggaagttggcagaaattgttccatacatgggcaagaaatatccaagaatcagggccattcgtaaatccgagaagtgtcgattgttcttgaaggacaatagttcaattattcccggtcacccgaaagctcacatacaagatttcatgaaagatctgccaatttctagtctgcttggtgagctctcaggttaccaaaaggtgataatgctagcagttcagtacagggacaggaagttccatgagccctcgtga

SEQ ID NO: 72131 - DNA, 437 bp, Oryza sativa
  Clone ID: PAT_MRT4530_72538C.1
ggccgctttttttttttttttttactaaaaacattcgcattttatttcagttcaccaatagccatcacatcaagcagtaatcatgtttacatgaatggaagtaatgaaacatattccattaatccattgatttttcatgagcactactacactactaccaaaggcagcaacagggtccagtgttgcagtcgcctccatgggtgtaaccactcgacttacaggtttggttgcattcgtcgatgcactttaggaagcaatactcgtacccaggaccgtcatcggctaaaccagaggagaagagaagggcaaccatggtgacaactatgaggaggaccttgcagatgactgaagaaaattttgctgccatcttgattctggtactgtagctgatcttgaaatggcttcgatcgaatggttttggtgggatagtactctat

SEQ ID NO: 72132 - DNA, 598 bp, Oryza sativa
  unsure (1)..(598): unsure at all n locations
  Clone ID: PAT_MRT4530_72539C.1
ggcccaagacccncaagganactttnctnttcatacatttacaaggtcctcaagcaggcccccccgacactggtttctccaaccggccatgtccatcctgaactctttcgtcaacggcttcccngagcgcgttcccaccagcgctcccgcccttcccgcctacaacgtcaagcccaccctctcctcgtgtgagccccanacctcgggtcaggcttatcttgcccggtgagcttgccaagcaccccggtgtttgagggtaccaaggctgttaccaagtactcttcaagccccaaataaatcaagcgcttgtcttttggttttctgtttagctctttttccttcatccttttgggcatgggtatttttcttttgacatgggagtcatgatgggttggtaaacgggttggcccccctcgtttgcctcctaatgcttttacggtactggttgcgtctgtttttattggggatcactttttcaggtcacggggtttcgcggctgtacaataccttgagacttggggattagggagaataaatcctgaacacatggcgtctattcctaaaaaaaaaaaaaaaaaaaaaaaaaaaaaaaaaaaaa

SEQ ID NO: 72133 - DNA, 386 bp, Oryza sativa
  Clone ID: PAT_MRT4530_7253C.1
ggccgcgggttttttttttttttttttagacgtattgttgtcccggccaattctgaattcccacctgatgatcacctgcccggccagggatggacatggatggatgagatggttgctcgttctaaacgattcgccgtaatcgaaacagacaagacgttacacctacgccaacaccgagcagaggtggcccccgaatcccatcgaaaccctagctcctacaccaccaccaccacccgcacgccaccaggaaggaaggaaggaaggaatcagccgccgaacccgcagagggtgcggccctggcgcttgagcgcgttgacgacgtccatggcggggacggtcttgccgcggcccccctcggtgtttgtgaccgcgtcccggctgacgct

SEQ ID NO: 72134 - DNA, 700 bp, Oryza sativa
  Clone ID: PAT_MRT4530_72540C.1
aacagacaggatcatctatcctacatcaccattgccttggagctttcagcgagcagtttgctcccaggctgtcttctgctgcccaggctcaggtggatgaactgctcatgatctgacaaaacacatccctaaattctgagccggactctagggtggcccagggtatgacgaggattttgcacacaaaggagatttaccaagccccaattggctctttgtctggcggaacagagatccccctaaagctcaattcttcgcatggcttctcacaaaggaacgtctgcccactaaagttaatctgtgcaaaaaaggaatcgtccagtcggtgttatgccctatttgtcactcggcagaagaaacggtggctcacttattcttcctctacccctttgcaactgcattctggaatcagcttgaaatcccccagactatcaccagcgcgagcgacctctatgctctgcgcccaaatggccgcctcccaacaaagcacttcaaggttttcttcttgctttgtctctggggattatggaataatcgtcatgatgttgtcttccgtggagaatccccctctctgcatagactagttactagatgtattgaggatgcaaccttgtgggcagagagacttatttgtgctgacaggatcgttgtagaatcctggaaacaaattctttcctcccccttcgcactatgtaatcta

SEQ ID NO: 72135 - DNA, 267 bp, Oryza sativa
  unsure (1)..(267): unsure at all n locations
  Clone ID: PAT_MRT4530_72541C.1
aaaaaacaccaaccaacancnnccttgtggtgggcaaacatcatcanaccgccaaatggctaccacaacgaaatcctcaaaacatgtatgtaactaccaaatatacatatagaaaaaaataaggcacactaaatgctactacctactttaccgaagtacatgtaccgaacgcaacgcatgcccacgtccccaccacaagctataagacaacacctaaaagcctagctaccaacaacaaactacaaacaaagcccacatcaaacatac

SEQ ID NO: 72136 - DNA, 141 bp, Oryza sativa
  Clone ID: PAT_MRT4530_72542C.1
atggcggcggcatgtactgatggaactgagcaccggatgctggggagcttcagtggaactcatgaagggggtcaacaaaacaacctgaccctccacgcaaacgcattccgcgatgtcatcttcatccatggaatctcctga

SEQ ID NO: 72137 - DNA, 381 bp, Oryza sativa
  Clone ID: PAT_MRT4530_72543C.1
ccaacctctgcaacatgccatttctcaaaggtacacatgaaaactgaaagcagttcatcaaaatgaaaattgtagaaatataacttacggttacctgccccacttttctatacattgacatccattatgtgtatcatcagctttcatgttgcttggatgatttagtaaacatcatatatgctattctagctccattttggatttgtgggacaaaaaatagaatatggtattcgacaattcaatccttcaatggttcacaaagataaggcaaacaatcaaactaatccactctaacattggctcattatgatcaacatcaaaagtttcatgttggacttgctatacagctattcgtctcaccattatttttctcatgtgtca

SEQ ID NO: 72138 - DNA, 438 bp, Oryza sativa
  Clone ID: PAT_MRT4530_72544C.1
gggctgccgattcggcacgagtaatcttgtacagatgaagtgcagtcaaagtaaatctataccagaacgcactcctttcaccattttggaacatcaacgctcacagcgtcgtgtatattactcaaggccgtgcccgggttcaagttgtcaacaacaatggaaagacagtgttcaacggcgaacttccccgcggacagctgcttattataccacaacactatgcagttgttagaaggcgccaagaaaaggatgttcttacattgcattccagaacatcctaactctatggtaagcccattgcaggaaagaattccatcttccgtgctctcccaaatgaaagttcctagccaaatgcattatcgcatctccagaaaaaagctcccaaagctccagccttacccgaagaatgattcgtggcattcactccaatccattcaa

SEQ ID NO: 72139 - DNA, 315 bp, Oryza sativa
  Clone ID: PAT_MRT4530_72545C.1
atggttgacaatgatggggtcatccattctcctcttgtcccctcccccttcactcccatccccgacctccatttcccccttcccatcccggtgacgacgagctctaccaagccgccatacgctaccgtgatggttccaatgcttggatgtgcacctcctgccacagcgcagctgaggccctcgccagcctaccgtcccccatcactatcgtcgattcgccatgggatggggaagaggctagatctggtgccgggctatgttcgaggagacgagaaggggactgtgctggcgatcaagcttctgttgagtggatag

SEQ ID NO: 72140 - DNA, 404 bp, Oryza sativa
  Clone ID: PAT_MRT4530_72546C.1
tttacggcacaggcgaggcctctgccgagtatcgtggcagccatgcagattttcgtgaagacaggtcagacccacctcttcgaggtgggttcaagcaccactgttgctgatgtgaaggagctcgtgcagtctcgcgagggtgtcgatgcctctgagctgtatgccgtgttcaacggcaagcctttggctgacagcgagctgctgagcctggctggtgttgaggaggagcagaccctgtacatcctgggtcgcctgctgggtggtggtaagaagcgtaagaagaagacctacaccaagcccaagaagcagaagcacaagcacaagaaggtcaagcttcgggtgctcaagttctacaaggtggacgactccggcaaggtgtcccgcctgcggaagcagtgccccca

SEQ ID NO: 72141 - DNA, 1806 bp, Oryza sativa
  Clone ID: PAT_MRT4530_72547C.1
atggcatcgcatctcacgcgcgccctcctctcctccccgccgtcctccgccgccgccgccgccaccgcctctgccgccgccgcgctcctatcctccacgtcgccgctccccgcggcgcgcttcctccagctccacgcgcacctcctccgcacgggcctcctcctcctcccactcgccccgaccgcggcctccgccttcctctccctcgccgccgcctccctcccgtcgcaccgggcgctgccggtcctcctccaccacctcgccctcgccccggagaccctcccctccacatttcgcctcaacgccatcctccgctccctccgcggccccgacgcgctccgcttcctccgccgcgcccgcgcgctcggccgccgcgggaacgccttctccctgtccatcgtcctcggccactgccgcgccctcgcccacgcgcgccagcttcacgccaacgtcgtcgccgaggggcactccccggacgccctcctggccacctcgctggtgagttcctatgctgcctgcggcgacggggacagcgctcgcaaggtgttcgatgaaatgccggtcagggacactatcgcgtggaacgttctcatcacttgttataccaggaaccggcggacgaaggatgctctcaagcttttcgatgcgatgaggggtggggagaatggggcagaaccagacgatgtcacctgcattctccttctccaagcgtgcacgagcttgggtgcgctcgatttcggggagaaggtctgggagtatgcggtggatcatggatatgggggtgagttgaaggtgcgtaactcgttgattacaatgtacacaaagtgcggctgtgtggacaaggcataccaggtgttttgtgagactcctaagaagagtgtggtcacatggagtgcaatgatctcgggtttggcatctaatggttttgggaaggatgctatatctgcatttgaggagatgggtagatcaggcgttgctcctgatgaacagacatttactggtgtgctctcagcgtgtagtcatagcgggctggttgatgaggggttcaagttttttgatattatgtgttacgaatatcagttaaagccgaatgttcatcattatggatgcatggtagacctcatgggccgtgctggcttgcttgatcaggcatatgaactggtggtaaaagacatgagggtagcaccagatgcaacgatttggcgaacccttcttggtgcatgcagaattcatggacatattgaccttggagagcgtgtaatcaaccatctaattgaactgaaagcgcaacaagctggggattatgttctattgcttaatacttatgcagcagttgaagattggggaaaggtagcagaggtcaggaagttgatgaaggagaaagggatccaaactactcctggctgcacgacagtagaactgaacggcgagatccatgaatttattgcagctgatgcttcacatccaagaaaggcagagatttatgaaaagcttgatgagataaacaaacatcttagaatagctggttatgttcctaacgtgtcgtcggagttgcatgatttggattctgaggggaaggaatgcgccctcgcatatcacagtgaaaagctagcaattgcttttgctcttcttgtgacaccacagcatagaccaataaggcttgctaagaatcttcgtgtttgtgtagactgccacaatttcacaaaggtattctctggtgtatatcatcgcttagtgattgtcagagacagaacccgattccatcatttcaaggaattccagtgttcgtgtaatgattattggtag

SEQ ID NO: 72142 - DNA, 161 bp, Oryza sativa
  unsure (1)..(161): unsure at all n locations
  Clone ID: PAT_MRT4530_72548C.1
cggccgcttcttctnttctcttcattcaacattcattgtcttgggttcctcgcataaggagggggtgaacgacggggatcaggtctgccacacacgagacacgatcacctggccatctcctcagcttctgggctgttacgcaagacgctgagagctcacat

SEQ ID NO: 72143 - DNA, 232 bp, Oryza sativa
  Clone ID: PAT_MRT4530_72549C.1
acaaacccaagggacggccccgtggttccccctaaaatttacgggccggaacctggggggaaaaaatttttttttatggaggaatgcataaaacttggggaaaaaaatggcaaaggtttttatgagaaaaaaatttaaaggccctaataaataaggtgccagggaaaggggaaagaaaaaatgttaaaccctgggggacaataaaggggcccaaaccaaaatatttgttttt

SEQ ID NO: 72144 - DNA, 1057 bp, Oryza sativa
  unsure (1)..(1057): unsure at all n locations
  Clone ID: PAT_MRT4530_7254C.1
ccaagagaaaaaaaaaaaaaaaaaaagggcggcggcncntttccccctnncgcccgtttcgggagcgcaccacgtgggggggccgcncagaacagnggacccccgggccgctgagaaggagcccaaganccncaagaacgggangcaggnnacggcaagacgaancccaccaagcccanggnngnggagaccnncncngagnacccnccncnaggncgacnggccgngcgggacangaggcaaacggcggccgccggcgcctgtttaacgnggagaagaaggacccaaccggcgccaaggcgaccaaggcngccgccaagaagaaacgagccncgcccaagcggngccccccacagcagcaacagagacacccagcccccccaccacaccgaaagccgcgccgacggccaccacagccgcggcaaggaccgccaagaaccgcacgcggcgcgcaccaggccagccgcgcaaaaccccgagacccggccggagcaaacgcggaagcgaagacccaacaccgcccccccacaggagcggaacgccagcaaacacggacgaacccggagacaagaagcaagccagcgcaacacacagaccaacccacaaagggaccaaaaaaaaacaaaaaacccccaggggggccccccaacccaacccccaccaaccgcgagcccccaacaccccccccaaccggccaccgacaaaacccccacacggcaaaaacacggcgggacagaccagaaccaacacaaaccaagccccaaaaccccccaccaacaagaagacccacgacccgccccccgcccaaacaggcgaccgaaacagaaggaacaaccccaacgccacaaaacccaacagcaacggccaccccaaccacacccgccacccgcagccgaccccacacgacggaaccgcccagaccgaaccaagacagccccaaacagaaaccaccgaaccgcgagcagacagggacgacccggcgcaccagacaacgagagaaacaccaaacacacaacacacaaacgccacccacccccacccagcgcccgccaccccc

SEQ ID NO: 72145 - DNA, 122 bp, Oryza sativa
  Clone ID: PAT_MRT4530_72550C.1
atccgggctgcaggcagaactttccatatcaaaaataaaagctatcagcccatactctgccttggcttttcatgctacaggaaagctacgtgaagcaaaaggttttctaaaggaagctcttc

SEQ ID NO: 72146 - DNA, 372 bp, Oryza sativa
  Clone ID: PAT_MRT4530_72551C.1
atgggggagggtgccgccgatgcagccgtgggtggtgggggcgccgccgacgccgctgccactgccgccggatccatcgccgccggatctagggcgggagggaggcgagaggggaggagggagccaccactagcctgcgaccgccgccaccgccgacggacccacccgccgacgccgccgacactgccatcgccgctggatctggggcaggagggaggcgagtggggagaagggagccgcagccgccgccacaaccgccggatctgccgcaggcagggagctagagggggtggagggagccgctgcaaacgccaccccaacccgccgccaccgctcggggacgtggaggggagggcggcgaaggcgaagtga

SEQ ID NO: 72147 - DNA, 498 bp, Oryza sativa
  Clone ID: PAT_MRT4530_72552C.1
atgattccggaattcccgcgctggcgagctgttcagcgaggcttcggcgcgcgcggcagtcgtgattgttggaggcaacgcccaacggcgtgcggcggccaaagcacatggcagcagccagcagagagacttcgccattacctggctagcggcgtgggggcgaggaggcgcgacgcggaccagacggcagaccggcggccaccaacggatcctgtggcgacgcgcgaggtggggcggcacggcgcgacggttggcgggggctcggtcaccgcgacgacaaacccgcggtgggcgatcggtggcaagcgcgatggccggtggctacgcgagggagggctggggatgacgacccgcgggatccggcgcgagatgctccatggcgaccagggcgaggaggcaaggcgtcacagcgtcaatctgacgagggcaaaaggacgaggcggcagcttcaacggcgactggttgacgcggcatgaaacacatgatgctaacatgaag

SEQ ID NO: 72148 - DNA, 447 bp, Oryza sativa
  Clone ID: PAT_MRT4530_72553C.1
ccacgcgttcgccacgccgtccgccaccgcgttcgggaccttgcaggttagcttctgggccccgtccagagaaaggtcatcaacttaaggagcttaagcttggtataatcctggttacttacttggtcaaacccttaatttcccggttaggggggggccgtccgagaaaaagaagaagaagggacctggcgtcggccccaaggggggcgctggattcgttcgctttcgcggggttctggttaagggcggggttcccgtcggtgccgttcttgccaatcggccggccgggggggccgttgttgaccgcggggctggttggggtttttccacgggatcagcccggacgacgcgtacgcctccttggacctcccatcctgggcctcctcttcgccaccttggtggtgggcagctacctccggaacgccgggatgttcaagcacctggggc

SEQ ID NO: 72149 - DNA, 858 bp, Oryza sativa
  Clone ID: PAT_MRT4530_72554C.1
atggtgatgagcggcggcggcggcggcgcgaggattgtcagtgatccggcggcgacgccggggttccgattctacccgacggaggaggagctgatcggcttctacctccgccaccgcctcgccggcacgagggccgacgacgtcgcccgcgtcatccccgtcgtcgacgtctacggctaccatccttcccagctcgccgccatggccggggtggcgaccgcgggggacagggagcagtggttcttcttctgcccgagggcggagcgggagctccacggcggcaggccggcgcggaccacgccgtcgggctactggaaggccacgggctcgccgtccttcgtcttctcctcctccgccgccgccgccgccagggtcatcggcgtcaagcgcaccatggtcttctaccagggccgcgccccctccggcaccaagaccaggtggaagatgaacgagtacaaggccgtcgccgccgccgccgccgacgacgaccacaacgccgctggcgtggccgtgcagctgccaccaatggcgccgccgccgtcgtcctccgcgtgcgtgcggctgaggaacgagctgagcgtgtgccgggtccaccatcaacctcagctccagcaacaacaacgtcagctgccatcgtcggcagcggcggcggcgacgaacggcaacctcatcgccctcgccggcgggtacgagtgctcacacgacagctccggtggctcgtcggaagatgccgccatcgactggagctcgctgattaccgccgccaccgattccgctaccgccgccgttgatttcagcttcaacgacgacatcgatttcagccctgccgctgttggcccatgggcgccacagctttga

SEQ ID NO: 72150 - DNA, 1138 bp, Oryza sativa
  Clone ID: PAT_MRT4530_72555C.1
atggtgatgagcggcggcggcggcggcgcgaggattgtcagtgatccggcggcgacgccggggttccgattctacccgacggaggaggagctgatcggcttctacctccgccaccgcctcgccggcacgagggccgacgacgtcgcccgcgtcatccccgtcgtcgacgtctacggctaccatccttcccagctcgccgccatggccggggtggcgaccgcgggggacagggagcagtggttcttcttctgcccgagggcggagcgggagctccacggcggcaggccggcgcggaccacgccgtcgggctactggaaggccacgggctcgccgtccttcgtcttctcctcctccgccgccgccgccgccagggtcatcggcgtcaagcgcaccatggtcttctaccagggccgcgccccctccggcaccaagaccaggtggaagatgaacgagtacaaggccgtcgccgccgccgccgccgacgacgaccacaacgccgctggcgtggccgtgcagctgccaccaatggcgccgccgccgtcgtcctccgcgtgcgtgcggctgaggaacgagctgagcgtgtgccgggtgtacgtcagcaccggcacgctccgatccttcgaccgccgccccctcgacgcgcccccggtgatcagccaccatcaacctcagctccagcaacaacaacgtcagctgccatcgtcggcagcggcggcggcgacgaacggcaacctcatcgccctcgccggcgggtacgagtgctcacacgacagctccggtggctcgtcggaagatgccgccatcgactggagctcgctgattaccgccgccaccgattccgctaccgccgccgttgatttcagcttcaacgacgacatcgatttcagccctgccgctgttggcccatgggcgccacagctttgattgattgataatttgtgcacactgcataataactgaattactagtaatttagtagtagtaagtttgatcagtgcttgctaattcccatagtttctatttcagtcaactcgattgatttattacctcccaaactctcaattctgcttgtctttaatttttcttgaataaattctgaactatggcctgttcttttcttaaaaaaaaaaaaaaaaaa

SEQ ID NO: 72151 - DNA, 433 bp, Oryza sativa
  Clone ID: PAT_MRT4530_72556C.1
ccccgtcgtcgtctttgtcctcggctccgcatcatcaagccctgtgtcggccgtgtctcgcctccgtccaaggatcgccaccgaagtcgtcccctcgccgttcgtctccgtcgtccccaagccgccaccgccgtgcccgttcatcgtcgttgttcccatgcctcgtcgcgtggtgctttggtcgttccggaggttcccgaagcgtggttcgcagtcgtcgccgaaggccgcgagtcattgcttcgcagaaaactttaccgacagagaaaccagccgtaccagcgccaccaagactcttcgcgagttcgctgctccctctgctgacaatgtggccatcgggccacaagtcaacataggagatgtggatttcgatttgaagtccagcctcatcacgatggcgcaggctagcccgtcctcatcatgggatggatga

SEQ ID NO: 72152 - DNA, 3666 bp, Oryza sativa
  Clone ID: PAT_MRT4530_72557C.1
atggcgttggaagccagggccgtgcagatatctatcccaaccgatgcttgctgcttctccggcggcaagtcctcccacagaatgtcaccggcgacccagttggtcagagccccgcagcatgccgtcgctacagcatacgctgagaagagtttggaggcaggaggaaatgcagcaagcttgccaaacaacatgttagaattagtgaacgtcgtcatgcaccagaggaaagcaatagaggatacaatgaggaagaagaagaagcagcagcttcacaaattcgagatgttgccgtctccctacgacacggcatgggtggccatggtgcctctgcccggatcatcatctcagcttccatgcttcccacaatgcgttgagtggatactacagaaccagcagagcaatggttcttgggacctcaaccagctggactcaatcaccaaggatgctctcttgtccacactggcttgtgttcttgcactcaggagaggactgctttttattggaaggaatttctccattgctatggatgagcagctggctgctcctattggattcaatataacttttcctggtatgcttagctctgtaattgagatgggtttggagagagatgaggaagttatgctggacatcacaacatgtgcaatggcatttcgtattcttcggatgaatggatatgatgtttcttctgaaatgtctgatgctcgcatttggtgggctataaacggggtgcttacaactgtcgtcgacgatttctttgacgttggaggatcaagagaagaattggaaaacctcatttcactagtagagatgtgggatgagcatcacaaagaggagctctactctgaacaagtagagattgtattttttgccatcttcaattcagttaatcagcttggagcaaagtggctagatttgcttaggtccatgatgaccgaggtagaatggaggatcagcaactacgtgcctacaccagaggagtacatggaaaatgcggccatgacatttgcattgggcccaattgtgctcccagctttgtatcttgtcggaccaaagatccctgaatctgtcgtcagagattcagagtacaacgagttgttcagactgatgagcacatgtggtcgtctcctgaatgatgttcagacatacgagagggaggatggcgagggcaaggtgaacagtgtgtcgctgcttgtcattcagagcggcggttcagtgtccatcgaagaggctagaagagagatcatgaagccgatcgagagatgcaggagagagctgctggggctggtgctcaggagaggcagcgccgtccccgggccgtgcaaggagctgttctggaagatgtgcaaggtctgctatttcttctactcccgtggcgacggcttcagctcgccgacggcgaagtccgccgccgtggacgcgcgtcgtcccacccaagatgatctcaacgctgacaccagggtcgccaacatcgagatcatctcaggaaagttcaaatccatcgtagatctgggatctgaagccgtgctaaacatgatcgtgttgttcatattcctatattttaaaaatcctggtttgcccaaggagggcgccaagccaccgatttcacggacgacggatgaccattgctgccggctcgatgaagtctgctatgctccatcgacaaacaccgggaggggaggatctccagcaaccgacaccgtcgaatgttccatccacatcgccgctcgcgccaccccacccgcccgtccgtccaaaacacaggaaggagctccaggcaaggacaagggaccagctccagacattggagttatctacgtctttgatgatggatcttggggtacaagaggattcggcgtggcggtcacaagagatgttctgtcgtctacgttggcgtgtgttcttgcactcaagagatggaatgttgggcaggagcacatcaggagaggactagattttattggaaggaatttctccattgccatggatgagcagattgctgctcctgttggtttcaacatcacttttcctggtatgcttagccttgccatggggatggatttagaattccctgtcagacagacggatgttgatagacttcttcacctccgggagatagaactggaaagttcatggttagaaagagatgaggaaattatgctggacataacaacatgtgcaatggcttttcgcctgttaaggatgaatgggtatcatgtttcctcagtcgagttatctcctgttgctgaagcttccagtttccgtgaatcacttcaaggatatttaaatgataagaaatctctaatcgaattatacaaggcttcaaaaatgaagtatgctcttaagtttcccttctacaccacactggaccgtctagatcacaagaggaacattgaacgttttgatgcaaaggattcccagatgttaaagacggaatacttgcttcctcatgccaatcaagatattctagctttggctgttgaagatttcagtagttctcaatctatataccaggatgaacttaattatcttgagtgttgggtgaaagatgaaaagctcgatcagctgccatttgcacgccagaagttgacatattgctacctttctgctgctgctaccatattcccccgtgaattgtctgaagcccgcattgcatgggctaaaaatggtgtactgacaactgttgttgatgacttctttgatcttgggggatcaaaagaagaactagaaaacctcattgctttagttgagaagtgggatggacatcaagaggagttctactcagaacaagtaagaatagttttttctgctatttatactacagtgaaccagcttggagcaaaggcttctgcattacaaggccgtgatgttacaaaacacctaacagaaatatggttatgtctgatgaggtctatgatgaccgaagctgaatggcagaggacaaaatatgtgccgacaatggaagaatatatggcaaatgctgttgtctcatttgcactgggacctattgtgctcccgactctgtatttcgtaggaccgaagctccaagaggatgtcgtcagggatcatgagtacaatgaattatttagactgatgagcacttgtgggcgtctcctgaatgacagccaaggctttgagagggagagcctggagggaaagctgaacagtgtctcactgcttgttcatcacagtggtggttctatctccatagacgaggctaaaatgaaagcccagaaatccatagacacttccaggaggaacttgttaagattggtccttggagaacagggtgctgttcctaggccatgcaagcagctgttctggaagatgtgcaagattgttcacatgttctactctcggactgatgggtttagctcgccgaaggaaatggttagtgcagtgaatgcagtcgtcaaggagccacttaaactcaaagtgagtgatccatatggctctattttgtcgggcaattgagtgcttctccgttctgttttatcagggatatcagcaacgagctttatacaggttgatatttcttttctttttctttacgataagggtttaaatcctagtacccccgattatagctgctgtgtgctttaagtataataaattttacactcttaccatttttttttaatgtaaatgttggtatatattggtccc

SEQ ID NO: 72153 - DNA, 711 bp, Oryza sativa
  unsure (1)..(711): unsure at all n locations
  Clone ID: PAT_MRT4530_72559C.1
ccacgcgtccgatcatcttagaagcataggctcttggtcaggtagcttattgaaggaaagtgtgtgctctaatggggtgaaaaaagctccaatctttgaagagatgaagtatgctcttaagtttcccttctacaccacactggaccgtctagatcacaagaggaacattgaacgttttgatgcaaaggattcccagatgttaaagacggaatacttgcttcctcatgccaatcaagatattctagctttggctgttgaagatttcagtagttctcaatctatataccaggatgaacttaattatcttgagtgttgggtgaaagatgaaaagctcgatcagctgccatttgcacgccagaagttgacatattgctacctttctgctgctgctaccatattcccccgtgaattgtctgaagcccgcattgcatgggctaaaaatggtgtactgacaactgttgttgatgacttctttgatcttgggggatcaaaagaagaactagaaaacctcattgctttagttgagaagtgggatggacatcaagaggagttctactcagaacaagtaagaatagttntttctgctatttatactacagtgaaccagcttggagcaaaggcttctgcattacaaggccgtgatgttacaaaacacctaacagaaatatgggtatgtctgatgaggtctatgatgaccgaagctgaatggca

SEQ ID NO: 72154 - DNA, 1459 bp, Oryza sativa
  Clone ID: PAT_MRT4530_7255C.1
ttaacatgaaccatctagaccgggcatgtcatcttgcagccacccgttccagtactgcacgccgccgccgccgcagttcgcgtccggcgccgccgtcgacgccgctccgaccgcgccgccgacatcgccggtggcggcctgaggtggagccgcgaacgccgccatttgctgccacgcggtcaggtcgatgctgtagccgcctccgccaccggcggtagccggcgccatcagcatctgcctcaggagatcggggaacgacgacgacgtcggcggcgccgccgccggcgcgacgacatgggcagaagccgccgtcgaggctgtggcgccggccttgcctccgccggcggcgcgcttgctgttcttgcggccgccgccgacggggacgtcgcggagcgtgccgccctccgtccagtggcggcggcacgccttgcagaggtaccgcggctgcgtgcggctgtagttgttgtagtagcagaacttggtgttcgccgagccgcaccgcgggcactgcctcggcggcggcctcggcagcggcgggtgcccggcgtgcctgccaccctgcctcggcgccgccgccgcgttcaccgcctcgacgccgccgccgccaattccgccattggcagcagcggcgtatccctgcccctgcacgccaagatcgtcgtcgaacaccatcagctcatcgtcaagatcagtcaaccatcgagctaatccgtgacgtaccatgagaaggggaggaggaggaggaggaggcctaggcggggtcaggtaagagaggggcgacgaagcggaagaggaagaagagcccaggaacggcgacgacatggctcccgcgacgccgcggcgagggccagggtagcttcttgccggcggcggagacgacgacgacgagctgcgcctgcgcgcgcttgctccgcgccggggacgacgacgacgacgacgacgaggagtagtagtagtcgtaccacggtgaacccctgcgcatgtcggaccggtgagccgccgccgccgccgatcgaacactctccttcttcttcctccccccaaccagctgctgctgctcttctctcctctcccctcccctcccacctgtcctcccctctcccctcccaccggtggcagtggtggcgcaccctggcgcggtggccggagggaggggggagggcagtggcggtggcggctgctgctcctggctatggctcccctccctccctcccagatctggcccgaggaggaaggggggagggcggtggccagcggcgctctcctccctcccttctagatccagccggaagaggggaaccggccggcggcggcagtagcagtggaggcggcatgagggcgaaggtggcggccaccagaggcacggcggcgcacgacaactaggaggagagtcggcggcaccgctccccttcctccgtccctccctcccaaatccggccagatgaggggagccggccat

SEQ ID NO: 72155 - DNA, 1148 bp, Oryza sativa
  Clone ID: PAT_MRT4530_72560C.1
cccgcgtccggttgatgactgagctagatgtgaagttcactgacagcatgagcattctggtttcgtctgatgtgccagaaggcaaaggtgtttcttcttctgcatcagtggaggttgcaactatggctgctattgcagctgcctatggtctaaacattgctccaagggacctcgctttgctttgtcagaaggttgagaatcatgttgtcggagctccatgtggagtaatggaccaaatgacatctgcttgtggagaagctaacaaactccttgcgatggtttgccagcctgcagaagtgaaggaattggttgccattcctaatcatatgcggttttggggtctggactcagggatacggcatagtgttggtgggggagattacggatctgtaagggtaggcacttacatgggacgaaaaatgatcaagtgtgcagcatccgacttagcttcagaatcctcagtttctgatgctcctgttcaatctaatgactataaacaaaatgccatagaactactgaaatccgaagcttccctggagtatttgtgcaacataccacctcacagatatgaagctatttatgcaaaagatattccagaggtcattactggagatgcatttttgaagaaatatggagatcacgatgatacagtaacagcaattgaccctaaaagatcttacaatgtgaaggctcctactaggcatcccatatatgagaactttcgagttgagaccttcaaagcactcttagaagcagctaataccgatgagcaattgtcagcccttggagaacttatgtaccagtgccactacagctataatgcatgtggtcttggttctgatgggactgatctgctagttaatctggtacaagaaatgcagcacagaaatatgtcaaaaggtgaaagtcctagtctatttggtgctaagattaccggaggaggttccggaggctcagtttgcgtcatggggaaaaactgcctcaaaagcagtgaggagatcatcgagattcagcaaaggtacaagggcagcaactggctacctaccaatcctattcgatggatcatccccaggcgctggcaaattcgggtacctggagatccgacgacgcccctcgtgaccaattgctgccaaatgaagagattggct

SEQ ID NO: 72156 - DNA, 2193 bp, Oryza sativa
  Clone ID: PAT_MRT4530_72561C.1
atggcgttggaagccagggccgtgcagatatctatcccaaccgatgcttgctgcttctccggcggcaagtcctcccacagaatgtcaccggcgacccagttggtcagagccccgcagcatgccgtcgctacagcatacgctgagaagagtttggaggcaggaggaaatgcagcaagcttgccaaacaacatgttagaattagtgaacgtcgtcatgcaccagaggaaagcaatagaggatacaatgaggaagaagaagaagcagcagcttcacaaattcgagatgttgccgtctccctacgacacggcatgggtggccatggtgcctctgcccggatcatcatctcagcttccatgcttcccacaatgcgttgagtggatactacagaaccagcagagcaatggttcttgggacctcaaccagctggactcaatcaccaaggatgctctcttgtccacactggcttgtgttcttgcactcaggagaggactgctttttattggaaggaatttctccattgctatggatgagcagctggctgctcctattggattcaatataacttttcctggtatgcttagctctgtaattgagatgggtttggaggttcctattggacaaaccgacgtcgaaagagtacttcatctccaggaaacggaattgaaaagagaatatgaggagaactatcgtgggagaaacacatatatggcatatgtgtcagaaggattagggaatgcccaagactggaatgaagttatgaatttccagaggaagaacggatcattgttcaactccctttccataacagctgcggtgttagtccataattatgatgctaaagctcaccgatacttaaatttgcttctgaacaaatttggcactgcagatgacctgtgtcatatcgctgaagtttctgatttccatagttcgcatcaaggatatttgagtgacacaagaacattactagaactatacaaggcttcagaagtcagtgttgcagataatgagtttattctagatagaataggctcttggtcaggtcggttactgaaggaacagcttagctctggtgcgttgcaaagaacttcatcaatatttgaagaggtggaacatgctcttgactgtccgttctacgcaacattggatcgtctagtccataaaaggaacatcgaacattttgccgcgatgagctatatatcatatgctcaaaacaacatacctgatgaacttgagcgtatagacagttgggtgaaagagaacagacttcatgagctgaagtttgcacggcagaaatctgcttatttctatctctctgctgctggaacggtttttgatccagaaatgtctgatgctcgcatttggtgggctataaacggggtgcttacaactgtcgtcgacgatttctttgacgttggaggatcaagagaagaattggaaaacctcatttcactagtagagatgtgggatgagcatcacaaagaggagctctactctgaacaagtagagattgtattttttgccatcttcaattcagttaatcagcttggagcaaaggtttctgctgtacaaggccgtgatgtgaccaaacacctaatagaaatatggctagatttgcttaggtccatgatgaccgaggtagaatggaggatcagcaactacgtgcctacaccagaggagtacatggaaaatgcggccatgacatttgcattgggcccaattgtgctcccagctttgtatcttgtcggaccaaagatccctgaatctgtcgtcagagattcagagtacaacgagttgttcagactgatgagcacatgtggtcgtctcctgaatgatgttcagacatacgagagggaggatggcgagggcaaggtgaacagtgtgtcgctgcttgtcattcagagcggcggttcagtgtccatcgaagaggctagaagagagatcatgaagccgatcgagagatgcaggagagagctgctggggctggtgctcaggagaggcagcgccgtccccgggccgtgcaaggagctgttctggaagatgtgcaaggtctgctatttcttctactcccgtggcgacggcttcagctcgccgacggcgaagtccgccgccgtggacgcggtgatccgcgacccactcgatctcgccgccgtcgtcgcaagccaagaacccatatatatcattcctgcttcgtga

SEQ ID NO: 72157 - DNA, 3411 bp, Oryza sativa
  Clone ID: PAT_MRT4530_72562C.1
tctctctctctctctctctctctctctctctctctctctctctccctcgtgccggtgcccgcgctgcaggaattcggcacgaggtcccttccgccaccacaccatgccacccgccggagacgccgcccacgcgccgccgccgccgcaccgccgcctcgtcttcgccttctacctcaccggccacggcttcggccacgccacccgcgccatcgaggtggtgcggcacctgatcgcggcggggcacgaggtgcacgtggccacggcggtgccggagttcgtcttcaccgccgagctgccgcgctccccgtcctcccagggcctcctccacatccgcagggccatcctcgactgcggcgccgtccagaccgacgccctcaccgtcgaccccctcgcctccctcctcaagtatcatgagacggccgtggtgccccgcgagtcgattttgaggaccgaggcggagtggctcacctccatcaacgcagacctagtgatctcggatgttgttcctgtggcctgcagggtggctgcagatgttggtatcccctcggtctgcattgggaattttagttgggactacatatatgcagaatatattgtggcatctggcgatcatcaccgttctattgtttggcagatagcggaggattattctcattgtgatatcttacttcgactacctggatactgccctatgccggctttccgtgatgtcactgatgtgcctcttgtggtaagagggctacgcaaatctagatcagaggtgaggaaggaacttggaatagcagaaaatgcgaaggtggtggtttttaattttgggggacaggtctgcggtgcatctgattctcaagaggttcctccaaacttcattaagcttgcaaaagatgcttacacacctgatgctatggcagcatctgactgcatgcttgtccatattttctatattttgctatgcactgcttactctcactaccctatagggaaaattggatatggaactgcaagtgaggctttggcctacaagctgccatttatctttgtccgcagagattattttaatgaagagccatttttgcggaatttacttgagcactaccagagcagtattgaaatgaccagaagggacttccttcatgggcactggaaaccttatctactccgtgctctcacacttcaaccatgctatgatggtccaacaaatggtggtgaggtggctgcacgaatcctcgaggacactgctgttgggaagaagtgtatttctgacaaattcaatggagcaagacgattgcaagacgccatagtgttagggtatcaattacaaagggctccagggagagatgtagcgattcctgactggtattctctttccgagacagaagttggtgcctgtccaatctcagaaaatattaaaacaaaagaaagcaccgaatcatgttttgaagactttgagatacttcatggggatctgcaaggattaccagacaccatgtcctttttgaagagcttatctgaatttaatcaaagtgagttaaagagtaatgggaagcaacctcaagagagaattgctgcatctgtgctctttgactgggaggaggaaatgtatatagcaagggcacctggtcgtttagatgtcatgggtggcattggtgactattcaggaagtctagtcttgcagctgccccttcgggaagcctgtcatgttgctgtacagaggaaccacccaagcaatcagaagctatgggaaaatacacaggcaagacggcttgagaacggaggcatggaacctgtggtacaaatagtatcatttgggtctgaattgagtaaccgttcaccaacttttgatatgaaattgtcagatttaatggatgtcgacaaaccaatatcctacgagaaagccagagaatttttttgtcgcaacccatcccagaaatgggctgcttatgtcgctggaacaattctagtgttgatgactgagctagatgtgaagttcactgacagcatgagcattctggtttcgtctgatgtgccagaaggcaaaggtgtttcttcttctgcatcagtggaggttgcaactatggctgctattgcagctgcctatggtctaaacattgctccaagggacctcgctttgctttgtcagaaggttgagaatcatgttgtcggagctccatgtggagtaatggaccaaatgacatctgcttgtggagaagctaacaaactccttgcgatggtttgccaggttagtagcgttcaatattcattgcaagttttgctgcagcctgcagaagtgaaggaattggttgccattcctaatcatatgcggttttggggtctggactcagggatacggcatagtgttggtgggggagattacggatctgtaagggtaggcacttacatgggacgaaaaatgatcaagtgtgcagcatccgacttagcttcagaatcctcagtttctgatgctcctgttcaatctaatgactataaacaaaatgccatagaactactgaaatccgaagcttccctggagtatttgtgcaacataccacctcacaggtattgcgcggataatgatatcttacagttacatctcaatttcagatatgaagctatttatgcaaaagatattccagaggtcattactggagatgcatttttgaagaaatatggagatcacgatgatacagtaacagcaattgaccctaaaagatcttacaatgtgaaggctcctactaggcatcccatatatgagaactttcgagttgagaccttcaaagcactcttagaagcagctaataccgatgagcaattgtcagcccttggagaacttatgtaccagtgccactacagctataatgcatgtggtcttggttctgatgggactgatctgctagttaatctggtacaagaaatgcagcacagaaatatgtcaaaaggtgaaagtcctagtctatttggtgctaagattaccggaggaggttccggaggctcagtttgcgtcatggggaaaaactgcctcaaaagcagtgaggagatcatcgagattcagcaaaggtacaaggcagcaactggctacctaccaatcctattcgatggatcatccccaggcgctgccaaattcggctacctgaagatccgacgacgcccctcgtcaccaattgctgccaaatgaagagattggctttcagtttgtcgtgcaactcggtctgtcaatgagtttcatcaagaccgttgattgaaaacattgtgccatcctgtcaactgcaattgttcgttcattgattaattgctccattctggggcacagtcgttgcaattgtagatttcgtgtgacagccaattcgttgggttgctttcgtgtggaactgtgaaaatgtgaaatactggattcttctgaaaggttagtggtttggt

SEQ ID NO: 72158 - DNA, 645 bp, Oryza sativa
  Clone ID: PAT_MRT4530_72563C.1
cccacgcgtccgcaaggtgattgatcccactaacgaccaaggtaaggcgccttcaacggagaaaaagaagaagaagaagaagaagaagaagaagaagaagaagaagaagaagaagaagaagaagaagaaggtccgctacactcaagagcagattctatactgcattgggaacccggaggaattgcccgagcgcagggacacgcccaagctgaccgaggccctgggcgcggagctcctggccaagctaccgccggacctcgtcgcccacctgcgcgccatggacgacgccaaggaggagggcaaggcgaggcgcaaggcgctcatcgaggagctgcgccatgagcgggaggtcatctacaacatccgcgataagccggaggacgtgcttaagcagtactacgccaaaggctacgcggagtacgaggttatcatcgacgatgatgactacgaagacggcgaccaaggcagtagagctgcagctcactgaatagtaaataatcttataaccatcgtcggtgtttggcatcgatctagctagctttttagttgtaggggaagttatgtatttccccttcattttatcactataagcaataatgtttgtgtgactctatgattagctataatattaattcttcgatttct

SEQ ID NO: 72159 - DNA, 219 bp, Oryza sativa
  Clone ID: PAT_MRT4530_72564C.1
atggcaagtagccgatacaatacaacttgggctcgaccccagaccattgtaattgaggagacaatccaatacaacttcggcgcatcgccacccttttttgcttttcttttcggcgagttctctcgacaagagattaactacggcatctaccatcttgaaaagatcaaaccagttagcacactcttagcacactcgaggcaagtcttggacctgcactag

SEQ ID NO: 72160 - DNA, 332 bp, Oryza sativa
  Clone ID: PAT_MRT4530_72565C.1
tcggcacacacgaacaccacagagagagttcagcggcgcccggcgagaagcttctaccggtgacagcggcctcggcttcttgcagctcgctactcttccctctcttgatcgagtctcgtgccacacatactcgtttcgtcatctgggtggcggcgtcgaccaaagccttggctctcctatcaacagtgctcgtcgcactcttggctgccacagcggccgtgagagtgctcgacgaggatgaccacaatcttggccgacttactccagatcgcgcgcctgtcaactctatcagctacgcacaccattgggatgtctccgcgtaccagcttcct

SEQ ID NO: 72161 - DNA, 588 bp, Oryza sativa
  Clone ID: PAT_MRT4530_72566C.1
atggctgccgccggcagcagcaaaaccgcgagcttgttgctatgcctggcgatgatctccttcgtgcagctggcacagtcctcaccgagcggcgacaaaggcatcaaagggtttcacggcaagaagctcagcttcaccctgtaccagcaggagaccatcaacaagaccagctacatggtcgtcgccggcgtcgccggcgccggcgtcagcgagaccaccacgcccttcggcaccgtctacgtcttccgcgacgacctgacggtgcgccccgagaggtcgtcccgggtggccggcgtggtggaggggacctccgtgacgaccagcttcgacgggctgaggagcctgtcgctgggcaagatcacgctcgaccaccgcggccgccggggatccatgtccgtcctcgggggcacgcacaacacccggccgtccgactgcccggtggtcggcggcacaggtgacttcgcgtacgccgtcggctacgtccggacgtcgccggtgaacctgcggggatcgtcggtcacgttcaaggtggagtttcacctgtactggccaccgtatgctcattacgctccaacttcaaagcactag

SEQ ID NO: 72162 - DNA, 770 bp, Oryza sativa
  Clone ID: PAT_MRT4530_72567C.1
ccatggccgcgggattattaaccctcactaaatgctggggagagtgtaattgcgcccttgatgtgtctgttgggagtttgtgttttgtgacagcggattacacgctgtgatttactggagggtagtggtaagttttcaataccctgaaaggttacgttctggattgattcgagttcgggattagtaaaggacgacgtccgtagatgaatcgcagctgggctctttagtactccgacatgatgccgttaggtacggggcatgttgattacgacacctctggccaaatgttgaacagagtcgccattggacttgtctaggagggaagacaattgattctctggccaaattcttgcgtcactcaaccctaaagatggataactattttttttaacacctaaaatgattacacgtcaatatattagctaaagctggatatagacctaacccgctatatgtaacttgcactgttggagcatgcagcttatactgttcttgatctacgtggcatgtgaagaacgataaaacttggtggcgcgctgtgagtggccctagattgatgtgaagtggctaaggctcgcgagctagactagtgggctacaactttcttgcctcatgattgcttgttatgttctaacgtctagtcgactcaatcccataatttcggaggtaaaacattgtaacccttaggaaacagcatcatgatctaagtagttaaggccttaagagtatccccagcatttagtgagggttaataatcactagtgcggcct

SEQ ID NO: 72163 - DNA, 483 bp, Oryza sativa
  Clone ID: PAT_MRT4530_72568C.1
atgcagcggcagtggagatgtgtctgttcaattccttctgcaagtttgactcacaatggccaggcatcaccatttgttgtcctgttagagaacaggactacaagcggcttggataatcactcggcctgccccttctgcacccaagagcttgagacggcgaaccacatcctcctcgattgcgtgttcactcggcaagtttggctccgtgtgctgtcgcctcttggttggactgccctctctcctcgtggtagctgccttcaggattggtggccttcttctagggcttgcttgcctaggcatctccgtgccggtttcaattctatggtcctcttggtctctaggcaactgtggaaggagcggaactctagagttttcgactctgcgttgtcctcggtctcggaggtccttcagtccatcctctctgagggtcatctatggtctttagctggcattgctaattttggggttctcctgggatggtag

SEQ ID NO: 72164 - DNA, 267 bp, Oryza sativa
  Clone ID: PAT_MRT4530_72569C.1
atggagttcggcagcggcggacgcgacgcccgcgcgcggcggcagctgcaggcggccgggcgcgccgcggcgtacctcggcggcggcttcctcctcctctccgccgcgtcctccgccgccgtccgctccctccgctccctctccgacgccaaccagggtgcagcgctgcttgaactgccttggaaaaggctacgcttgaaggggcaatgcgtccttgcgtttggcttatcgttggccactgggatttccgcacgaatattcagatga

SEQ ID NO: 72165 - DNA, 1098 bp, Oryza sativa
  Clone ID: PAT_MRT4530_7256C.1
cccttcctccctcctagtggccgcgggccatagccgcgttctccaccgccaccgtcgccgctccccaccacctcgtcctcaccgtcatcgctggcgctgcctgccaccaccgccaccaacgctcccctccgcctcgtccccatcggccactgccaccaccgccgctcccaacacccaacccaacccaacccaactcctcctcctccgccttctcgcgctcttctagggttttgcctcctcccgatccggctgccgcgcttccatctccggcggtccggtctatcctctccgctccttgcgcctgcgccgatctccatctcgctaccaggggagggggagaggcgctcgccgccgtcgtcctgctgcttcttgattcttcggagctaaggcggggagggttctgcggccagtatgttgttcttctcctacttcaaggagctcgtggggaaggaggtgacggtggagctcaagaacgacctggccatccgcggcacgctccactccgtcgaccaatacctcaacatcaagctcgagaacactcgggttgtcgaccaggacaagtacccgcacatgctatccgtgcgaaactgcttcatcaggggatcggtggtgcggtacgtgttgcttccccaggatggcgtcgacattgacatcctccatgatgccaccaggagggaggctcgcggaggctgatgatccacaccgtattttcgcccttggaggagccctaaatctgatgtacgggggacatgtatggagtatggtgtgacagacagcaatattgacagggagttaaaaaagtctgtagcaattcctcctgatacttgcagtgacaaaactatccaaagattgcatttggcgatgccatatgctgcttccctttcttgtgtactccaatcaatgtttgttagatcaacggtgcccattggttagttgagatgtgttttcaggccatgttcctgagaacaggctgcacatttgcatgttccagttcagcagatggttgttgaccggtcaatgatcaatgactagaacttattaggcagaaaaaaaaaaaaaaaaaaaaaaaaaaaaaaaaaaaaaaaaaaaaaaaaaaaa

SEQ ID NO: 72166 - DNA, 141 bp, Oryza sativa
  Clone ID: PAT_MRT4530_72570C.1
cccacgcgtacggggagtggcagccaagaactgaataataacgatcgagcgctatacacacatcagcagcagcttcatctcgtcttctagcgggaagcgcaagaaagatctgactatgatgtgggatcagatgtgcttatg

SEQ ID NO: 72167 - DNA, 760 bp, Oryza sativa
  Clone ID: PAT_MRT4530_72571C.1
gtttagcgtgcgagcgagcggagaccccctctcggctcgcccatggagttcggcagcggcggacgcgacgcccgcgcgcggcggcagctgcaggcggccgggcgcgccgcggcgtacctcggcggcggcttcctcctgctctccgccgcgtcctccgccgccgtccgctccctgcaggccctctccgacgccaaccagaggaaattcgcggcgccgtgtggcgcctgcgaggggaaggggacctacgcgtgcaggctctgcaggggcagctcgacgatcgagtggtctccgctccacgacccggtgttcgtcaacccgtgcctctgccctacctgtgacgggactagggtgcagcgctgcttgaactgccttggaaaaggctacgcttgaaggggcaatgcgtccttgcgtttggcttatcgttggccactgggatttccgcacggtcagtctctgggatggtttgagttgaggaattacgtttttttaggggaagttgagaaattggtcttgtaaggaggaatttctggccaaaaactaaaaccaaagaccaacgtgtataataaaatgtgactttgattttccctaccatttttgtttgtatagaagaaatataattatgctttctgaatgtatgcagaatattcagatgatagacataagatggttgagattctcttttgatccattgggttttcttgtaaatatgtaatgaggttttgctacaagaatggctaagtattagttgtttttgcttgtc

SEQ ID NO: 72168 - DNA, 428 bp, Oryza sativa
  Clone ID: PAT_MRT4530_72572C.1
acgagggtgagtatcgttgggtttgtctcgtcgtcctctacgtgttcatgtcctccaaatccgcagccggtcgctctatctccggcgaggtcgccatcttgcttgtcgtttccgtcgttgcgaaggttcgtgagtgcgtcggaagtgatcaagaagattacttgaagaccgattattgcaaggcaagtcacacagatcctaaacacaatcctttgagcatactgagaagtggcgagaagtccacgggggtcgctggggagtccatgcctctggtttttgagggggtgattatgatccaggaaaggtgcgctgtaatggattatgttgtgcaaggggtattgtcacaactcctttccgagtggtacacctctggccagagtaaaactattcgaatagccgtgcccgcggttatgggcgggttgagcaat

SEQ ID NO: 72169 - DNA, 6372 bp, Oryza sativa
  Clone ID: PAT_MRT4530_72573C.1
atggatcggcaatggatgtacgctgaccggtggtccaaagaggttattgacggcgtgcgttattttttgagaatggccgaagctaacaggcataagggttttatttgttgtccatgcaataagtgtaagaatcagaaggagtattctgcatccaggactattcatttccacttgtttgagtcggggttcatgccaagctataactgctggacatcccacggagagcaaggggttgaaatggaagaagatgaagtggaagacgacaatattccggactttggtcaatacgctggatttgaaggaaatcaaacggacgaggaggaaagggatgttgatggtaacgacattgcggatgatcttggttagatgttgcaagacgccaaggaggactgcaaaagtgaaaagggggcccataaattggacaagatgttagaggaccacagaacgttgttgtacccaggttgcgagcaggggcacaaaaagttaggataccactctgaagttcttgcaatggaaggccaaaaatggttttagtgacaaggcatttggcgatttattgaaactcatcaaggacattattccggagggaaacaaattgcccgagacaacgtacgaggctaagaagatagtctgccctctatgactggaagttcagaagattcacgcatgtccgaatgattgtatcctatatcgcggtgaggagtacgagaacttagaagcatgccctgtttacaaagcactacgatacaagattagacgagacgatccaggagaagttgacgggcagctaacaaagaagagaattcctgctaaggtaatgtggtatttccctataatataacggctaaggcgtttgttcaggaacaaggggaatactagaatgatgcgatggcacgctgaagagcgtcaacaggacgggatgctgagacaccccgccgatgtttcgcaatggcggaacatcgaaataaattttaaagactttggaaaggacgcacgaaacatacggtttggtttaagtacggatggcatgaattcttttggagagatgagcagcggccatagcacttggcccgttacgatgtgtatctacaacctcccccctggctatgcatgaagaggaagtacataatgatgctgattattattcaaggccccaagcaacctggtaacgacattgatgtatacctaagaccaatggtcgaagatcttaaactgttgtggaaaaaggaaggtgtcccgtgtgggacgaggacaaacaggaggagtttaacctacgagcgctgctgttcgtaaccatcaacgattggtctgcacttagcaacctttccggtcagtccaacaaggggtacaaggcttgcactcactgtatggatgaaacagaaagtacgtatcttaagcactgtaggaaggttgtgtacatgggtaatcgtcgattccttgctgcaaaccacccggtacggaagaaaggcaatcactttgaacataaggcggaccaccgtgcgaagcctaaacatcgcagcagtaaaacaatgtttgctatggttaaagaacttaaagtagtgttcggaaaggggcatagaagccagcctatagagagcgaagatggtcacgcggcgatgtgaaaaaagaactctatattttgggagttaccctattgggaattcttggacgtccgccacgcaatcgacgtgatgcacctcactaagaacctttgcgtaaaccttcttggcttcctaggtgtatatggaaagtcgaaagatacactagaagcacgtaatgatctaaaccatatggaacaacgcggcgaccttcacccagaaccaaaggagaaaggaagccattacttgagtccagccagctacactattagcaaggcagagaaggaaagtatgtttgaatgcttggagcacataaaggtaccgtctggatactccacgaatatcaagcgaataataagcacgaaggagaagaagttcacaaacctaaagtctcatgactgtcacctgttgatgacacaactgctaccagttgtaataaggggtatccttccagactatgtgcattcatgaacacaatttcgcagaaggtcatcaatccggatagattagaagcccttcagaatgatgtggtgcattgtcttgtcagttttgagtcgatatttccaccttcatttttcaatataatgacgcatctgctttgtcaccttgtcaaagagatcagtattctcgggcctgtgtacctacacaacatgtttcctttcgagaggtacatgggcattctaaagaagtatgttcgtaaccgtgctcgtccagatgaaagcatcgccaaggggtatggaacagaggaggtcatcgaattttgcataaaatttattgaagacctttgcccaatcgaggtacctgaatcacgacatgaagggagactatggggagagggatctctcagaaggaaagcaataatggcggtagacaacaatttattccgtaaagcccatttcacggttctgcaacaatcttcattggtagctccttacatcgaggagcacttggctctagttcgcgtcataaacatcggtaagtccgatgcatggattacacggcatcacattgatactttccccgcgtggctacgacaacatctcatgggtaacgagacgatcaaccaacaacttgtgacatcccggcctagggcttaataggattaatagaatactcatatcaacaagttgcaacttcttttccggaagccggtctcgaaagaactcttaggttaagcgtgcttaggttaagcgtgcttggcctggacggggcccggtctcggagagtgtggggcgtcacacaactggccttcctggcggggggaccatctgggtcgatcacgacattccaaggatggattaggttgactggtggaggtgtaatgattgatgacagtgggatgacaacggttgaccttaacaaggttggatactcggacaaacattttgtccttgccaatgatgtaacgcaagtcttttacgtgaaggacatgtctagcaaaggaaagaagggcagaggacctgacgagccgaagcgtcacgtggttctcccagcgcgccttcgtcttctccaccaacacttagaagttttttccccaatcaatttctctctcggcttctccttcgccgccactacctagagcatccccgcgccgacgccgccgtcgtatctcgcggtcgtctcgcgcgcgttgtcgttgccgcctccgccgccgaacacgactccgccgcgccgatgatgactaacttgtcacgcccggaaattcactagtaatttccgaacttatttgtgcataaaatcctcgtccaggaatcagccgaggtacacaaactgacaatttaatatacagattcatcaaattagctaaaacgataaatacttacttaagaggcacttagtcctcaccatgaagaaaactgcagcggaaaataaaatctagcgaagctccggctccactcccacaggcagctcaactggggtataagccaaacgtcttctccttctggatcattttcttcaactgaggttgattgattattgaaagaattagcatatgacatactcaacaagccacacagcaaatatgcaagtgcacaaggataccaaaggatggcataatataggctcatttgcaaaaacagcatttagcaaaacatttaagagaagtaaaacagtggagtaattaatcagaaattttaatcaacactgaacaacatacccatgctgcacaggcccaaccatcctgaacaaccatacccggctgtacagatctaactccaaaccaggagctaagcaaattattaccaggtataacatccataattattgtgagaggtgtgagactaatcacgaaaaacattgctcaacccgcccataaccgcgggcacggctattcgaatagttttactctggccagaggtgtaccactgtacccacaagacacagccccacgacatgtcacaatgtgcctcagtaccaccacggtacctcggaaaggagctgtgacattaccccttgcataacacaacccaccacagtgcaccgttcctggatcataatcaccccctcaaaaaccagaggcatggactccccagcgacccccgtgggcttatctccgccacttctcagtctggtgctctgcaatgaaccatgctatacgaaaggtaaagccgttgcccacgctggcttgtggttggcacggttaatgtttcacaacagtagctcgcgaaccggtccttaattgccatgagcacgactctcaaaaccatgtgctcacaacccaccattatcaagatttagttggcaagtaattaattaaccaatcacgattgaccatcgtgaactatcattaagccatcattaaataatagtgagtcataagttatcccaatagtgtgctaatgtttctaagcatggctaagcaatcataactaatatctagctgaaccaatatataaagcccaactagtcaagttataataacccaaggtatcaaggaataaagtaatcaatgcaaacaggccataacaaaggaataggttcacaccacccagtgacattcgaaaataaatgcacagttgaaataaatagagaatttaaatataggatcaacatgctcaaaggattgtgtttaggatctgtgtgacttgccttgcaataatcggtcttcaattaatcttcttgaatacttccggcgcactcacgaacctccgcaacgacggaaacgacaagctaacacgcaaaacgaagaaaaaggctaataaaaaccaaataaacagtacatataaagtaaacaaacatgtagatcatgattttagatgaatttagcaacttgaaccactcaaaaccgagttacgatgatttagttatgaatttccgaagatttaatctattagaaaaacaggaaaaagaaaaacgatgatgacgtcatgatgacctcatcaatagccggaccaagatggcgacctcgccggagattggatggtcggctgcgactttggaggacatgtacacgtagaggacgacgagacgaacccaacggtactcaccctcgaaccaaacgacgaacgacgacggccgacgacgaggtctagcggcggcgcggcttcggtcgacggcggcgacggggctccggtgatcggcaacagcggggagagagcggccgggcttctccacacctcggcgtaccttacggcggtgacggcggccggcggcgacgacggaggcggcggcacgacgcggatggagctcggccggcgacgacggcggggtgcgagattttggaaggggatcggcggcaacaggcacggcacggctctgctctggctctgtccagagctggaagatgaacagtagcgcagggaggaaaagtagacttccgaacatgaacgagaacgtgaacgaacgaacgaacgtgaacgaacatgaagattttggaatacaagaatttattaatgacaccgggctaactacggatcaattgctacgaggtgcaccaatcaaaaaggcggaagtgaaatacatgtacgaactcggtaaaccgcttgtcaagcctgagcagctgcagtccctacccacacaaatgtacaagttccatcaactgtacatggagatgagcgccaccggtacagaaatgatcggagcgaggattgattcggagcgaggatcagggacacggacttcttgcaaggagatgacattctctggatcaatttcaagggtatctacgaactataccagctggatgccctcgacgtctctattatgagttgctggattttaatggagattcaaagggcccggcggcggggggttttcgatactggattcatcgaccctcggaaagtaaacgtcgcaatgctcgaccagtatccgcaagccacagaggacaatctcgtccatctcttgaaggcgcagcattacaagacgttcatactattaccgtacaacacagaattccactgggtctttttactcttcaacctggaggcctgcaccgtcaacgtatatgactcaatggataaaaaagagtctatgtttgacaaggttttcgaacttatagacagggcttggtatcgattccgtcatttggtccgcagtaaatggagagaaagacttaggcggaagttcaattttccttttattcgcatgagggataacctgatcacacacaaggaatttatcgcggtggttcaagaacaactcatgggatttatcaatgaacaaatccttgatcccaagggtgaattctactacgacagaaatacaattcataggtccttagcttctgagataacgactactactacgtcgaaatcgtagctagctaggacat

SEQ ID NO: 72170 - DNA, 600 bp, Oryza sativa
  Clone ID: PAT_MRT4530_72574C.1
ttaacaaaattttgaagtccgctgccgagccccgtcggcctccactgcctccgcctcgacgacgccgctggtgagccctggatccgccgcctcgatctgccagcgcgccgccacctgctggatggagtcgcctcgggcctcctcgccgccgctgccaaggtccgccgcagctgagctccaccccctcccggcgctggatccgccgcgtgcacccgaccaccgcttcgagccgctgctaccgctctctttgcagcgatcctctcgcagtccaccccccaacttgctcattttgacgaagggctcggagacacgatcgacggcgacccagcatcgatcgatttcgccgccaccgccgcctggcgcgacagcgacgcgggccgtgacagcgcccagtgggcccccctggtcggcgaccttttcttcctggtctggcgccgtgggcgggtgaaagctgatcttgggctttggctgacttctcgtccagtagccacttttttgggcaggagggagggagaggagcagcggtgcgtgggggacggcggtcgacgggagggcggaagagtagcggcggctcgccggcctctccgcgctggtcggcat

SEQ ID NO: 72171 - DNA, 1433 bp, Oryza sativa
  Clone ID: PAT_MRT4530_72575C.1
tccgagagcagcatggtcataaagacctatcaaagggatcagatattgacaaatcatgggtgtgcttgttcatactgaaatcactcgtatgggtagttttaaatgtaaattgagcattttgagatgctttcttttctaattgaagccgcctgtgttgattggccaaccatttctgattgcaattgttaaggccagctaactccatttctcttagcgcttttgcattcagaacaaagaacttggcaaagtcgacatctgacctccttcctccataatttcttatcaccacttttttgagatggaactgaatgcattctattggatttagcgggtcatacctccgcgtatttttaataaccttaaacggttgagaagcaatatacagcctctccaagcaggggaagcaactgaggaagtcaacaactgcatccagattagggccatcagaatcaagaaccaaaaccttcacacttcgcattgaggttgtaaggctgacagcagtcatttcctgaaaaatcgttgttccaaggtggagttgagatatgccatcagagagtggtcccattatctccagtttaggcgccgcgatcacccggatggccgccacgccatcattgggacaaagtggcagtaatctttcaaggcaaggggcatcctcgatgaccacctcctgcaactcggcaccagcaaatccattccaagatgcagaagagaagccccaggatttcgaatagaagccgaagctcctgagagatgcggagttgatgcgaaggcggcgaacgccgaaattcccctgcagcagcaggctctccaatgcagggcagcgtgacagcacgccatggatggcgtcctcggagatagcgacgctgcacagcgtgagctgcttgaggcgagggaaatgcagcgtcggcggcatctcgtcggggaaaccgcagctgctgaggtaaagcacgacgagggtgggcgcgaaccgcagagcggacggcggcagcgggtacgcctgcgcctgcgcctcgcgctccacctcgtagctgaaactaagctcccggagatcggcgagggcgcgggagcggagccatccgtccagcttggcgtgcctgccgcggaggcggaagcagtggagggagaagcggcgggcggggccagggtgttcggcgagaatcttggaggcaagggcgacgcgcttccgttcctggccggagagatcgtaaacatcgaggttgaggggcgcggagcgccacagggggcgccaccggcgggagacgagctgcgtgcgggcgccatacttggtggggaggagcgagatgatttcgccgaggatggcgtcggggaggccgctgatgaggtcgaggccgccgctcccgggtggctcctggctgctggaccgctcgaatctacgcttcttgcctgtgggcggcgccgccgccgccatc

SEQ ID NO: 72172 - DNA, 444 bp, Oryza sativa
  Clone ID: PAT_MRT4530_72576C.1
atgaaaaactactaaataatgcatgaacacagatagccacagctcacgacgagggcacgacatccgcactgctactcataatcgagtgcgcacgctatgggacagcaactacggctgcacaagacagataccatgtactgtacagactgtgaaagtgaagcccgagctgagtgggctataaacatgactcgatgacacgctgtctacccaagctacaacactggtgcgtgtgccattgccaacgccggtggtctctggactagcatactaccaatgactgctgacaggagataaacataaactaatacatcatcggcagtgacacggtgcatcatcacagtgatgcaagtatgtacaaagatgtcatgcccgcctatgttgggcaccccatggccgaggtggtcggccgctctcagagatgcgacttgaagcacgcgtgcatga

SEQ ID NO: 72173 - DNA, 414 bp, Oryza sativa
  Clone ID: PAT_MRT4530_72577C.1
tttttttttttttttttttttttttttttttgtttttgtttttttttaatatttaaatttttatattttattttttttttaattaaatttatttttatttttatatttttttaaaatttttttattataaaattatattacaataattttaaaattaattatagaaccaaatgtaatgcatatttagactagagcttatttaaccaacaaataatgctatactattgtggactacaaataattacaaaaaaacttatacagataatattatcaaaaatataaaattattctttggaaaaaaaaaaatcctaaaacatctttttaactgttggtactgagcctaaaaagccaatattctaaaggtagagctaataacatacttacccttgagctttagacttaaaaagatttttg

SEQ ID NO: 72174 - DNA, 2325 bp, Oryza sativa
  Clone ID: PAT_MRT4530_72578C.1
atggcagagcccgggcaccttgcccagctgagcgctctcacgacgacggtgatcacctgcctgattctcatcaccccaacaccagccgccgcgtcgggcgcgagctgcgtcgcgagcgagagggacgccctggccgccttcagagcgagcctcctggaccccgcgggccgcctcgcgacatggagcgggcacagctgctgccggtggcgcggggttcactgcgacggctcgaccgggcacgtcgtcaagctcgacctgcgcaacgacctcaccgtccacagtgacaccgactggatcttgttctacgaggtccgggttgacatcgacagtagctgggtacacagcgcgttggccttgcgaaatacaggtgagatgatctcctccttggctgctctgcaccatctgaggtacctagatctgagctggaacaacttcaacgactcgagcatacctctgttcatggctgacctgaagaacctgaggcatcttgacatgagttgggtggatcttagtgccgtcagggactgggtccataccgtcaacacgctctcttccctgaaagttcttcgcttgaggggctgtaaacttgagagtgccatctctaccatgtcacatttcaacctcacacgtcttgaggtcctcgatctttcagtcaacaaattcaatgcttcgattcagcagaaatggctttgggatcacaaaggcatcaaggagctctatctgacagaaggccattggtttgggtccattccggacgcatttggtaacatgtctgcacttcaggttatggatcttggccacaacaacctaatggggaccataccgacaaccctgcagcatctgtgtgatctgcaggttgttagcctatatgacaactatattgatggggacgcaacagaattcatggagagattaccgaggtgttcatggaataagttgcgagagatggacctgcattctacgaatttgagcggtgagctgccggtttggataggaaagttgagcagcctggattttgttgatctctcacacaacacactgactggtgagctgcctgtgggttttggagcacttagaaacatgatttacctaaatctcggttggaataatttcaccggacagatttccgaggagcatttttcaagtttactgaacttaaaatatttgtacctctctgggaactctttcaagcagatggtcttcgaggaagattggattcctccattcagactgaaggtagcacatttgcggtcgtgtcgattaggtcccaagttcccatcatggctaaaatggcaaactgaaatcagggtgcttgatgtctcaggcacgtgcataagtgattctttgcctgtttggtttaagaccgttttttctcaagcttactcactgaacttgtcggacaatcagttatgtggtaccttacccagaactccagaggatatgttggcaatggtgatggatcttgggtccaacaatttgacaggtcaagttccacgcttccctgtaaacatcacctactttgatctctcaaataattctttgtccgggccactaccatctgatcttggagctcccaggttagaggagctgcgtctttacagcaattacatcacaggcaccatccctgcttatttctgccagttgcgtcgattgtcgaatatgttttctggccacattccagaggaattaaccaactcttttggccttcattatttggaccttgcaaacaacaacatatcaggaataatacctcaatctctagcaggcatgaaggccatgaggcgcactactccggatgggaacaggggcgatgtctacgagggcagcatatcatcgttcaccaaaagccaagagcttcactacaccttcagcaactacaatctggtcgtcctcctcgatctgtcaggcaacagcttgacaggacagattccagaggagatatcactgctccttgggctcaagagcctgaatctctccggcaaccacttgggtggaaagattccgaacacgatcggcgatttgaaggggttggagtcactggatctctctcgcaacaggttgtccggtgaaataccgtcaagtttgtcggaattaacttccttcagctggctgaacctgtcctacaacaatttgtcggggagaataccatcagggcatcaactacagacactcaatgaccaagagtacatctacatcggcaatcctggcctttgcggccctcctctccgcaagaattgtgcaatgagaggaagacacgatgaagttgacgatgtgtcagatgatttagcagtcctgtatcttggtggcgtgcaagctgggcaataa

SEQ ID NO: 72175 - DNA, 267 bp, Oryza sativa
  Clone ID: PAT_MRT4530_72579C.1
atggcgcggcatgaaaaacagatagttgtggcagcacgcatgcataaaaccatagaaacgcgaattacaaagagagtagatgaaaccgacgataccggcgagatcgtagtcgacagattcgacgagatcttccggcgacttggctccgattactccggcttcgtaaactgtggggtccccttttataccgtggattatcttgaccccaagcaaggcttggagatatgtaatctgatacgatataacagagattatatcccctccgag

SEQ ID NO: 72176 - DNA, 803 bp, Oryza sativa
  unsure (1)..(803): unsure at all n locations
  Clone ID: PAT_MRT4530_7257C.1
cggactcgtgggtgaaaattgaattgtgcgataagatagtagagccctcgatagctctgttggcgagttagttcgccggcagggaatgcgagttttaagattgcaaaatcagtaagtcgcttggaacacaaggacgtcagcgtccggtttcttcccagcgcantcaagctaacgtttttttgtgggggggngtttntttctttcttctnnncnnncnctnntcttctttttttttttctttctttttcttcctctctttttttccctctcnttttttttttntttttttttttttttttttttttttttttttcttttttttttttttttttttntnttttttttttttttttnttttttttttttttttttttttttttttttttttttttttttttttttttnttttttttttttttnttttttttntttttttctttttcttttttttttttttctttctttcttttttttttttttttcttttttttttttttttttttttttttttttttttttttttttttttttttttttttttttttttttcttttttcttttttttttttctttctttttttttcttttttcttcttttttttttttttttttttttttttttttttttttttttttttttttttttttttttttttttttnttttttttttttttttcttctttttnntttntttnnttntttttntntttttttttttttttttttncttttttttttttttttttctntcttttttttttnttttttcttttttttttttnttctttttntcnntttttat

SEQ ID NO: 72177 - DNA, 894 bp, Oryza sativa
  Clone ID: PAT_MRT4530_72580C.1
atgcacgccgaacagccgcgagtgcaggaagaagtaggccacatcgccggggtgctccgggtggatgagcgccaccgtggggatctccggcggcagcatggtcgccttgtaaccctcgtcggcccagatcgccttgaagctcgcctcgcagtcgaagctccacgtcccggcatcctcgtcgagcagcgtccacatgctgacgatcgggccgacgccgtcgcgctcgtcgatctccacgtaccgcagctcaccgaagttcaaccccacgcaccggctcttctcgaggtcccggccgcccgtgcccggtggcagctcgcggccgaccgggagcgggacgaagcgcagctcacggtgggcgacgctgagatccaaggcgaggaagccgtacgagagatccacccaccagatctccttgggccacaccaccacgccattgccgccccatggacggtcgcgcggcgggtagttgagctccaggttgctccaggctccagaggcagaggagtacaggagcagcgtggcgtggtcggcgccgacgaccgtggggtggagatcggcgacgaggtaggcgtcgcgcgagatgctggcgaggcaggcgttgccggggtggaggatggggaggccggggtcggggaggcgggtggacttgtgcgtgcgcgtgtcgcagatgaagtacgccttggggagcaagccatggcggtgatcgccgtcgccgagcggccgacgatggtagaagccgtccaggacgggcggctacggttcgggcccctgcgtggcgcagaggaggaggcggccatggcagtcgccgccggcgacgtaggggtggtcgtcgatggtcttgcggcgcggggcgatgctccggtgcacgacgaggcgggtggcgcccgggggtaa

SEQ ID NO: 72178 - DNA, 261 bp, Oryza sativa
  Clone ID: PAT_MRT4530_72581C.1
acgcacgcgtacgtcccctccgactccgactccgatcgatctccaccccgaatgcgtcctccttactcgacgagcacatgtagaagtcgcgcacgatgatcttcgacttctgatcctgtgaaatcaaacatcacgtacgtacgcacgcactaacgcgcacatgcatggaaaggaggcggcgtggtccttaacaaaggctatgatcggtaggatgcatcaacgattttttgattccacacgttagttcctgcaaatttttcc

SEQ ID NO: 72179 - DNA, 837 bp, Oryza sativa
  Clone ID: PAT_MRT4530_72582C.1
atggatgatgacgtggcggcgtggaagcggtggaaggggcagtgggtgacggaggacgggagcgagctatggatggtcctcgcttgcgtgccacacgtcgtccaggacggctacttcaagccgggattcgacaacggcatctcgcgcgacgcctacctcgtcgccgatctccaccccacggtcgtcggcgccgaccacgccacgctgctcctgtactcctctgcctctggagcctggagcaacctggagctcaactacccgccgcgcgaccgtccatggggcggcaatggcgtggtggtgtggcccaaggagatctggtgggtggatctctcgtacggcttcctcgccttggatctcagcgtcgcccaccgtgagctgcgcttcgtcccgctcccggtcggccgcgagctgccaccgggcacgggcggccgggacctcgagaagagccggtgcgtggggttgaacttcggtgagctgcggtacgtggagatcgacgagcgcgacggcgtcggcccgatcgtcagcatgtggacgctgctcgacgaggatgccgggacgtggagcttcgactgcgaggcgagcttcaaggcgatctgggccgacgagggttacaaggcgaccatgctgccgccggagatccccacggtggcgctcatccacccggagcaccccggcgatgtggcctacttcttcctgcactcgcggctgttcggcgtgcatctgggccagtgcagggtcctggagtggcagttcttcgagatgctgcacccgccgatggcttaccactcgtcccgattcgtgcgtctttggaagaacattccggccttccggtgctag

SEQ ID NO: 72180 - DNA, 120 bp, Oryza sativa
  Clone ID: PAT_MRT4530_72583C.1
atggaggacctcgatgacgtcttctccgacatgtgtctccagtttgtttaccataatttcttcgagctcaccgtcgtcactctcgcagatctgggcgtcattgttgtggagctggtgtag

SEQ ID NO: 72181 - DNA, 276 bp, Oryza sativa
  unsure (1)..(276): unsure at all n locations
  Clone ID: PAT_MRT4530_72584C.1
cccacgcgtacgctgactcgtggaatcagaccacggcgcctgcatggatagagcatctgcgtgggggtcgagatcggctgcctcataagcaccgttaggagagagaagaatgactgtgctggtcgttctcgtcctccttgacaggacctatgagaacatgccatgcctatcatgccatgattccttcgatgacataatctgtangtggttgacggcggcctgatcaaaccgctacgtgatgacttgacgatagggatcttcgactggatcttactg

SEQ ID NO: 72182 - DNA, 151 bp, Oryza sativa
  Clone ID: PAT_MRT4530_72585C.1
gaaaccctagccaccagagtgctagcaatgtagagtttaatccagcccaggatatacttgatggtgcaataaaaaggggggcctccgatgcaaaggggaataggggatacggcagatcaattcgtaaggagatcgactctgatcaaagccg

SEQ ID NO: 72183 - DNA, 423 bp, Oryza sativa
  Clone ID: PAT_MRT4530_72586C.1
atgacgcgtcctggcacgcatgcggaggaacccgcctaccgcgtacttgacctggtgaacgggctgtgaccactccattgcatacctgtgccatcaatcaactgagacagcacggctgccaagtccttgtttgagcgtggtgaactccgtaagggcttcaatgcatgtgtccacgcctgtgcagatgtcttactaatggcgtgaggaacactggctaccttgatgcttgctaccaaggccctgaaaggagaagggactcccaagacctgtcccgagcgtactgaggcgatgcattatatactgggcgctcacctgtagtgaacatggtatgtccacggactgtgtgttacgggccatacacggaattcaatggctgtatccagcatgagcagtattgcatggatccgactggccatgcaactg

SEQ ID NO: 72184 - DNA, 196 bp, Oryza sativa
  Clone ID: PAT_MRT4530_72587C.1
gaaagacaactttttttcaatgaaaaaggcgacaagattcacatttataattcatcaactttccactgttacgcatgatgatgcccgactttctgtttaacattagtaccagaatcctattacggtgccaatgcaaccgccagcaccggaggaaatgctgctcataccaaagtgggatggcgggtagataccacat

SEQ ID NO: 72185 - DNA, 166 bp, Oryza sativa
  unsure (1)..(166): unsure at all n locations
  Clone ID: PAT_MRT4530_72588C.1
gttgaaagctagtgtcacnnnncggtagtgattggggaatgtttacagatatatgtatcggaacagtgggaaggcaagaaagaaaaattgagattcaggtggtgcgccttgagcatgcatattatctctcttcagacatgtgggccttcgacagtttttatgccct

SEQ ID NO: 72186 - DNA, 1077 bp, Oryza sativa
  Clone ID: PAT_MRT4530_72589C.1
atggcgaacatcaagtggatcggcccgaaaaaagaagttccgccagaagttgaagacatggagtacgccgatggttgtggtgaagacaaaatcgatttggaggaaatgttacgtcatgcagatcctgaggtgctcattgggtcggctagagcattttttgatacgatggagcacctcatcgttcacatagtgccccagataattgcgcttggcccgttgtacctccatcaaatgtggtcatatgagcgttacatggctattttgaagggctacgtccggaattgcacccatccaaagggatcaatggttgagagttacaatacagaagaggttgtcgagtgctttatcgattacctcaacaatggaaagacaattggaatacatgtacctcgacacgagggtgaattgactggtagggggaccaaaggaaagaagagattcgtcgcccatgattacaaaacacttcgagaagctcacttcagcgttcttcatcagcttgctattgttgagccttacatcgatcaaaacatcaaactactaagatctaacaatacgggacgcacaaccaagtggatcatgaaagaacacaagcgtctcttcatagaatggagaaccaccgaggaaataactatgaaaaggagaaaaactatcatacttgggtttattgaagaaatctgggaaattgactatggactcatagtgcaattccccatatttaagtgccagtgggtaaaatacccaaacggtgtcattagtgacaagtttggtcttactgttgttgaccttgagaatgtgggtcacaaggatgacccttgggtactcgccaatcgcatggcccaggtgttctatgtgacagaccctacaaatttgaagaaagaaatagttccatcaggaaaacaaaagatcttgggagtggacggagtcgttgatgtcgaagattacaaccagtacgatagtatggcactgtatactcaatttgtacaaaagattaagcttttggcggcatctactgagaagaccgtgaagccttacatacgcaaggatggtgttgatgatgaggggcagaaggtgctctag

SEQ ID NO: 72187 - DNA, 243 bp, Oryza sativa
  Clone ID: PAT_MRT4530_7258C.1
ggcacgaggtttatcctagtattgtagaatctgcatggcagcttgcgccggcagatctttgccctgtttgccttattgctctttctgcagtgccgctctgcactcgccgcttgcagtatttcccaccagcattggccatgggcaccgtgatccgtgtaggcagtgctgatgcaaacgttaggcatgggtcgctccacagccatattcatgtcgaagccaatggagatcctgcggcagcatata

SEQ ID NO: 72188 - DNA, 1747 bp, Oryza sativa
  Clone ID: PAT_MRT4530_72590C.1
gggcccccggcctccagcccccagctcctttgttaggttttcttccagtgagctctttttgctcatattcagatcttcacttatttcctagttgttactactgcctttgagtattgacagcttcatcctgccaactcagctcaatcttcctctgaagtttcagtctttgtttctgaatctcttcagtgttcagaggggaagttctgccaaaaaatttctctggccatccattttccaaggggagattctgccaaaattttcatctctgtccatcaatattcctggggaggttctgccaaaattttctctgaaatcggttaatttataaggggaggttctgccgaaattttcgctggtcatcaatcttccctttgttgacataccctgcataagtatatacaacaaacatataactttttgcaaggtaagaaggagtttttatctgttcttgatgatagactcctagagaagttgtcctagttgtgtagatgttgttgctcatcatccctgagcacctcctctctagatttatgactggcccagccataacccagcttgttcagtccttctctgttgtcttcctctactggttctatgtcttctcagtaagctccctgtagttgtagccttttgaaattacaagacttatttatacaacataattatcaaggcatccacatataaactacaaggtatatatatatatatatatatatttacaaaaagaaaaggaataagagggagtaaaattgttgccggtgcgaaaaaaaaaattgttgagaggtgaccatgtcgagtgggacctcgtccgggtcgagccagggaacccggagctccaggtcggaagatgacctgaacctccaggcccagatggagaagaagaggaagaggaggaaggagtcgaaccgagagtcggctcggaggtctaggatgaggaagcaacagcacctcgacgaactcacctcgcaggtgaaccagctgaagaatcagaaccagcagctgagcatggcactgagcctgaccacacagaaccttgtggcagtgcaggcacagaactcagtgctgcaaacccaggagttggagctgcagagcaggctgtgtgccctaactgacatcctgatgtgcatgaacaacaccagtgctactcctactcctacaattccagccaccactacaagtgcttgtgatatttttggtgccagctcatggaaccagccacccatagacttgtaccagtaccagtgcttctgatctaggaataagaagagggttgttgtggtagtgtgggtaggaccagaagccatcaagtaatgtttcaatcatgtagggccattgttgtcactgttaatgtatgcaattcaatcttaattgcctgctgtaggggacagggatatttgctctttcttgtagctgttggtggtagagggattaccagatggcaaaatggtgctttggcaatgtgttaggtggggctggttttggttgttaagggtagggaggagaaaattggtaggtttttcttgagcatgcaagaggggaggcaaaggattttgtgtaatgatgctcttcaaggaaagtattcataattatgattataatgtaatatgtggatttggtggatcttcataggccaaaaaaaaaaaaaaaaaacttttacatcctctgtctgtatgtgtgacgatactgctcaattaatactctgtgggggtcccgattccccatatacactctattgaggttctaatcc

SEQ ID NO: 72189 - DNA, 263 bp, Oryza sativa
  Clone ID: PAT_MRT4530_72591C.1
aaagggggattctatgatttaaaacacaggggacaaaaaacggagcaactaatccccctgcaaagaaaacacaaaagcagacccttagtgcaagcaacggggcagagcaaaggaaccatctaatccagaacctaagaaagaacccaacagcacctaggcttccaaaaacactactacaaaaaccaaaaatattatacatacaaccaggggatccaaatgcacagccggggcccaaatatgaccgcccaaaaaccaaaaccaaa

SEQ ID NO: 72190 - DNA, 231 bp, Oryza sativa
  Clone ID: PAT_MRT4530_72592C.1
cttcgggctctaaaccattatgtgtacaggacgagaacgaagccctagatctggcaaatttagagcagctatctaccataactttatgatacaagcatttcctcgatataatgagaccgatcgatatattgaagatggggactgaggagggtcaatttgttaggataagatgcttaacgttcagtgcacattatgtcctaggaatggaaacaagcgcctactaataaactt

SEQ ID NO: 72191 - DNA, 107 bp, Oryza sativa
  Clone ID: PAT_MRT4530_72593C.1
atgtcaatagacaacacccgtactggcactggagaaggcgagcacgacaaccgcaacagaggcaacaacaccaccaatgcctcaactagtacaagagcgttctcggg

SEQ ID NO: 72192 - DNA, 2248 bp, Oryza sativa
  Clone ID: PAT_MRT4530_72594C.1
cggcacgagggtggaaggaagggtgcgcgacggcaccttgttcctccgctgtccgctctctcactccttccgcaccctaatgatccgtcgacgccgcagccgcagccgctgccgcggcagggaccgaggcgacgccgacgggctcggtgctcacgggcgcggcacgtcaagcgccggctgccgctgttctgattcgcgtccgatggtggtgtccttactagctcccatggcggttccatcgtcgttggaaccggcagcaacgctggagaagaaagatctgaggcagaagctgatcgtggacgatcaagtgccgccggcgcctacatcagcggctgcctcgcacgaggctgcagtggcggctacggagttggcgtccacttccaaggatgggctcgtcgacctttcgctgtctcggtgttttctgatggataaggagaaagagggtacttggaggtatctaggaaatatggcatttttgcagattaagaagtctcctgaacaaggtgagagtgaagttactgatactgattcaaagctgaaaaggaaggaaatctctggagcaaaatcttcatgtgtatcttcaaccagaacagctgaagatgcagacaaggatggacagccagtcccttgcatgaatgatgcgaagagtctgacacagcttcttgttaaggtttgcaggaatacagtttccgttcaagaagatttaaatgtcattactgtaaaacaatttgtcaaggctgcatgccaaaacataggggtccatgcttatgatttctatgctgtttatggtggaaaaccattaaaggatgacagacgttatgtcatgctacccaatatacagaggttccacagtttgtttgaggcaaagattaagggctggctcaccccaggtcatattattcaaatcctatacatttgatgaaatgattgagaatcgagctgggctttttcatgtagttcatggatctcagcactcaacgaacagtatgactcaagttggcacagttacttacctatcagactactcgcagtatatcattcatgaagtattgatttacatctgtggaaaacatcgtaagggctggagtttcggtggaaattttgaaagcactgatattctgttttgttctgggagagtcaagattgcaaagcgtgttcacagggtgaattttaataaagatacatgtggcatggattacatgaagcttgatgagatatttgtggaggctttcgctgttgggatgaaggacaatcagcaggtgtttcctatgttccttcctcacttgcttgagtatctgtttgcttgccctgctggtgaaaactcaaaccatgagcttgccataacattcctgacaaatcatcctgcattggcatcttatatggatagaataaagcaatgcattttattggacagtatggtggattcacttgaccccgttgatcttttatctcttaaacaacttcttaactgggtttggaaatggtcgcgagatccagtgaaagttccaggaatgaatagtgtttatatacacaatgcaaaatttcatccagtaactcatcagatgttggtgaatgcgagatatatacctaatccattaggatgtctgcactttgcggggaattattttagccatgctcataatcatcagctgaatctagaagaagctgaagctgcatttgcggaaaacaccgaaagcttcttaccttttatactacagttcatcgtggtggaaggaatcattaaacagaaatttaatgtccagcgcattttcacatccttacactactcgggaacaaacttgctgataagaacactgggaagaaacttccaggtcaggatacagggagttaatgtaatcgtgtgcatatatcagaaattttggatagttgagccaccagagagtaagcatcaagccacggacaacatcctaacagtgccccgtcagttgcatgcatctctcaaggcttttgatagttctaggctttcagcagcaataggttgatttttttgtaaggataatctggaactcctgaaaattgttggtgcactcagatcctggtgtcatgtgctcatgtatacgttcttagtagttgtgatgaagcagagcacttcgtgatgttggccgtcgtttttggttaacactataagtatatatttcgatactgagaattagcattgtgtaaccctcaaatttaaaatagtttctgtgcggctgtggcaaaaaaccaaaaaaaaaaaaaaaaccaa

SEQ ID NO: 72193 - DNA, 249 bp, Oryza sativa
  Clone ID: PAT_MRT4530_72595C.1
atgtcacagccgcacaggcggcggcgagcgggcggtggccaggcgcagctcctcccaccggtggcagccaggtgcagcttctcccgccggggagcagggagcgctgtatgcgggctaggcggcggggagaggggcggcggtgagcgggagtcggcaagcgggtgccgaccagtggcaaccccttccgtcggcgagcaagccgcgaccaggtgcagcccctcccgccggcgagcaggaggcgtgcgctag

SEQ ID NO: 72194 - DNA, 396 bp, Oryza sativa
  Clone ID: PAT_MRT4530_72596C.1
taaaatttgacacttggttcttgctgcagaatgacactgctattgggccctccaagttcaggaaagacaaccttgcttttagcccttgccggacggcttggccctggactaaaggtgtctggaaatatcacttacaacggccatcatctgaatgaatttgtgccccagagaacatctgcttatgtcagtcagcaagactggcatgcctcagagatgacggtcagagaaaccttagagtttgctgggcgctgtcagggtgttggaataaagtatgatatgctcgttgaactcttgaggagagaaaagaatgaaggtataaaacccgatgaggaccttgatgtgttcatgaaggcattggctcttgaggggaagcagacaagccttgtcgcagaatat

SEQ ID NO: 72195 - DNA, 623 bp, Oryza sativa
  Clone ID: PAT_MRT4530_72597C.1
atagcctctgctattaaaatacaattaatgttttattttttataaatataattgtgtattgttatgatatacgaaagttatttttatgcacaatttggatatctgttaacgacgaaatttgcctgcttcttgattgacaataagggtttcatcggggtttcaaccgaggagttatctggacgttgcatcggcttacaaggattgcatccgattggtttatactggattatattgctatattatattatcagccgattgccttcatatcattatatacattggacatatagccgatagctcaaaaccctattgctatcggctggatcaaactgactggcacgcccgcatctcaccaacctttggacctgcactggagctaagcagatctcccaggccagaaagcttctttcttgtccgacaaggacttgtatcaacccatgggtataaatatgtatacccggggcaattgtatcgtctacgtcggcgtcgttcaaggctacatcagtacatttgacctcttggattgctctgggtttctgccggatcaaactgactggcacgcccgcatctcaccaacctttggacctgcagtagagcaaggcagatcttccaggccggaatag

SEQ ID NO: 72196 - DNA, 4420 bp, Oryza sativa
  Clone ID: PAT_MRT4530_72598C.1
atgtgggcggcggaggcgccgttcgcgaggtcgggttcgtggagggaggaggaggacgagcaggaggcgctgcggtgggcagcgctgcagcggcggccgacggaggcgcgcgcgaggaggggcctgctcaggtcgcccgcgccgggggaggacagggtccagggccacgacgcgctctgcggggtcgacgtcgcgggcctctcccccggcgaccgcaccgccctcgtcgatcgcctcctcgccgactccggcaacgttgaggactttttccgccgcatccgctctcgcttcgacacagtgcagataggtgtccccaagatcgtagatacacatcgggttctgatagttgaggcattggtgtattttgcttgccggccggtgccatctcatgtaaatttgaacacccggatggttgaggctcaacaggggatgttaattgtcgagcgagccggatgagctgatgttctggtattggtaaaagctagcggcatccttgttccatcacaaatgaccatgctaagggtccctccaggtccaggagagagcaccttgcttgtagccgtcgctggactttttggccccccaggaaaggggtcaggacctatccattccaacggccatcatcagaatgaatatgtgccccagagaacatctgcttatgtcagtcagcaagactggcatgcctcagagatgacggtcagagaaaccttagagtttgctgggcgctgtcagggtgttggaataaagtatggtaggtcatttcaccacaatgtccttggtgttgttccttacctccttggtagtttgcgctttgacgttaatcaatatgtagatatgctcgttgaactcttgaggagagaaaagaatgaaggtataaaacccgatgaggaccttgatgtgttcatgaaggcattggctcttgaggggaagcagacaagccttgtcgcagaatatataatgaagattttagggctggacatttgtgcggacacaattgttggtgatgaaatgatcaaaggaatctctgggggacaaaagaagcgcctgacaacaggtgagctgttagttggttctgctcgtgtgctgttcatggatgagatatctactggacttgacagtgcaaccacatatcagattatcaagtatttaaggcattctactcatgctcttgacggcactacaatcatatccttgttgcaaccagctccagaaacttacgaactatttgacgatgtcatcctcatatctgaagggcaaattgtatatcagggaccacgtgaatatgctgttgatttttttgccggtatgggattcagatgtcctgaaagaaaaaacgtcgctgacttcttgcaagaagttttgtccaagaaagaccagcaacaatattggtgccactatgattatccttaccagtatgtctctgtatcaaaatttgctgaagcctttaaaacatttgttattggcaagaggctgcacgatgagttagcagttccatacaatagacatcgcaatcatcccgcagctctttcaacatcaaattatggtgtaaggaggcttgagcttctaaagtccaactttcaatggcagcatctgctgatgaaaaggaattcgttcatctatgtcttcaaattcattcagcttttacttgttgccctcatcacaatgacagtgtttttccgatcaacaatgcaccgtgactcagttgatgatgggattatttatcttggagccctctattttgcaatagtgatgattctatttaatggctttactgaagtctcactcttggtcacgaagcttccaattctttacaagcacagggatttgcacttctaccctccatgggcttacacacttccgtcttggctcttgagcattccaacctcgcttattgaatcaggaatgtgggtactagtaacatattatgtggtcggctatgatccccaatttacaagatgtcttggacaatttctcttgctcttttttctacaccaaacatctttggctcttttccgggtcatggcatctttgggtcggaacatgatagtcgctaacacctttggatcgtttgctttgttggttgttatgatccttggaggattcattataaccaaagagagcataccagcctggtggatttggggttattggatatctcctatgatgtatgcacaaaatgctatttccgtaaatgaattccttggccattcttggagccagcaatttgcaaaccagaacatcacattaggggaggcaatactcactggatatggattattcaaggagaaatactggttctggattggggttggagcattgtttggttatgcaattgttttgaacttcttattcacattgttcttgactcttctcaaccctattgggaatatacaagctgttgtgtccaaagatgatattcagcatagggctcctaggaggaagaatggcaaattagccctagagctaagatcttacctgcactcagcttcattgaatgggcataatctcaaggaccagaagggcatggtgttaccatttcaacccctttctatgtgctttaagaacatcaactactacgttgatgtaccagcggaattgaaaagtcaaggtatagtagaagaccgcctacagttgcttattgatgtcactggagcatttaggccagggatactaacagcacttgttggagtaagtggagctggcaaaaccaccctcatggatgttttagctggccggaaaactggaggactaatagaaggaagcatcactatatctgggtatcctaaaaaccaagagactttcactaggatctctggttattgtgaacaaaatgatgtgcattcaccttgcttgactgtaattgagtcattgctgtactctgcatgcctccgattgccttctcatgttgatgtgaacactcgaagggtttttgttgaagaggtgatggaacttgttgagctaaatgcattaagtggtgctcttgttggcctaccaggagtgaatggtctgtcaactgaacaacgcaagaggttgacgatagctgtggagcttgtggcaaatccttcaatcgtgttcatggatgaacctacatcaggattggatgctaggtcagcagctattgtgatgagaaccgtacggaatattgttaatacaggacggacaattgtgtgcaccatccatcagccaagcatcgacatattcgagtcatttgatgagggaaaccgcgaaattttcttatacaagtatgtactaacatttaaccagcaccctttcctaactcattcatatgctggtcagcttttgttcatgaagcgtggggggcaacttatatatgctggtcccttgggctcgaaatcacgcaatctggtcgagttttttgagacccaagaaatggttgatatcctgagcagaccaagaagagaatcaaaagaacttacttttgccaccaagtattcccaaccattctttgctcaatatgctgcttgcttatggaagcagaacctgtcgtactggagaaatcctcaatacactgcggtccgattcttctacaccgtcatcatttccttgatgttcgggacaatctgctggaaatttgggtctcgaagggagacccaacatgacatattcaatgccatgggtgccatgtacgcagcagtactcttcataggaatcactaacgccacctctgttcaacctgtgatttccatcgaaagatttgtctcgtacagagagagggcagctgggatgtactcggcactgccttttgcattctccctggttacagtggagttcccttacattcttgtgcagtcacttatctacggcacgattttctacagcttgggctcgttcgagtggacagcagtgaagttcttgtggtacctgttcttcatgtacttcaccttgctgtacttcactttctatggcatgatgacaacggcgatcactcccaaccacactgttgcgcctattattgctgctccattctacacgctgtggaatctcttctgtgggttcatgatcccaagaaagaggattcctgcgtggtggaggtggtattactgggccaacccggtgtcatggaccctgtacggcctgctaacctcccagttcggcgacctggatcagccgctgctgctcgccgacggcatcaccaccaccaccgccgtcgacttcctccgggaccacttcggcttccgccacgacttcctcggcgtcgtcgccggcatggtcgccggcttctgcgtgctcttcgccgtcgtcttcgccctggccatcaagtacctcaacttccagagaagatggctggtgcggcagcagtgcaatattcggcgagcattttgcagcagccacggtgagccaatgggaggtcgacacctgcaagccttttgactgctgcaaccggcgtccctccatgggg

SEQ ID NO: 72197 - DNA, 276 bp, Oryza sativa
  Clone ID: PAT_MRT4530_72599C.1
atggcagccgaccaccacagccgcctgttgatccgctccggcatcgacctgtcgacgctagcatgtctgacaaggttcgtgctcaagcacggggtcaccggagacaacgctgccatcctttcccttcgtctgctccatgtccatctgcagatcaatcaacaacccaacctccgcctccacaggatcgcaatgctcggcgtccacgcgcgcgccgcgcggaccggaaatgtaatgcccgagagcgcgacatgcaggcaggcaggcagcgcagcttaa

SEQ ID NO: 72198 - DNA, 323 bp, Oryza sativa
  Clone ID: PAT_MRT4530_7259C.1
cccggtcgaccccgcgtccgcggacgcgtgggcggacgcgtgggcgcggccgatctttacgcaccggaactggcagtcgttcgagccgtcccggacctgagactcggcgcggagcatcactttctgggggcgctatctatcttcgcggcgccctcggtgggcgaggcggatacaggcgccacggaagcgctgttcttatacatactaaccacacgcggagtgctcgacttaaactataggcgcttaccttatagactaataatatataatattctttataattttaattaaaggaggctaataataacactccagccaatgac

SEQ ID NO: 72199 - DNA, 2389 bp, Oryza sativa
  Clone ID: PAT_MRT4530_725C.1
tgggcaactaattaatacaggattaatgtatcttaattactgtttcatataaagtacaattatattttatctatatcagttgaagcagagcttgtaaatcaaagatagatgtactttgaaataagtttaatatatctggctacgtacaaagcaacgcagcaaatttaggtagtctattcgtttataagtttcttgaaaaaggcaattacatgataaactgatcaacatgagaatgtgcagtcagcactaagcagctctcgtgagaatggaagtcttggtgatacaccaggcttattgaattttgttgtctcagcttgtttgacaagcatgatgctcaccgaccagctagctggctagaagagctgcctgcaaccagcggtgcctcctcagagtcatatctcttctcgaccggcgaacttgacgatgcgtctgttgaagataaattagagttgacgattaagttaaggtcaggcaactgcgcatcacgctccaggacatccattgcttggagcatggtaggccggtgtttagtctcgaagacagagcaccagagccctaagatgatggcacgctccatctccctcctttcagcgccatcaacaccaatggctagccttgagtctgcagcctcgacgacatcaccgccgcttttgtataggccccagatctgctccctgtgtttcctcgcgcagacgatctcaagaagggcaatgccgaagctgtacacgtcggagttacggttgaagctgacctcaccatccttcatgcactgtggatcaatgtatccttgtgagcctatggcagttgtcttcagcgttgcattgttcgggttcgcgacccttgacagaccaaaatcagcgagcttggcgttgaaatcgtcgtccaagagtacgttgcctggtttgatatctctgtgtatgatatatgggtagcactcgtgatgtaggtacaacaggcctgacccaatgtccttggctattttatacgtttgccatgaaagtactgctgctgactcgctcttgtacaagtagtcgttgaggttgccatttttcatcaattcatatacaaggaagagctccttattattgttgctccataaacagctgcacatgaaacggagaatgttccagctgtgtccccggcagcaccaaccaaaaaacttgacgagattcttgtgcttagcttcgctgatagtgctgacttcggcgaagaagtctttatgctcttggctggactccctcactattttcttcacagcaacttcacgctccaaccgcttcaggaatccgctgtacactaccccaaaggccccctctccgagcttgcgatcatcagagaaattgccagtcgcgatggccaaatcgtcgtattcgaatcgcctggcgccgcctgtgccctttccaaaggtattacgtaccctcttctgcatcaaacaagagatcaagaaccacagcactaacgccaatgcaacagctcctccgatgatcggtcctccaaaaagcagtgccttattgcgtctgtcttggtttactagcgtaagagttgagttgaatgaccataacattatctggttgagctccttgaggtccgcggtggctccagtaaaacccacggccacctgcggcaggagcaacgacgtgatcggatctggcagtcgtaaactcacctgataatcaggcgctgcagaccatggacggccagcgagccacagtgaggcgaccagcatctgcgttatgccgttgaattcgatgtgggctgtcattgtcccgttcagactgaagttgggcaagagtgtggtgttcaaggaactgacgacggagttgatgtcaatgccaatgtggttgatgctcttggggtcgaaagtgttgttgtatgtgtcgaactcgacggcgatgaatcggtccgaaccgaaggcggtggtcgtcccgttattgatgagtccaaggttgccgccgaacgagttggccggcagcttagatgggtaactggccaggaagaaagccagaccatcccctctgataccgtcgtcgatgggtctgattgtgaaggtgaacctcgtggagaagctggccaccaccaccttttcgccgccggtggtgtcgtcgtagagctgcaccgggtgagcgtacgacatccggccggcggggcaatagggataacaactgcggccggaggtgaggtcgaccagcccgtctttcggcttggccgcgtcgccttcgaacaggaggtcatctaggctgtaggtggatggatcagagaagttgaagctgaaggacacaggtggctttgctgctgctgctgcttcagcaatgaggtgtgaaacatcaagcgaaatggagaggagtaggaggagtaggaggagaagctgcaacattgtcacaacaaacat

SEQ ID NO: 72200 - DNA, 240 bp, Oryza sativa
  Clone ID: PAT_MRT4530_72600C.1
atgacggtctttttgcaaaaatacctccaaatcatatctctcgtatcttccaccttccccgacaaggctctcctcttcagcctctaccaccaccgccactccagcaccacagtccccatccctcactactctagtgatgatgatgacggtggtgacgacaatgatgagcatgaggttgatgacgaggactccagtgatgacggtgaagatgacgatgtggctgccgagaactacgcatag

SEQ ID NO: 72201 - DNA, 270 bp, Oryza sativa
  Clone ID: PAT_MRT4530_72601C.1
atggccgcagccgccgccgccgccaagcgcgcgcccctcgccgccgcgtcgcccggcgaccaagtcctccaggtggtggtcatgaaggtggctattcactgccaggggtgtgcagggaaagtgaggaagcatatctccaagatggaaggtgtgacgtcgttcagcatcgacctggagagcaagaaggtgacagtgatgggtcacgtgtcgccggcgggcgtcctcgagagcatctccaaggtcaagaaggccgagctcctcttcctctga

SEQ ID NO: 72202 - DNA, 741 bp, Oryza sativa
  Clone ID: PAT_MRT4530_72602C.1
atgtggaggagaaatttaatgcaatcgaaaccaatttgtaatcaacaacgtaagccgataaatttagaattatcggctaatgaaaaggaggtagctatgcttgatttctctggaaacataggaccttttgttttgccagctgaatttcgtgctaaggaagatgatgaacatctggacgatggagcacgaaatcgtgacgacaaggtgaaaatattggagagccatcaaagaacaaacctagacatcactcaggtgaaaaaattagaatgcttctccaacatatcggatcagatacaatcggctattaatgaaggccgattgaattttgcaactccagtaatgtcacatgccaaggatgaccgctttggtaaaacaaatcggtctaggtggcctaataagaaatctttggcacaaacgagaggtagttcaataaggaagcaaatctgggtgccaaagtctagaggtcaagaaaagggcttagttgctggtgtacatgtgagtgtacaaaaggcttcagtgaagaaaaaggttattgaactttgggggcatgcacgtgtagaacagctagaaaatgtatgccatgtgagtgtgaagcaagagggatcttcggcaaaggtagtaacaaatcagaatccgccgaagagctcgggggacaatggcagccagtcgagacactcacatagcttatcaaattggcaaaagaagcagctccacaagcttaagtgcagaaaagctgagtga

SEQ ID NO: 72203 - DNA, 492 bp, Oryza sativa
  Clone ID: PAT_MRT4530_72603C.1
catgcattctttctagcggccttcctttttttttttttggtagatgccaatagtgacgttctttttcataaattgcgtggtaagattccttcatttaatacctttttcatgaggctatcgagtttttacaaacaaatctgagtgaatgaaaaaacacaatatattttttcccattcaacccggggtttaatagattaaattctattaaccctaggaaaaaaatgggttgtaaaaccaaagacaataatttataaaggaaaatgggtagttggtagaataataagttataataggaatttaattacaagcaacattactttttatatttggcgcgtttatttgagggcttgaaactaccccttttaaataccaatgggcagttagttaaaccataattggtcaaaaaattccgctcgatggggtgggccttgtgatctattcaaatcccaacttttattttctttccaacctgtttctttccaacttttaatt

SEQ ID NO: 72204 - DNA, 240 bp, Oryza sativa
  Clone ID: PAT_MRT4530_72604C.1
atgtctgcacctggagccggagccgccgctgccgccgtctctggagatggagctctgggagccagagcttttgcgaacttcaacatcgacagaggcagttctgccttacaatccagcggagggccattctcggggtatgtctctctcctactgtcgttcatacctctgtttgttctgttggtcgcattgcgttcttggtatgttcatgatgcttatggtactctgtaccaacctttgtag

SEQ ID NO: 72205 - DNA, 4225 bp, Oryza sativa
  Clone ID: PAT_MRT4530_72605C.1
atggatgtggattttcatcttgcaaaaaaaaaaaaaaagggcggccgccctttttttttttttttcacaaaaagaaacgagtatattatatctgatcacgatcatccttacaacctttctttgaaaatgtcaagacaacagaagtatatattgattacaattaccaaccaaaaatagggcgcctttacaacactggatgcactacattactaacactaaatgatccatttggttctagataagtaaaaaagagaaacaaggaatgaacaagcccttcaatgggcacccacacacgtttcactacataaatactgtgcatcacctttctactccatagcagatccattcctgcctgccttattgagacacaagtttgtacatgaacagcaatgccaacaccttctgttcagctcacccaattaaatttaccaccaaagcagtaataaagaatgctggacaatcaaacgcagtttggctgtacttggtggccgaagttcacaaggttgccgcagcctccggtttgcccaaatattgcagatatgaggctgagctaccaccatgggacaaaagcaaaacatcacctttcgtgtttctatctacacagaaccaagtgtgtattccttcagcacacaccgatggggggagttcccaactccctagttgcaatccaaaccacactcttccagaagtggaccatcattctttgctaagaaaggatcaatccggacccagaggagtgagaagattgaagccagaagaatggaccagacaataacaattgttggcgtcctgttttgccttccaaccaaacctttgaggaatgggtaaagatggacgatcacccaaaatgcaaagaagagcttcccgaagaggggtccccatgattcatacccgttattgattgcattcgaaacaccagcaacaaccccaatgaagttcaataagagtagagtggttggaggtatcagcaaggtagtccatttgaatgtatatagctctgagaactcttcatcgtccccaccttttgatgtcacagtgaaactcgtatctataccagctatgaccttcaaaagtccctggaacaaagcaaagaggtgcgaagagacccctccaatgacccaaaattgttcatttctccaccaatcatcaatgccaacaccactccatctcatttccaggatgccagtagcaaaaatgcagataaaaagtgacatgaaccagagactggcaacattcgtaagctctggagtgataaacttcccagttagcaaacagatggctggcaatgtacagtaagccaagagtggaatggatgtaaaaggatacacgatggaattaatgtaggaaaatctttccaaacattttagtccaccaccatatccataccaaagagggcaatggttgctgaagaatatttcaacagacccaagagcccaccgaagaacttggtgaagacgatcagaaagattgagtggtgcagaacctttgaatgcaggtagtttaggtatgcagtaaattgaccgccaaccatggcagtgcatcttaaaaccagttagaatatcttctgtaactgatccgtagatccagccaatctctttcccccagtctgtcttatcttcgtacccacagcttatgacatgaattgcttcctttagaagagatgctggactcgcacttttcaaggttccaccattctcaagaagtgtggatgcgacaaaaacagaagattggccaaatttcttttccagcttctgttgatttacaataccagccttttcattttcagctcctggagcaccctcctcaatttcaccaagtgcatatgcaggggattgattttctgctctcttgaagaaagatcttttcttcttctctgttttaggtttcgtagttttcttcttagtatgcctgttaccacaacagcagcagcagcaccatttaggccagcagttgcaggtcctcgacggaggcttcttcgttttgggggcatcataaccatagagagcttgccgtctgaagacacatccagtaccaacatagatggggccttgaattccatccagacctttcatgttgatatcgaaaaagacaacgttccggttagcatatcgatcatgtcggtcaataccatcaaacctctgagggaactgcacatagcacactttcttccccaccaaaggatccatcatgaaacacatcgcttcccttatggccttgctattgttgatgtagtgatcacaatccaagttcaataggtatggagcattcgaaagaacagcagatactcggaccaatgcgttcatggcaccagccttcttgtgatggttatagcctggccttttttctcttgaaacatacaccaatcgaggtagctcattaccttcgatgtcatggccgccactttggccaaggaagacctgaatcattccagggtgatcgcgaacattgtttccaggccagggagttccatcttgcattgtccaaccttcctcgggaactttctgagctttagcaaccaatgcattgattctcaccttgaattcctcatactctctcttcattgctctcctctccctaacaaagtatggtgccaccttatccttcaggtagtctatcttctgttggaagtaccactctggagcacgtggttcaatactgtactttttgcagaaaggaacccatttctttgcaaattcagatgtttcggataatgcttcaaatgtcagcattgcagcaccatcatcagagacatagcatgaaaccttatcaactggataatctaccgcgaggatagatagaacagtgtttgctgtgaccaaaggaggttccttcaagggatcaacagtactgacaaagaaatcgattggtgcaagttgagatgtttggccttccttgtcaaacctcaatgtcaatcgatcaaggtaagtctctctctcgataggaaaccacttggggaattgatcaagaatccaagacatggcaaaccagatttcacaaattacagatatcagccataaggcaaaagcatcaggcactggatgcatcactcgatagtggaagaaaaaccccaaaaccaccagccgaattatgataaccattctataggggttaatctgacttgaaggaattgggacttttctggacaatggctgcctagcttcatccatttttgtccagccaaagtgataaagcaattctacaggggagaaaatcagtggtagatctccatcatcaccatcgccatcccagtctttaccaccaccatcatttctcatctggtgcagcctctcctgcttctgcttccagctctccatcctctccttccacgcaacactaccataaccgtatgcagcaagatccttggatgggtccatagatcttggttgaactgtagcacaactacctttagctgattcaggtagattgggatccgcataaggaagcgggtggatcctctttcccccgccgcccataaaagatggcacaagcgcatgctgctccggcgggatgtcatcaaccatctgcccatcggtaaggaggggaacattggggttgggctggaatggctgcggaacaccgttgacgtcgaccccaccacggccatagctcatatgggcgtggagcatcgactccgcgacgtactgcgagtcattcctgtccctccagttgaactcgttctccaggtcatccacaccgtcctcctcctcgtccccgggcacacgagcgcaaccaattcggcattgcgggtgtgacttgcccctgaggcgcttgaagcgggtcttgcactgggggcagttctgcgtgccctcgcggcgctcgtactcgtagcagtcgcggcacaccgggaaggcgcactcgttgcacgccacgaacggctcgccgtcggggttgagccccacgtcgtcgccgcaaatctggcacacctgcccgttctgctgccggagcggcttcggcccgggatcgccgtcgcggcggatgacgacgagctcgttgcggttgtgggagccggcgaccagaccggcgctcgcctccatcgcccctcctcctcctcccccccgctaatcaaccacgcacaccctcaccctcgccctcttcctcctacgccgcccgccgaccgctcctcgccctacaaccagatctccatctctctctctccctccgaatctcccggggattccgcgccctggcaaatgcgcctcccccgcgacggagcagagaagagcgg

SEQ ID NO: 72206 - DNA, 1411 bp, Oryza sativa
  Clone ID: PAT_MRT4530_72606C.1
agctccaacacgctcacccatgcaacccaacgcccgccaaatgcgcggcggcggcggcggcggcggcggcgggcaggacgacttcttcgaccagatgctgtccacgctgccggcggtgtggtccgagctcggctccggcaagcccgcctgggacctcacggccggcgccgtaggaggaggaggaggagcctccgatgaccactccgccgcggcgttcgacgactccgcgctcctcgcctcccgcctccgccagcaccagatcgacggtggaggcgacaagcccatcatgctccaactcagcgacctccaccgtcatcacggcctcgccgccggcgatgacagcggcggcgctgccgggttccttcccctgtcgctgttcgctgaccggtcgcaggacgacatcgacgccgccttcaagtcccccaatggcgctagaggtgaccatgcgctgtacaatgggttcggggccgccggaatgcatggcgccgccgccatgcagccgccgccgttcgggcagggaggatcaatgccggcgcagagcttcggtggcggagcggccgcgagcggcggcggcggcggcgggtcggcgtcggcggcagcggcggctggggcatcgtcgggcggaggggcggcggcgccgccgcggcagcggcagcgggcgaggagagggcaagccactgacccacacagcatcgccgaacgtgtataccactctcccaccacctttcccttctcgcccccattttttattgcctccatgccatgttgtctccggagggagaggatagctgagaggatgaaggcgttgcaggagctggtcccaaatgccaacaagaccgacaaggcatcgatgctcgacgagatcattgattatgtgaagttcctccagctccaagtcaaggttctcagcatgagcagattggggggagcttctgcagtcgcgcctctagtggctaacatgtcatcagagagtaatgggaatggcaatgccaccagcagcagcgggaacggcgaggcggccaatggcagcagcaacggcgacaacaatggtggcggcacactgcgggtgacggagcagcaggtggcgaagctgatggaggaggacatgggctccgccatgcagtacctgcaggggaaggggctatgcctgatgccgatctctctcgcaacggccatctcctccgccacctcctcgtcgctcctcccccgcactgggggaggcgctggagggtccctacatgaaggtggtaatggtacatcaccaccattggtgaatggcaccgccaccggatgtgacgacgccggagtattcttttctgttaaatttgtcgtggagctgtcgtttctcctgctgaatgaagactgtagaggtaaggaggaatcgaaattattggtccagaagggaccctga

SEQ ID NO: 72207 - DNA, 2085 bp, Oryza sativa
  Clone ID: PAT_MRT4530_72607C.1
atgggatcttcaagtgttgtgctatggtgggaagagtggcagctccgtatcctcgtcctcggcagcctcttcctgcagtgcttccttgcatttgctgcagttcaccgtaggcgctccatcccagcatccttgagattctttatttggttagcttaccttggaagcgatgctctagcgatatacgctctcgccacactattcaaccggcacaagaccgataatcaaggcggcagccatgtcctcgccaccctggtcagccctcaggggaagggcggtggcgatgacactggccttgaagtcttctgggctcctgtcctacttctccacctcgctggcccggactccatcacttcctacaacatcgaggacaatgagctatggaggaggcatgtcctgactgtgatttcccaggtgacagtatccctctatgtgttttgcaagtcttggtcgggtgagaacaagcttcttagagcagctgttctgttgttcattgctggaaccctcaaatgcattgataagccaatggctctcaagagcgctagcatatatggcctagtaacctcatctcctttccatgaccaaaagtcacaaaataatgaccaaggcgagaatagatcacttgaagcctacatacaagaagccaagggttatttttccaacctaaagatcaatgatgtttatactgagttggtagcagctgcccaaaacaaagacctacgggttatgccgttttggttattcgtagacctcgcatctaccttgtgtcatcgtcttagagtcttgcgtttcttcttggttcttgacaacaagagcgcggattcactgctacagacggcactgtgtggttcctttgttcgtctttacacaaagaaaagcatgctcctcagttatttttgggcaaaagataaaaggaatgctctcatatctacttattcccacctgaacaggctcttagcagtatgcctgactatttcagctgtcgcactattccaccagagccataaacaaggctacaataatagtgatgtcaaggtgacatataccttgctatggtgtaccgctgctctagaggtgtacgcacttttcggtcccaagtacaaatttttcacctggtgtaagaatgttgcccaatacaatctcgtaggattcttcgcccgggaccaaacgcccaccaggttgctcaagttggccagttgtttttggtgcaaggactatgtggaccagcactggtatgtcaaccaatgctcatcgtctttcgccatcacagagcttgtaattgaacaggttaaagccggatggaagaactacatagaagatacctccacctactggatgttcaacgatcgcagaggccaactaaccattcagcatgagctttgcgatgaagagctgtgcaagagcttagatgtgccattcgatgagagtatcattgtttggcacattgcaactgacatatgcttctatgagggtgcccctgcagctaatcatcatcatctcaaggctgccactcgatgcagagagatctccaactacatgttgtacctgttggtggttaacccggatatactaatgtcgggcaccagagcgaacatcctctccaatacatgcaaggagcttcgtagcatgtttgaggatgagaagccaccgtctgatgaaagtgaccttacaagggagatacacagaagggcccaaagctcgaatgtcgacgctgctgcaaccgaagaactgattccccgtgcatccaagcttgcgagccagttgttggccatggatggcgacaagaggtggaaggtgatgcaaggtgtgtgggtggagatgttgtgcttctccgcgagcagatgcagagggtacttgcacgccaagagcttaggccagggaggggagtacctctcctacgtgtggctcctcttgtggtacatgggcttggagagcgtggcagagaggcagcagagatcagatttcaggagtcacgtagaaagagtagccagcagacaactaccgtgtaccgaaactgagagctctcaggaaccgagattcaagaggaggaaggagcagttgtgccattgtttcaggagggaaacatag

SEQ ID NO: 72208 - DNA, 669 bp, Oryza sativa
  Clone ID: PAT_MRT4530_72608C.1
atgcgcatgcatcgtctatcggctagctggctggccctgtggaagcgagtgatttctctccccgtctcggcctcggcggcagcagggtttggctggcgcctctgctctcctgctcgttcgcctgctgcttttgctcgcttttatcgtgtgtctcaggaaacgggaaagtggcgggtcgggggactgggccgcggagggggaggaattcagagaggactgtgccggagcgaggtggcggcccgaatcccaagagattggcaaagatctggagtgtgtctaggcaatgccacggttagacgtagtatacgagagaaaaacgcccgcttccagcccgatgagagcagttcgtccttgccgccgtcctttttttccacctacatacctgatggctggttccccgcagtaacaccgcaatccattgtgacctcctcctcaccatgcttgctcgctgggttacgacaaccaggcatactggtttatagtctgctattgtacctgctctcatacgccttcgtacgtcggttacagcgggatgagatccatgagagagagagcagcgtgggaggagtaggttcagtacggtatcgaggaatacccatattcatagagatcgagtgtcgtgattacatcatcagcaagttccgcgaggactttcccaccacctcacct

SEQ ID NO: 72209 - DNA, 1892 bp, Oryza sativa
  Clone ID: PAT_MRT4530_72609C.1
atggctcgcacggcggaggagaagtcacgggctcgcggcacggcgctgtggcggctgctccggccgcttgccgtgctggggccgcggatgcagaggaggagggaagcggcggtgccgttccgcggccaggtgcggaacacggcggcggcgtcgctgctgctcctgctctcgctgagccacgtcccgctctacgccggcgccggcgacgccgaccccgacccgctgttctgggcgcggcccctcctcgccgcgccccgcggcacagtgatggagctcggcgtcgcccccgtcgtcacgtcgtgggtggtggtgcgcctcctcgccgccctcctcttcgactccgactcctcaaccaccgtggcctcctgtgagttactagctcgatgcctcgcttacgtcacgaacgcgtcgcggttggtgatcgggatcgcggcggcgcttgggatgtgcgggagcggcggagcgggcaacgcggcgctcgtcgtgctccagctcttcgccggcggcgtggtcgtcgtgctggccgacctcctccacgagacgggctacggcgtggagggcgtctccgccgcctccttgctcatcgccaccaacgcctgcgagcgcgcggtgtcgcacctgttcagccccgtgaagctccgcctcgccggcgccggcccggagttcgaggggcccgtgttcgccgtcacccaccgcgtggccgccgcgccgccgtcgtggcggcacaaggccggggcgctcctcttcacgctgctccgcctggacctccccaacctctccaactacatgaccacctgcgttatgttcgtcctcgccgtgcgcctcgacgagacccacctccggcggctgtaccgctccagaccgcgccgcggcaccgacgagttcgtcccaatcaagctgctctacacctccgcgatgcccatcatgctgcacgcctccgccgtctcggcgttctgcgtcgacgccggcggcggcgccgcctacccggtgggcggcctcgtctactacgtcacgccgccgtcgaagctgctggtggatcccggcctgatccacgagctgctgatccatagcgtgttcgtcgtcgcgtcgtgcacgctcctctccatggcctgggccgaggcgtcgcgctcgtcggcgagggagttcaggacgcgggtgatcggaacgggatacttcgtgtgggacgagactagccgtcggatcgaccgtgtcatcgcggcggccgccgccgtcggtggcttcgccgtcggtgggctcgccgtctacgccggcgccgttggagctattggagaagctggtcctgaacttttgttcgcagttttagtcatcaagaacctggccgaaaccttctacgctaaatccaagcttactactacctatagctagataaattattaagcttcgatcatctttataataagacaatgcatccgcatatgatcatctgaccgagaatcaatctcgtactctatttcagtctcatcccccattatatttactcataggggggccgctgtacataattatttctttgattgtattttaatcgccctctctttgctgtcttaacacgccttctctggaaaatacctgcttgttaatatattgtagtctcatactaatcttattcagctccgaggtttatcgaatactcttcctttctctctttatatagggataatatatcagcagacgacagatgtttacactgttgggccacgtggattttttaacactccggtgatgtacattcacaggatgtgccgctttctgtctatactatttatatattatagtttatattgtttacttgctttctctctatgtttgtggtttggatccatattgttatactggaggggaggttagttatagggagatgtggaaatggg

SEQ ID NO: 72210 - DNA, 1196 bp, Oryza sativa
  Clone ID: PAT_MRT4530_7260C.1
aaccagttacgcagaaccccgaaccatattcatcataacgaaacgaattcaagaaatgcatttcagccaagaaaacagaacagaatagaactaacaaattacgtaacggctgtcaagtttaatactagtagcagcagaggcagcgaaataagctgcggtagcaataacgaatttaactgtttcaatggttaacccatgaacagcaaacaccgaaggtgcacctgaatgcaaatgccactatcatggcaacaaaagctatagatatgcgtggtaagtaagaatcccccagcaaaaattttcctccgagcaaaatggtgtggattaactgccgtctgccactagttcgctgtcaggagcttgatgacagatgcagttccgatccgggtggagggcgacgactgactcaccggagttgcagagccccatcgccttggcgttgctgatggcgaacccgagagcttctttagtgggttcgctgtcgaacgcgtaggttgtcgagcgtctcctggtggtatcgtgggatccgtgggagaagttgaagcgccgaccacatcccggcgcgacagccgcccgatcatctccaccgacctcgacgccggccccagcgtgcacacgatcttcgtcttgggcctccgccgcatcacccccgcggctccctcctgctgctcctccatcaccgccatcctcctcctcctcgctctcgctggatctccccctcgacttggtcggcggcggcggcggaggcggagatggaggtggtgtggtttcctcgtggagggcgacgacggactcaccggagttgcagagccccatcgccttggcgttgctgatggcgaacccgagagcttcttcagtggcttcgttgtcgaaggccttggcagtggctgcactcagcatcgggatcactcccctgacgatgaggctgtgccgcgcaggagcttcgtcgctgcaggtccagtcgaaggagtcggtctgtttcagctcaggaaccacgacggacagaatcggcatggatggcctgtacttggccaccagcctagcagttgttcctcccctagtcaggaccaagatgagcgccgccttggcagagttcgctgtacgcacagctgatgatgcaaggctctccaatgggctcatgggaattggagctgatgcggtaatggacttgaaaacagcggcatggtcgacgcatgact

SEQ ID NO: 72211 - DNA, 744 bp, Oryza sativa
  unsure (1)..(744): unsure at all n locations
  Clone ID: PAT_MRT4530_72610C.1
gggtgcagggattcggcncgagctcgtgccgaattcggcacgaganatccccccaccntggatcncgcctcctcctcctcggggctcctcctcctctccccgggcgggtgggccgccccctccaattccccgggcaagnngaaccccctaatccggcaggtgttcgggggnggngaacanaanccancttganctgnnanccggatcgcacttccccagcttccttccaannggttcggggaanttctaccgtnnacccgaaaaancaccgcctttcccgntctccgttgttttatgggcnaaactccgccggggcggcggccgccnccaagnttgnttcnaaccccttttttttttnttnncnggggtcttccaanttctcccnaanctcntccccgggcgantttctcccgggctntcctccggcctcccnnnnttttcngcncgcctttctttnnggggggntttggngtgggtccccccncnnnatnntcccntctccntccntnttggncttctcnnactaatttttntntgggtntncnnngnncccntcngggncttnnnnaattnnngtttttttngnnttttttnnttttnttncncnntcntctgggnngntttttttntgcnntnttttnctnnnnnnnnggnnctctttttttntttttttttcccttctcnttcttnttnttnccttttctttnnntnttttttttcntcccntnntntttttntntttnn

SEQ ID NO: 72212 - DNA, 1014 bp, Oryza sativa
  Clone ID: PAT_MRT4530_72611C.1
atgaacggtcaaatatatttaaaaaagtcaacggtgtcaaatattttgggatggagggagtataagggtttgggcgccgacgaacagcgcgcggctgcgtcgttgcagcgttgcacggtgattgctccagttcagctgcactgccgcgacatggggcaacaccaacgcaagaagattgccttatatattgatagatgcgtctatcttggcatcttgcactatctaaaagccctcctccacgtccaactcggggtagaaactaaaggaaacccgaaacatgccttcccgagcaaggaaacctcgaaacccgacgaaacacagtcggattcagacctgccggtcagaccggcaacacactgccggtctgaccggccctcaaccggcggtctgaccgcccaacacacggcggctttaccagccttggtcgaatggtattttcctcttatgaaaatttattcttcaaataggcctttaagaaaacttattatagaattaatattttacgacgccaatattattggcgccgtggtccaacatgacagcgccaataatattggcgccatccccctaaccccttggtggaagtacaaatatttacaaatagatcctcaacacaacaatattggtgtcgtccccttcacattagtgacttggctttcaccggagggcgaaggggacggcgccaacgtcattggcgctgttatgttggataactgtgtcaatgacgttggtgtcacggaactgatctctaaagaccgcgtggagtgttgtcatctcccaatcatatctgctcatcaccactctagtacatgtggctacggaaaaggcagattcatccacgacatccaagagagaggcggatctgccgccagtagcctcgggatcgcgcaattctggccggcaattgacattgatccagacatcaacgatgtcagaaacttggagagcatagcacggccagggccagcgagcctacctacggcgcaccactgctcgttcttcctcctgtgcttc

SEQ ID NO: 72213 - DNA, 648 bp, Oryza sativa
  Clone ID: PAT_MRT4530_72612C.1
aaaaagaaaagtgtttgtgttcttatcaaggtctttctgttgagttttaaggttcagagtgaagatcccttgatggtccatttgtgttggtttggatcaacaacatgccatgggctgctgatactagcatggcggctcttggggccaaggtcttacaaaaggtttgatctgctggtctactgaagaaaacattatttagtgttgcctacaaattttttcagtgaggtagctgtcgatgtcagagcaccaagtgcttatggatcttacctaaatgtttgccggaggttgttcatcggtcacaacaatcctcatcatgttttcatgtcaactattttagcccttgttcccatcaattagttaacttttggagctaaaagcttccgataaaaaaactgcaggggtatgactagagatcacataaatatgactgatcaatgctctacaatacatgctactcctacttcatctagccacattgtgtcgtcggaatatacatgcagccaggttaaatagatttatttggaaagcttattgtctttcagcaacaaatatacatgtttgtttggcatcgttttgagcctctttacaggtactgatttacctttaattctataaaaaatgttatattcattattaacgcgtggacgg

SEQ ID NO: 72214 - DNA, 1407 bp, Oryza sativa
  unsure (1)..(1407): unsure at all n locations
  Clone ID: PAT_MRT4530_72613C.1
aggacacagattccagtgaagtcaagacagcaacagataggaggagtggacggctcgccttctctcctctcctctccgagccggtcttccttccttcctcgagtgcgtctcgcctccgtccaaaaaaagaacaaatctttgtacgagtcgccggtctcgccgcccttctcagaccccgcccgcccgccaccgccaccgccttggccattgccccccctccgcattgcttcgctataagtactcgccggagtggccgccctgcaccatatccactcacctcggagcagcagcacaagaatcaaacaaaggagagccttcttgcgttctttgcttcctcctcctgtgtgtagaggatttgaaggagatttggagtgtcttgagaggatggcgttcgcggtgtccgacgagctgctcggcacgttcgtcccgatcgcggtgtactggctctactcggggctgtacatcgtgctggacgccatggggatggacgactacaggctccaccccaagggggaggaggccaccaagaacgtcgtctccaagtggaccgtcgtcaagggcgtcctcgtccagcagtccttccagatcgccgtctccctcctcctcttcacgatcattggtgatgaaagtggtactgtgaggaagcagcctccggcccttgtgatagcattgcaattcatcattgcgatgtttgttatggacacatggcaatacttcatgcacagatatatgcatgtcaacaagttcttgtacaagcatgtccactccaagcaccacactcttgtagtcccgtatgcctttggagctctctacaaccatccccttgagggcctcatcctggacaccatcggcggcgccctctccttcctcatcgccggcatgactcctaagacggccatattcttcttctcgtttgcgaccatcaagaccgtcgatgaccactgcggcctgtggctcccgggcaacatcctccatgtcttcttcagcaacaacagcgcctaccatgacattcaccaccagctctatggcaacaagtacaacttctcgcagcccttctttgtcatgtgggacaagatcctcggaacatacatgccttacactcttgagaaccgcaagggaggtggattcgaggcgcgcccgattaagctcaatgtggcagagcagagcaagaccgattaagctcaatntagcagagcagagtaaggccaattaagcagtgttnttcctgccagtgcacaaagctcatgtcatgttgtagtattgcctgatttttctaactacatttgtgttggtagtcagtagaagtctttttcatgttcatatacacaaacccttttgtgggggatgccatcttgtaccaaggtatagcaaataaagcattgtgttaaaaagaaaaaaaaaaaaaaa

SEQ ID NO: 72215 - DNA, 133 bp, Oryza sativa
  Clone ID: PAT_MRT4530_72614C.1
attatgtccaacggcacactaacccaactaccttgactcatagtaaccaatggccgaattcccgagaagatctcgcatctcctggtctacaacgaagacctcagccagtagctcctataaggggctgctctcg

SEQ ID NO: 72216 - DNA, 2258 bp, Oryza sativa
  Clone ID: PAT_MRT4530_72615C.1
agctttcccatcacgaacatgtttaactccttgatcacagtctgcgtcctgataatgcttgtgctcttcttgtaaggccatgacccgatccggtttagcatttgcaccatcttccttcacttgtaccgaaagtatgttcttcatagtcaattgcggcaggttgaattgagttgattgaggttgatcaagtagtccaccttggtcatcatgggcttcttgtggtctcacccgtgattcttgcacggaaggataacctttaagtatgcatgttcttgtgagcttggagccttcggcctagatccttcgggtaaccaaggaatcttcctggagtctccgaggtatccacccagagccttcgggctcgatggcatggtgatagatgagcttgattacaaatcgagcggtcttatcaaagcctttgattccacaataaaattttagcacattttggtccccaacaacattgggtccataaaggttagtcacaagagacttagacaccgaaatggcctttgtgctagtgtgtggcgaacaaatcaccctagtagcacaaatatcatttttggcattcctaagcaaattatgatcaaatgagagacttggcttaggaatgttacccatgggacaatttttaccaatatgtccctttgcccggcaattttatcaaagtcgacttttgcttctatattgcttttcggtttgtttgttgccggtttgcctctcacttgatgttttgcattgttcatccaatgtgcaaggagaccttgaggcaaagtgtcccgcttcagtgcacttgaagcacttgatgtgaggaatgtccttcttcttgctcaacttatttcctttcttccaagggcaatctctaacatgatgtcccactttcttgcacttgaagcaagtaatggaactcttgatcatcttttgatttcgttccctggtatgatcattgatggacttgatatccctttgatggatcttggtgcacgctacggttgatccctttctcaagcttattcaccaggccctcacggttttcttgagaaggtttgagcaatacacacaagtccatgatccatttgcttctcccttttgcctacacaatccaagtcacatatagtgctcagggacatgtttgcttgggggaaacaagggttagcacaagtgagattaacttgaacatgaggctcataggattttaccgttgcaattatcacctcatgagatacctctagcatagcatgagaatccacaagattcacatgagaacacaaaagttcatcatgtctttcttgtaaatccacatacttgttagtgatctcatcaagttgaaatttgagctcttgattttgcttcttcaaagatgctacacaagcaatagaattagtggcacaagcaaattcattttccaatttttcatacctcatagtcaatgaagaatgaaaatccttaagtttcttgtgttcttcggttagactcatgatttcttcattcttcttgatagtgcatgcttgttgcttttgaatggcttccatgaacttgatcaccattgttacatccttcttgctcaagtgatcaaactcggagtcaccatctacacccataaagcaagcataatcttcggaaatagaagatgagcatcttggtgaggtggattcttcacttgtccattagcgctcatttacttcttcctttaaaaggttagttccacatgtactataggaggtagagcatttatccatatcatcctcacacatatacttggggctaggtgagatgcatgagtcaacaacacaatgcaatatgacaatttcattatcggtgttgttggaatccaatgggagaattggatgatcgtcaaccttactcaccaattcattaccttcaatgtagtcatgtgttgatgataaggtggttgtgggatgattatcttgatcatcgaaggtagttacttgaggttcttcgcaatttggcgatgaagttgaacacttctcaaatggttcttccaaaaagagtacatcatcacatttggaatcatcacatttggacttgtcgtatctctccttgagagtggtccaaatgagatgagcatcttcaaacggcatgacggttttaaatacatcttcacttaaaacaccaaataaaacaatagtagcttgagcattgatatgcatgcatttctcttcctcttcaaatgatagctctttatcattaggaggagaaatgctcacatctacaactcgctctatttaaggacccat

SEQ ID NO: 72217 - DNA, 488 bp, Oryza sativa
  Clone ID: PAT_MRT4530_72616C.1
ggtccattaatacttgatttatctgtgagatgaacaaaggcctttcccctttacggaacccaagatttgacaagggatggattttgccaacacacaatttggctgaccaggttaaaagcgtcgttttaacaacatgcgggtccagctcatagagctttcaaggctgttattttagtcaaggtaaagccctaccaaacggctatatactgcttggccaccaaaatgtaccattaatcttgcacccgggaggctccttcttctccatggagagggccaggcgctccaacccgaggaccttgacgacctccgacgcgacaccaaaaatgtgccccacatgcgggcgccttaggcggaatgcggcaatcgccagcgtgttgttttgccaagtgaactgcagggaaccgaactgggggaggaagggggcaatgtttttcccattgtaaacaagctgcacacaaccatacttacggaaggcaaaggtgggctgc

SEQ ID NO: 72218 - DNA, 1248 bp, Oryza sativa
  Clone ID: PAT_MRT4530_72617C.1
atgccgcttgaagatgctcatctcatttggaccacgcttaaggagagatgcaacaagtccaaatgtgatgatgatatagtctttatggaagaaccacttgaggagtgttcaacttcatcaccaaattgcgaagaacctcaagtgactactttcgatgatcaagataatcatccagcgtccaccttatcatcaacacatgactacgttgaaggtgatgaattggtgagtaaggttgacgatcgtccaatattcccaatggattcaaacaacaccgataatgaaattgtcatattgcattgtgttgttaactcatgcatctcacctagcaccaagtatgtgtgtgaggatgatatggataaatgctctacttcctatagtacttgtggaactaaccttttaaaggaagaagtaaatgagttccaatggacaagtgaagaatccacctcacaaagatgctcatcttctatttccgaaaattatgcttgctttatgggtgaagatggtgactccgagtttgatcacttgagcaagaaggatataacaatggtgatcaagctcatggaagccattcaaaagcaacaagcatgcactattaagaagaatgaagaaatcatgagtctaaccgaagaacataagaaacttaaggattttcattcttcattgattatgagaagcaaaatcaagagcttaaatctcaacttgacgagatcactaacaagtaaaagggagaagcaaatagatcatggacttgtgtgcattgctcaaccatctcaagataaccgtgagagcatggtgaagaagcttgaggagggatcaaccgtggcttgcaccaagatccatcaaagggatagcaagtccatcaatgcttataccaagggacgaagtcaaaagacgatcaagagttccattacttgcttcaagtgcaaaaaggtgggacatcatattagagattgcccttcgaagaaaggaaataagttgagcaagaaggaggacattcctcacatcaagtgcttcaagtgcaccgaagcgggacactttgccttaaggtgtccttgcacattggatgaacaatgcaaaacatcaagtgagaggcaaaccggcaacaagcaaaccaacaagcaatatagaagcaacatgggtaacatattggtaaaaattgtcccatgggtaacattcctaagtcaagtctctcatttgatcataatttacttaggaatgccaaaaaagacatttgtgctactagggtga

SEQ ID NO: 72219 - DNA, 2241 bp, Oryza sativa
  Clone ID: PAT_MRT4530_72618C.1
ttaagctttctcatcatgaacatgtttaactccttgatcacagtctacgtcctgatagtgcttgtgctcttcttgtaaggccatgacccgatctggtttagcatttacaccatcttccttcggaagcatgttcttcatgttcttcatagtcaattgcggcaggttgacttgagttgattgaggttgatcgagtagtccaccttggtcatcatggacttcttgtggtctcacccgtgattcttgcacagaaggataacctttaagtatgcatgttcttgtgagcttggagccttcggccttgatccttcgggtgaccaaggaatcttcctggagtcttcggggtatccacctagagcctccgggctcgatggcatggtgatagatgagcttgattgcaaatcgagcggtcttaccgaagcctttggttccacaataaaattttagcacattttggtccccaacaacattgggtccataaaggttagtcacaagagacttaggcacccaaatggcctgtgggctagtgtgtggtgaacaaatcaccctagtagcacaaatgtcatttttggcattcctaagcaaattataatcaaatgagagacttggcttaggaatgttacccttgggacaatttttaccaatatgtccctttgcccagcaattatagcaaagtcgacttttgcttctatattgcttttcggtttgcttgttgccggtttgcctctcacttgatgttttgcattgttcatccaatgtgcaaggagaccttgaggcaaagtgtcccgcttcggtgcacttgaagcacttgatgcgaggaatgtccttcttgctcaacttatttcctttcttccaagggcaatctctaacatgatgtcccactttcttgtacttgaagcaagtaatggaactcttgatcatcttttgatttcgtcccttggtatgagcattgatggacttgatatccctttgatggatcttggtgcacaccacggttgatcccttctcaagcttattcaccatgccctcacggttatcttgagaaggttgagcaatgcacacaagtccataatacatttgcttctcccctttgcctacacaatccaagtcacatgtagtgctcggggaaagattttctttggagcaacaagtgttagtacaagtaataagatcaacttgaacatgaggctcataggatttcaccgttgtaattatcgcctcatgagctacctctagcatggcatgagaatctacaagattatcatgagaacacaaaagttcatcatgtctttcttgtaaatccacatacttgatagtgatctcctcaagttgagatttaagctcttgattttgcttctccaaagatgctacacacacaatagaattagtggcacaagcaaattcactttccaattttttatacctcataatcaatgaagaacgaaaatccttaagtttcttgtgttctttggttagactcatgatttcttcattcttcttaatgaggcatgcttgttgcttcttaatgatctccatgagctttatcacaattgttatgtccttcttgctcaagtgatcaaactcgaagtcaccatcttttcccataaagaaagcatgatctttggaaatagaagatgagcatcttggtgaggtggattcttcacttgtccattggggctcatttacttctcccttcaaaaggttagttccacaagtactataggaagtagagcatttatccatatcatcctcacacatatacttggggctaggtgagatgcatgagtcaacaacacaatgcaatatgacaatttcattatcagtgttgttggaatccaatgggagaattggacgatcgtcaaccttactcaccaattcattgccttcaatgtagtcatgtgttgataaggtggacgtgggatgattatctggatcatcgaaggtagtcacttgaggttcttcgcaatttggtgatgaagttgaacattcctcaaatggttcttccaaaaagagtacatcatcacatttggacttgtcatatctctccttgagtgtggtccaaatgagatgagcatctttaagcggcatgatggttttaaatacatcttcactcaaaacactaaataaaacattagtagcttgagcattgagatgtatgcatttctcttcctcttcagatgatagctctttatcattaggaggagaaacgctcacatctacaactcgctctatttgaggacccat

SEQ ID NO: 72220 - DNA, 2236 bp, Oryza sativa
  Clone ID: PAT_MRT4530_72619C.1
agcttttccatcatgaacatgtttaactccttgatcacagtctacgtcctgatagtgcttgtgctcttcttgtaaggccatgacccgatccggtttagcatttgcaccatcttccttcggaaacatgtcttcatgttcttcatagacaattgcggtaggttgacttgagttgattgaggttgatcaagtagtccaccttggtcatcatggacttattgtggtctcactgtgtgcttcaaagtatttgaattacttgtagaaatgcatgtgtttaatgaaaaacaaatggggagtgtagcctatattttggagaaaggcacatcttcccggagtctccggggtatgtacccagagcctccgggctcgaatgcatggtgatagatgagcttgattgcaaaccgagcggtcttaccgaagcctttggttccactataaaattttagcacattttggtccccaacaacattgggtccataaaggttagtcacaagagacttagacacccaaatggcctttgtgctagtgtgtggcgaacaaatcatcctagtagcacaaatatcatttttggcattcctaagcaaattataatcaaatgagagacttggcttaggaatgttacccatgggactatttttaccaatatgtccctttgcccagcaattatagcaaagtcgacttttgcttatatatttttctcggtttgcttgtttgcctctcacttgatgttttacatcgttcatccaatgtgcaaggagaccttggaggcaaagtgtcccacttcggtgcacttgaagcacttgatgtgaggaatgtccttcttcttgatcaacttatttcctttcttccaagggcaatttctaacatgatgtcgcactttcttgcacttgaagcaagtaatggaattcttgatcatcttttgatttcgtcccttggtataagcattgatggacttgctatccctttgatggatcttggtgcaagccacggttgatccctcctcaagattcttcaccatgccctcacggttatcttgagaaggttgagcaatgcacacaagtccatgatctatttgcttctcccttttgcctacacaatccaaatcacatatagtgctcggggaaatatttgcttgtgagcaacaagggttagtacaagtgagatcaacttgaacatgaggctcatacgattttaccattgcaattatcacctcatgagatacctctagcatagcatgagaatccacaagattctcatgagaacacaaaagttcatcatgtctttcttgtaaatccacatacttgttagtgatctcatcaagttgagatttgagctcttgattttgcttctccaaagatgctacacaagcaatagaattagtggcacaagcaaattcattttccaatttttcatacctcatagtctaagaagaatgaaaattcttaagtttcttgagttcttcggttagactcacgatttctccattcttcttgatagtgcatgcttgttgcttctcaatggcttccatgagcttgatcaccattgttatatccttcttgctcaagtgatcaaactcggagtcaccatcttcacccataaagcaagcataatcttcggaaatagaagatgagcatcttgatgaggtggattcttcacttgtccaatggcgttcatttacttcttcctttaaaaggttagttccacaagtactataggaagtagagcatttatccatatcatcctcacacacatacttggtgctaggtgagatgcatgagtcaacaacacaatgcaatatgacaatttcattgtcggtgttgttggaatccaatgggagaattggacgatcgtcaaccttactcaccaattcgttaccttcaatgtagtcatgtgttgatgataaggtggatgtgggatgattatcttgatcatcgaaggtagtcacttgaggttcttcgcaatttggtgatgaagttgaacgctcctcaagtggttcttccataaagagtacatcatcacatttggacttgtcgtatctctccttgagtgtggtccaaatgagatgagcatcttcaagcggcatgatggttttaaatacatcttcactcaaaacactaaataaaacattagtaacttgagcattgagatgtatacatttctcttcctctttaaatgatagctctttatcattaggaggagaaatgctcacatctacaactcgttctatttgaggacccat

SEQ ID NO: 72221 - DNA, 1014 bp, Oryza sativa
  Clone ID: PAT_MRT4530_72620C.1
ggctgcaggaattcggcacgaggctcagcatcgccggcgaagtgaaccagagagagtcatccatggaggtggaggaggcggcgtacaggacggtgtggtcggagccgccgaagaggccggcgggaaggaccaagttcagggagacgaggcacccggtgtaccgcggcgtgcggcggcgcggggggcggccgggcgcggcggggaggtgggtgtgcgaggtgcgggtgcccggggcgcgcggctccaggctgtggctcggcacgttcgccaccgccgaggcggcggcgcgcgcgcacgacgccgccgcgctggcgctccgcggcagggccgcctgcctcaacttcgccgactccgcgtggcggatgccgcccgtccccgcgtccgccgcgctcgccggcgcgaggggggtcagggacgccgtcgccgtggccgtcgaggcgttccagcgccagtcggccgcgccgtcgtctccggcggagaccttcgccaacgatggcgacgaagaagaagacaacaaggacgtgttgccggtggcggcggcggaggtgttcgacgcgggggcgttcgagctcgacgacgggttcaggttcggcgggatggacgccgggtcgtactacgcgagcttggcgcaggggctgctcgtcgagccgccggccgccggagcgtggtgggaggacggcgagctcgccggctccgacatgccgctctggagctactaatcaaaatctcgcactgaaaagtgtggacaaattttgattctccagaaattgggggaaaaaagagaacagagtattggtgaatttagaacagagtaggcaatgagactgaggatgaatggcaatttttgtaattttggaatgtgccagatttctccctccttttgtgattccatctgattttgaatgtgcagtcaatgaattcctgtaaatttacttctcctctccaaagagctattttggtcaagttcttcaatgattttatggattttggatttacgttaaaaaaaaaaaaaaa

SEQ ID NO: 72222 - DNA, 290 bp, Oryza sativa
  unsure (1)..(290): unsure at all n locations
  Clone ID: PAT_MRT4530_72621C.1
gttcatgtacgcatccagcagcgtaatggccgtaagagcctgaccactgtncagggattgaagaaggaattcagctacaacaagatcctcaaagatctcaagaaagagttttgctgcaatggtactgttgtncaggaccccagagcttggncaggtcattcaanttcagggtgatcagaggaaanacntatcaaattttcttgtttcaggccggcattntgaagaaggaacacatcaagattcatggtttctgagcaactgccaaaaccatttcaaagnctatagttttg

SEQ ID NO: 72223 - DNA, 151 bp, Oryza sativa
  unsure (1)..(151): unsure at all n locations
  Clone ID: PAT_MRT4530_72622C.1
aaaaaaatnaaanacttatttggaggaagggaaaaaaaaaagaacgcttttatcccagtactggctcaagttctcaatactggttttcaaatttggtttttgcttggccaaaaggggaagccccaccttttacaacacttttggggatttt

SEQ ID NO: 72224 - DNA, 183 bp, Oryza sativa
  Clone ID: PAT_MRT4530_72623C.1
atggaccatgcggcggtgaagggcaagcaatgggcttggcgccgaagaaccaaatccagtggtaaagggcgggtgacagctttgtcattgttggaggaggttcatctcaagcgaagccaaaagacgaagtcaagagggttcgccaccaagctcggagggctcaccaccaagtttcccctctag

SEQ ID NO: 72225 - DNA, 1067 bp, Oryza sativa
  Clone ID: PAT_MRT4530_72624C.1
ggccgcttttttttttttttttttaactgacatgagaccattccctaacaatctgttatcagggagaagcacaaccgctgaacaaggtgtgccatgaaatcaggctaaaaagcctctttatatagatttccgggcagcacagctagaagaaatctcatatggatcgtaaacgctttgtcaaacttagcaaacaaattcagaagttatgatagatttctacaatacatgctgccgtgcaaagtgcaagtgtaaaatataatgcacagctatctcatgtagcatccagccaagtcgaaccagaatcacagtcacagaggaaagaaaagaagggaaatccagacgagcaaacaagcatcatgtgagaactgagaaactatccacgaaatcgtcaagtcagtcatcatccttgtaggggtattcctctgggacttgcttggtaagcttcactcgcatctcgtaggcatcatccccacgaagcatatcacggacccatgtaacctctgtcttcatagaaaccatttccagtgcacccctaataactccacttagcacattgcagtactgaagaccttggcaagtatcaggaagttcaacaaaatctacaagaggattgtcctccaatacaaagctgcagcttgtaccctcagcatcccaattggtgacagttgcagtcacacccaagaacattttgaatccaagctttgcaatgacatcggcagtctccttgaagtcaacacaccttgatacatttgatttggccaggaactcatcaaccaaccgagttccaatgttgtagcccatctgatcaagctgcttgttgacctcctcgacctcctccagatccgtgagcagctgcctcacgatggccccatacgtgagcgtgaacagctccgcgttgacgcgctcgacgctgccgaagagagcgtccccggacttgggccccgtgagcggcggcatctcccggatcgcgcggcgcctctcgccggcggcgaccggagctcgtcggcggcggtggtggtgatgcggaggagagagagagagagagatcggggcccggaccgcgtggg

SEQ ID NO: 72226 - DNA, 366 bp, Oryza sativa
  Clone ID: PAT_MRT4530_72625C.1
atggaagatctagaacgttactccggtggaccacttctttctatcccacgtcaacattcttgggactctagttctttagcttctccatgggtggtggagtattatgtctccgactctgatgaaggaggagaagaagaacaagggcaatgctgccaacattgcaatgaggtaagtggtagtcatttgccacggtggagtgagtcatggtctgatgaagattttgaccaagagaaggatgcattgatcctagtaatcagcgcaaacttaaatgttattgcgttcatcgctgaagcaaatgcagttttactgcatgcagctggtagggaggcatacacgattgacatcgagaccaaacacgtcaaatag

SEQ ID NO: 72227 - DNA, 523 bp, Oryza sativa
  Clone ID: PAT_MRT4530_72626C.1
ccacctctcttcgagtacggtgaaccgtcttatctggcgttggacaagcgaccagcgttatttggctcgctccgtttaccatgctttcttccttggctagcgaccctctgctcttatctgctttggcgggctaaaggccccgctaaatgcaaattcttcctatggcttgtgcttgtgttccagtaccgcagttggatgatcgatcttctacaaaaagcgtggcattgacagtcactcggcctgccctttttgcacccaagagattgaaacggtgaaccacatttttctcgtctatgtgttcacctgttaggtctcgcaccattttatgtctcctcctggcttgccagaccttgcatctccccgtggctgcttgctccaggtgtggtggccgacctctagggcttcgatttgttaatcctgtcggtattctggtaactgtgaaagtagcggaactccagagtgttcgactatctctctcatcggtttcagtggttttggagtttatccttaggaaggttgcctg

SEQ ID NO: 72228 - DNA, 283 bp, Oryza sativa
  unsure (1)..(283): unsure at all n locations
  Clone ID: PAT_MRT4530_72627C.1
ccccacaatngtagacgtccttctgnggtatgacccagncaatcgcgngccgcacggtatgtcgcancgcactcggcncnatgtcgtggccctgtttacacccctttgtttatacccgggccgccttgacggcattgcctatttaattatttctcctttttatgtgtttctctttgtgtctgtgtatcagattcgcgcccaaagccatagctgggcatgacaagtttttgttaataataatataatataaagatatgggcccaaaaaaaaaccancagaaaga

SEQ ID NO: 72229 - DNA, 465 bp, Oryza sativa
  Clone ID: PAT_MRT4530_72628C.1
agctgggatcgcgggaaaacccacatgaggaatttccaagaagacaccttggagggtcccacccaaagtgactttgcttgggaaagctacaaggacctgtcaagttgctgttggttggtggagacgcaatcgcaatggatggatggccggcttgggtgtttgcctactgacaaggacggagccaccgacccaacctggcctgttacttgctctgcatgggctggaaggagggtccaagtgctgagcggttgccttctggctcgacacctggatgtttgaatgctgaatgccacgtccccgggtgatgttgttgggtgctgagtgctaatgggttggtgcacgttgactgcgttatggtccacatgttggtgtcggaaacaactatcgtttgcttgttatggatgttgagatgagtcccttttaaaaaaaacctccggattattggaaaaaaaaaaaaaaaaaaaa

SEQ ID NO: 72230 - DNA, 418 bp, Oryza sativa
  unsure (1)..(418): unsure at all n locations
  Clone ID: PAT_MRT4530_72629C.1
cgatacaacnaaagacctatcttccttccccgccgcccaggcatccgcctccgccccgacctccccgctccccggcagcgcctgctccggcgccgccacccccgtgcgactcaagatgcggctcccgagggcgcaggtggagaagctgatgggggagagcaaggacgcgtccgaggcggccgccaagatcatggagctctgcgccgccgcgggcgccaagagcgccagcgtgaccccggagaggccgcccgggatcttgcggagcccgcggttcgcggcgacgccggagtggggagccgggttcatggtgccaccgccggcgcccggagcggccaagacgccgcagaggtggccgacgctgcctcgcaccaaggaggtgacgaattactgcgtccttctctccatttgcactacataa

SEQ ID NO: 72231 - DNA, 202 bp, Oryza sativa
  Clone ID: PAT_MRT4530_7262C.1
acggacacaatgattacggatcacttattcattatagagctacaatgctgctattccatagaaaaacctttgagacacaataaaactagagttaaggatacacattacagggaaacagcacacattgaaacgggacacgaccaaggtaccagacgagacaacaatagcgtccattggggtaagagcaaagaggcaacacttg

SEQ ID NO: 72232 - DNA, 1823 bp, Oryza sativa
  Clone ID: PAT_MRT4530_72630C.1
ccggccggggaggccgcggctgctgctcctccccctccactgattccgcccttcctccaatggccgccgcctcctcctctgccgccgcctgcttcctctccccgtcccctcctccccccccgcgccaccattccatcaaacacctggcgtgcgccgcctccaggtcgccgtcgccggggccctcctcctcccgctccctcgccctcccttcgccttcggcttcggcttctccgtggccgtggccgcggcggctccgcgacctgctccccgacgagaccggccggatcctgtcgtccgccacgggctccctcatcgtcgccctcgcctcggccgcgctgatcctcggcgacgccggctccgcctccgcgttcgtcgtcgccacgccgcggaagctgcaggccgacgagctcgccaccgtgcgcctcttccaggagaacacgccctccgtcgtctacattaccaacctcgccgtgaggcaggatgccttcacgctggacgtgctcgaggtgccgcaggggtccgggtcggggttcgtctgggacaagagcggccacatagtcaccaatttccatgtcatccgtggcgcgtcagatctcagggtcacacttgctgatcagacagtgtatgaagcgcaagttgttggatttgaccaggataaggatgttgctgttttgcgtattaaagcaccaacagataaattaagacctgtaccagctggagcgtcggcagacttactggccggtcagaaagtatttgccatagggaacccgtttggtcttgaccacactcttactacaggagtcatcagtggattgcgtagagaaatcagttcagctgcaacaggacgccctatacaggatgtgatacaaactgatgctgctatcaatcctggtaacagtggtgggccacttcttgatagctcaggaaacttgataggtgtaaacactgctatatactcaccttcaggagcatcatccggtgttggcttttccattccagttgatacagttggtggtattgtggatcagcttataaagtttggtaaagtaacaagacctattctagggataaaatttgctccagatcaatctgtagagcagcttggattaagtggagtgcttgtcttggatgctcctccaaatggaccagcaggcaaagcgggtctgcaatcgaccaagcgggattcctatggtcggcttatcctaggggacataattacttctgtgaatggaacaaaggtaacaaatggaagcgacttgtataggattctggatcagtgtaaagttggagagaaggtgactgtggaagtattgcgtggagatcaaaaggagaagatacccgtgattcttgaaccaaagccagatgaatcataatagtaagccacctccataggatccactctactgtttgtatgtccacatagatgcagaaatggaatatatacaagaaattagcattttcccctaccacggaattcgctgtacataattcatgcttgtaaattttctggcaaaaaaagaaaatccaatttggcttaaatccttgtcattcatgcttctggtgtaaccgcctcagtagagacgtgtcatacgtgatgtctctgttttcctgtattttggtgaggaccatgtacagcagagactatatagtagaccccacactgctccgtaagtctacttaacctggcctaccgtatttaccctgcattcatcactgggccatttatgaaaaaaaaaaaaaaaaaaaaaaaaaaaaaaaaaaaaaaaaaaaaaaaaaaaaaaaaaaaaaaaaaaaaactcgagactagcctcgtgccgattcct

SEQ ID NO: 72233 - DNA, 166 bp, Oryza sativa
  Clone ID: PAT_MRT4530_72631C.1
tctctatcacaaatacctgatgctgccactggtcaaatggcaggagatcttataggcatgacgaccggagctggctacacaccaatgctcaaacacccacagcgggacctccactgtagaacgacgacgctgctcatgacacgaggggcctatacaagtctgtcct

SEQ ID NO: 72234 - DNA, 222 bp, Oryza sativa
  Clone ID: PAT_MRT4530_72632C.1
ctatacggaggagtgcacgccgcggtacatcacggtggtacgggaggagctcatggcgcggaggacgctgaacgcagcgaggaggaaactggcgcagctagggagatcactttcaatggcgactatgaggcaagctccgtatacgatgacgacgacgttaaccaatatgacaaagttgagcaatcgtatagcatggattgcatatttgttggcaccaactat

SEQ ID NO: 72235 - DNA, 187 bp, Oryza sativa
  Clone ID: PAT_MRT4530_72633C.1
tctgctgccactgtacgctattcccagccgtcggtggtatctggtactgaattgtaccagtgatagtgagtataggagacccaatatattaagtcatggcatcatcgtgtgtgacacagttgaatacatcggggtgataccaaatctgaataaaaattcatcaatttaaaaaaaaaaaaaaaaaaaa

SEQ ID NO: 72236 - DNA, 2358 bp, Oryza sativa
  Clone ID: PAT_MRT4530_72634C.1
aaagcccaccacccccccctgttaaactgaaaccccagccttttaaaggatgttcattttggtagctttacctgatacatgctcaaggctcttttccctacttatctattccatcctgtcatgcttcagtaagcgcaataggagaattatgggatacctcaacatgtaatttcaaacaccatggaaccatgtgatttaactaccgctgaaatctcttcctccacacgaccgaaattcctcccgctccaaacttcagtgcagctgcacgtgtcttttcttatgaatgtactcccgagaaccttttccaggtctgatattctcgcggttatcttcctgctcatggagtcaaggttgaagaacgccaggtatatttctcctttactcccagttgctatccatgcacgtgctactgctcctgtagttacaactcctttattgttggattccaccgtggcacataatcttgagtaactgctaatgaggtttcctttctcattcagctcccacatctgcatagcatgccacctgcaccttgaaaacatgggaaacttgctatctgaggatgtcctccgttgactgccagatgcatccagacaagcatcgtcactgtccatatttgccaggtgaaactttgtttggtattcttcattatgtacgattatatcatccgatgtcaggagaggaattgttttgcccaggcaaaatgagatatttttgtcatcctgcatcccatagttccatccatttgctttgtcatcactgcaggcagtgagaccaagagatacaccatcaatctttggtacgtgtacaagatcttcggatatgaaacgactagaatgcttgtcttctttggaagtcctttcactgtgcacatgatggaactccatattatttatgctgtagtgatttattttcagtaatgtaggatttgttattatgcttaacgtgtcattgtcgagatgcctcaaatctcctccatacattagaggagacttagccattgaccaaagtgctatctgtgttctctgttcatcagatgtaagttcacattgcctatgtggaccctgattgacacctgcatttgtaagccagccaaatgggagcatgtctaaatctggccaagatcttcctcgtaatcctatggccccaattttatttgcagcagcaaaggaactagacacgtcaaaatgtgaactaacatccttccagttgtcccaatcatcccctgttatcctgtacatgttaacatgttgactgatgtttttggctaatgctggagtcacttcggttcctggtgagatggacaggatgatggggcggtcaagctctgccaagagctctgaaatagttatgatttcttttgggctgtaatccgtaccgaagatacaatcaaccttcacaaaatcaacaccccaatcagcgtactgttgataaagagatcttaggaaggcctttccagctccaatatcagtatttacactcataaatccatgtggcatccatgcacatgttctatgtgtaagacctatatcacgagctgtccattgccggccatcctctacgtagggttttcccgttttaatgtccaatatgggtgtgtttccattcacagcctgtaaacttatccctttcattaaatggattccgaatttcaagcccattccatgcaccttgttcgcaagttgactgaaccctttatcaattctggatgatggaaatctttgaagatcaggaaatggccgaccccactcatcaatgttatcaaatccatatgaatctgtgtatgccccatgaacatactttcggtaccagaggtaatcaataactgcaaactcatatccatgtgggagcaatttttctgccaagatctccgcattttgcatgtatgtattttcatcaactatccatgaaaaggaatcataggaattccagcctcttggtggaaactcagcaagttgttcattagcctcggaagtgccccatagtcttcgacctgccaccgccgcgctatcgagctgccgtcgagccaccgtgctggatctagagagctcggtggagggagaggcaaccgccaccacgagttgtcgagctgggcttgagcggcgtgcgatagttgagaggcgtaggtgaggagggggagctgccgcggtagtcagggaagggagctgcccggcgatggtggggaaggagagttgccccgggttggatccagttgccctgctgccactctgcccagcgttgtcactgcttcggccacctcttccacccgggtgctgtcgccgagaaggacgtgtcgagccgccgatgttccagatccgccccaagatcctcgccatccacgcacgcacgtggtgctga

SEQ ID NO: 72237 - DNA, 198 bp, Oryza sativa
  Clone ID: PAT_MRT4530_72635C.1
aaaacacagtgacacacacaggcattaattaattacaacaagttttccatgatacaaatataacttgggcacttgattattttacttgccttttattaaaaaatgcttccttccttggttggttttttttttttgggttttttttggttggaaattttttggaaatttattcaggcgacgtttattttttttaaaatt

SEQ ID NO: 72238 - DNA, 350 bp, Oryza sativa
  Clone ID: PAT_MRT4530_72636C.1
gccaatcattttttacgcatccatccacacgttcgcctttacctctagaccgtagatgaggatctggaagcacgcggacagcggacatgtaccatcgtttgctgcgttatacgcacgcaaacgggtgggatcattcccactccataatgatctgagaatgcggccggggggactgcccatacgctaggatgctaagagcagagcactaaaaagagagcaaaatattggcaaagccttgtactgtcttccgttggttagctgtccgggatgcaaggtgcaagatgacatatatctgccagactcgggcaaacccaaaaatgtatgacacgactagcttctagatcttgaat

SEQ ID NO: 72239 - DNA, 1011 bp, Oryza sativa
  Clone ID: PAT_MRT4530_72637C.1
atgtcttggacaaagcccatgtcctccctcctatgcaccatcctctcccttgttcttatccttgaagctttcacaactagccatggcgagttcgtctaccatggcttttctggtgttaacctcacccttgatggaaatgccatggtcacaccagacggcatccttgagctcaccaatgacacaattaatctaggacacgcattttatccaactccacaaaacttccgtaaattttccaacagcacagtgcaatcattctcactcagctttgtgtttgcaatcctctcagtgcatgatgatataagtgcagatggcatggccttctttgttgctccaagcaagaacctttccaatacatgggcacagtatataggtctcctcaatagtaggaacgatggcaacagaagcaatcacatgttcgcggtcgagcttgatactacccaaaatgatgagttcaaagacatcgacaacaaccacgttggaatcaacatcaacagcctcatctctttgcaagctcaccacactggatactatgatgataagagtggtttcttcaacaacttgactctgatcagtggcaaggccatgcagaatatgcaacagtgtcgctcgctgcgtgctgccgtggaaggcgtcgccggcgaacctgatagaccgcaatgctcagaggtttcagcacatccgtgctcgcggcggcgtcaggacactggatcggacgctgaacgatgcatgcggcatgcccgatctgctagctcaggatggtggccggcgactgtccgcacgctctcctgcgggcatgacttccacgaggattgcaacatcgcgaagtggctccgtgacaacaagaaggcctgcccagttcattctgcttgtaatattcagttgtatgaggagaagggccacccttggtcgctggagggggaggagatgtcgatcgcgctggagatgatggaggcggagagggagatggacaagcgacgaagtcgacgatggatggggtcaggcgcttga

SEQ ID NO: 72240 - DNA, 442 bp, Oryza sativa
  unsure (1)..(442): unsure at all n locations
  Clone ID: PAT_MRT4530_72638C.1
gactagttctagatcgcgttcggtccanaaaaaaaaaaaaaaaaaaaaaaaaaaaaaaaaaaaaaaaaaaataaaaaaaaaaaagagataccaccggagggaaaaaaaagaataaagattgaaggagggtgatattgaaaaagaaataggggtgggggggggtggtttatagggttctaggtttgggggggggggaatggaaagtttttgttttgttttggggaaccctaattgttttgcgggggcgggggttttaaaatttggggagggggagaactttggggtttctaaatttattgggtttttgccaattttcctttttgctgtttggggaaaaaaaaaagagcccttagcgggttgtcctttataaagattggcgaaggtaaaaggggaaggggccctgcctttgtcaggggcctttagggggggggggggggggggt

SEQ ID NO: 72241 - DNA, 3588 bp, Oryza sativa
  Clone ID: PAT_MRT4530_72639C.1
atggctaaaaagccaataaagccgtcaaaccgatgggactctcggtggcgacgcaaaccttttgagaggggagggggatttgctggcggggaggagccgagtagggagatgagccgggggcggtcgccggagccgctggatttcttcatctggacagtcgaggatgttggattatggcttgaagagataaaccttggcagctacaggcaagtttttgaggaaaacggtgtcaatggagagtatcttgaaagcctgtcgatgtttactacagaacagattctgcggtttatcaggaggtgccatatgaaatggggagatttcattacattgtgcaaagagttgaggcgcatcaaagtattattgtgcaagcactttaggaataatggggatgaggatactagcaaaagtggcctgcctgaaaggggagcaagaagtccgcaggccatggtgggcgccgtcatgcctatcggtggtgttcgtgagggcggccaagcggaaccggcagtcccgagtcgtctccctgaagctggagccctagtacccatccaccgcctcaaatctttgcgcattcgccgttctaccccgccttccagctcctcttggtggaggcggcactgcaaccgcacaccgttgacctggcccttgggcgtgtacattgtatctgtacaatgtagcaggagtacacgtgtatccagaaccttctgccgtatccaagcaagaggagtagcggaggagatgctcggggcctcgaggcgttccgtctgcaccgccgcggcggcggcggcggccgggtcacgccgccgcgccgccgccggcgtcgcctccgccgtttccggggattcctccgtctcgtcttcctcggcgcccccacgctcggtgattaatggggagcctggtgtccctcagcttcagaagaggttgctctctgtgcttgctgcgcccaagcttaccgggaccgacaatgctgcctccctcaagctgagggagggttcccttgttggcaggcgatatgaatcgagtgctgcagcagttgattcttctgatacgccacctgtggagaagcatgagtaccaggcagaggtcaataggctcatggacttgattgttcacagcttgtatagcaacaaggaggtgtttcttcgagagcttgtcagcaatgcaagtgatgcacttgataagttgcggtatcttagtgtcactgatcctgatcttataaaggatggtgctggtcttgacattcgcatccaaacagataaggagaatggaataataacaatcactgatactgggattggtatgacgaggcaagaacttgttgattctcttggaactatagcgagcagtggaactgccaaattccttaaggcactaaaggagagccaagaggctggtgttgacagcaacttgattggtcaatttggtgttggattctattctgcgtttcttgtttctgataaggttgcagtgtcaactaagagcccaaaatctgacaagcaatatgtttgggaaggcgaggcagaatctagttcttacaccattagagaggagacagacccagagaagctccttcctaggggaactcgccttactctgtaccttaagcgtgaggacaagggtttcgcacaccctgagaagattcagaaacttgtgaagaattactcacagtttgtttccttccctatttatacttggcaagagaaaggttacacaaaagaggttgaggtcgatgaacctgttgaagctaaagaaggcgacgatgagactaaaacagaggttaagaaaaagacaaaaacagttgttgagaagtactgggattgggagcttacaaatgaaacacaacctatatggcttcggaaccctagagaggtatcaactgaggagtacaatgagttttacaagaagacattcaatgagtacatggatcccttagcatcctcacactttactacagagggggaagtagaattcagatctattctctatgtgcctgctacaaagaaggaggatataactgataggaagaccaaaaatatcaggctttatgttaagcgcgtgtttatatcagacgactttgatggggaactgttcccaagatacctgagctttgtgaggggtgttgttgactcaaatgaccttccattaaatgtttctcgtgagatcctgcaagaaagccgaattgtgcgtataatgagaaagaggttggtgcgaaaggcctttgatatgatacttggcatctcttgtagcgaaaacagagatgactatgaaaggttctgggaaaactatggcaagttcttaaagctgggttgcatggaagacaaggaaaatcacaagagaattgctcctttgctccgattcttttcttctcaaagcaatgaagaattaattagcttggatgaatacgtggaaaatatgaaacctgagcaaaaggacatttactacattgctgcggacagtttgagtagtgcaaaacatgctcctttcctggagaagctcaatgaaaaagagtacgaggttctatttttagttgacccaatggatgaagtgtctgtcacaaatctgaactcctacaaggataagcgtttcgttgatattagcaaggaagacttggacttaggtgataagaatgaggaaaaagagaaggagatcaagcaggaatacagccaaacatgtgactggatcaagaaacgcttgggtgaaaaggttgctcgagttgatatatcaaaccgtctcagctcatcaccatgtgttctagttgcagctaagtttggttggtctgcgaacatggaaaggttgatgagagcgcaatctatgggtgacatgtcatctctggatttcatgcgttctaggaaagctgcctgcagagccaaccctgatgacccagaagctctaaaggctgtagatatcctgtttgaaacttctatgatctctagtggctttacacctgacaaccctgccgagctaagtgggaagatatatgagatgatgagcacagctatggccagcaagtgggcctcgcacgctcaacccgctgagatgaacctgcagcgagactcacctgtcagctctgagccgattgaagccgagcttgccggcgaccacggggaggagcttgacggcagaggaaacgagcttgagctcgccgacgaccacgtggaggagcttgacagcggaggaaacgagcttgagctcgccggcgaccacagggaggaacttggtggcagaggggatgagctcgagctcgccggcgaccacggggaggaacttggcggtggagggacgagctcgagctcgccggcgaccacggggaggagggcgatggaggagacgagctcgagcttgccggcggcgttaggcacagggggagggacggagagcggcggcggcgcgtgggacgagctcgagctcgagctcgccgatggagtcaggcgtgggggcaaggagaggcgaagagcggcgggccgacggcgtcgggcgctggggttgggtagcggcatcggtcactggggtggaggcgcagagcggtggtgctggggtgggggagacgaggagctcagccgccaccaccagggaagggggaagggaagctag

SEQ ID NO: 72242 - DNA, 148 bp, Oryza sativa
  Clone ID: PAT_MRT4530_7263C.1
gaatagaactaacaaattacgtaacggctgtcaagtttaatactagtagcagcagaggcagcgaaataagctgcggtagcaataacgaatttaactgtttcaatggttaacccatgaacagcaaacaccgaaggtgccggacgcgtgg

SEQ ID NO: 72243 - DNA, 288 bp, Oryza sativa
  Clone ID: PAT_MRT4530_72640C.1
gcacgaggccaccatccagtctccttctctctctccacatctcgggacaagaaagccatcgaatccgagatcgccgggcggggagtgaggtaagcgggagcccatgtctgggaagatgctggggaagcggcagaggagccaggggaccatgcaccggacgaccagcatggcgtcggtgccggcggcggcgaagcaggggcggcgccatgtggtggaagggccaccacgggcgccgcccgactccctgctcgctggaggaggccccgccaccgccgccgccgccgacca

SEQ ID NO: 72244 - DNA, 2781 bp, Oryza sativa
  Clone ID: PAT_MRT4530_72641C.1
ttttttttttttttttttttagagcaggacgaatataggtggaattttatactaatacttgatcatgttttacttgcgcaggagataagtgagcaatggaaaaattggagagcaaaggattgtttcaaagtaattgttcctagcaaagaaaccattattcctaacataacacaatcctattggtttaacacacagctcattgcactggccgctcaaccaaactgaaaaaaaaaaatctcagcgtttcggcaacaaaattaagctacaatattctgggaggacggcataatcgtatgaaatggatccgaaaaagaacctaaggtttatagaacttgagggaaaactcgacgattcccttatttcttctggctatcgtccaccaactccggctcaatcacctcggcttcaatcggctcagagctgacaggtgagtctcgctgcaggttcatctcagcgggttgagcgtgcgaggcccacttgctggccatagctgtgctcatcatctcatatatcttcccacttagctcggcagggttgtcaggtgtaaagccactagagatcatagaagtttcaaacaggatatctacagcctttagagcttctgggtcatcagggttggctctgcaggcagcattcaagcccttgatgatctcatgctctgggttgatttcaaaaactttcctagaacgcatgaaatccagagatgacatgtcacccatagattgcgctctcatcaacctttccatgttcgcagaccaaccaaacttagctgcaactagaacacatggtgatgagctgagacggtttgatatatcaactcgagcaaccttttcacccaagcgtttcttgatccagtcacatgtttggctgtattcctgcttgatctccttctctttttcctcattcttatcacctaagtccaagtcttccttgctaatatcaacgaaacgcttatccttgtaggagttcagatttgtgacagacacttcatccattgggtcaactaaaaatagaacctcgtactctttttcattgagcttctccaggaaaggagcatgttttgcactactcaaactgtccgcagcaatgtagtaaatgtccttttgctcaggtttcatattttccacgtattcatccaagctaattaattcttcattgctttgagaagaaaagaatcggagcaaaggagcaattctcttgtgattttccttgtcttccatgcaacccagctttaagaacttgccatagttttcccagaacctttcatagtcatctctgttttcgctacaagagatgccaagtatcatatcaaaggcccccacgcgtccgcggacgcgtgggcggacgcgtgggcgccacgccgccaccactagctcgcttcatttccaccgcacgcacgcacgcacgtacgcgcgccgcgccggctccctcccgccacaggtacgcgcggggtaccggcggtgtgtgtgcgtgtacgtgcgcgtccggcggctcgcacgcgtcgtccgtccgttgatgaggcccgcgcgccggggctggggagtgggtgccttggcgcgggcgttcctggttctgctgctgctgctgctggccgcggcaacgacgacgacgatcggcttcggctgccgaggcgcggaggccatccgcgtcatcccgccgcacgggccggcgccaggcagtgcgaggagtagccggggccacggccatcgccgaagccatggcaacgctgcccgggtggtggatgctgcaatgccggtggtggggacgaggccggtgcccgcgctgtcgccggcggcggacgaggagagcaagcgccggatcccgagctgcccggatccgctccacaaccgggctgactgctgctttgctggtgggagttgcggctccctcgacacggcattaaatgcgcacgtcttccgtgtggccggaaagagtcgagagcgccgtgctgcgacgcgacggcgagtgatggatgggacgggtggcgatggacaggcggatggaccgatgggggcgcgtcacgccgtcccgccggggccggcctctccgtttacctgcccaattttcgctggacagccgggggttttcatgtgcacggcccacggtgtgacccggtctgactctccgtcgtcagcgaccaccgaccatatgcgcggcgcagtgccacgcgccgattcggtggctgcagtgggcagcgagactctacgtcagcgatgcaggaagttggtggcacggctgggatgtagggccgacaatgccatcgaaccagctcgacgggccgaggaacaagagggtcaagagaaggaacaagagggagaggaggagggagatgatgaggaagaggaggaagaggagggggagggaagacgaggagcaagtggagctcgggccctcctagctataggacacaccacagttgtcgcagggggaggggcatctcgaccacagcgcaagagagcatctacttatgtgtggagcgccaaacataatggcattgagatcatggggttcaacgacatttcaattggtgccgagattagccagagaatagacatgcgggtcaatactccccacgcacgtggaggacttcggtggggaccacccaagggcggccacacgaatcgcttccggcccaagccgtggaccacttttcaatctaggcataacggataccctcatctcaatcgagcggtaagccccatctcaatcgggcacggcgctcgtcacaggctagaagtcactgatgtgaaaagtaatctcaatcgggcaaatggtcgtcac

SEQ ID NO: 72245 - DNA, 405 bp, Oryza sativa
  Clone ID: PAT_MRT4530_72642C.1
gtttacttcgggcgacaccttcggggccacacggaaacttcgggtcataggccatattcccacatgaagatggctatcccgggttacagcatcacatgggcagagatcgacgagttctggaggagaaaggagatggaagacgaggagcacagcctcaccgacgacaatgaagctgcaggaatcaaagccaccacactaatggtcagcacttattattattgatcaaatcgtaatctgttgcattaccaatcactatctggcactctgatctcattgaccagctgagggttaagctggttatcagtaaaaacaaagtacatgatggggttcagcataaggaatcaatggacctatgtaacgcagttaatatcttggatgcaaatacaggccacattatcctaccat

SEQ ID NO: 72246 - DNA, 375 bp, Oryza sativa
  Clone ID: PAT_MRT4530_72643C.1
atggtggctgccactcctacccaacgagtggggacgccatggccatacgcacgctggtccctcgggggaagggacgcctccgctcactcgcttgtgcttgtgccagcgcgcgtgctgtgctcagggaaaggaggagagacatctctgcaacgacaccatccaccgcgcacactagagcaggtagggactgccgatggcgaccgcagccacgcgaacttcttccatacccatgatgacatggacgcactccctcacctcctacgcgatgacgtccacatggccactgcccgcccatccgaggccacacccacgcggtgccgcgccatccagaaagcaagcaagcagcaggggagaaagacttatcatgcttggtag

SEQ ID NO: 72247 - DNA, 1620 bp, Oryza sativa
  Clone ID: PAT_MRT4530_72644C.1
atggtcgagctcaaggcaccaggccgaggaggagatcacgagacgagagagaggcagagcaatcgaagccccacgccatggtcaagatcaagatgcccgccctgttccgccgccggagcggctccaagtcgccgccgctgccgcaggccgaccccgcgtccggcggcgggtccccggcgccgacgccggaggaggagatggagcgggtgttccgcaagttcgacgccaacggcgacggccggatctcgcggtccgagctcggcgcgctgttcgagagcctcgggcacgcggccaccgacgacgagctcgcccgcatgatggccgaggcggacgccgacggcgacggcttcatcagcctcgacgagttcgccgccctcaacgccaccgccagcggcgacgcggccgccgtcgaggaggacctccgccacgccttccgcgtcttcgacgccgacggcaacggcaccatctccgccgccgagctcgcccgcgtcctccacggcctcggcgagaaggccaccgtccagcagtgccgccgcatgatcgagggcgtcgaccagaacggcgacggcctcatctccttcgaggaattcaaggtcatgatggccggaggcggctccttcggcaagatcgcctaggatcaatcaaccaaccaatttcttcccttctcctcatcctcctcattgaccaactcctatccatccatccatccgagcgtgccgtgtgcggtggaaattttaagtgtatatacaaccgattaaaagaccactaggcctagattctttctactaataattgctataccaaaagttcgtcagcttcgcgctggaggagacccgactccggaccaccctcacccctcacccctcccagtatctatcagagctatgtcgcccaatagtggcagctagcttcaaccatgtttctaagccctgtctcaggctgtcaatatttctgtctcatgtaaatgaaaagttcaagtctataaaacccaatgatgataatacagttttcaatgctctctcattcagtgcaccgaaaattagattgcttcgcagcttgacaatcgagaagaaaaactcatatcaggttcttgactttgccgctttctctgaacctgaatacgatcttcctatattttgcgccaacgtttttacaactcatgcacaaagtattgttgtattggacctcaatcctctatatgatactacagtgcacaaggattacaaagataagtactataggagtataatgcctcttgtacacaagtataacgaggtctggcttgaattaatggaccaagcaattaaagaaaataacaaagcaacaattgctcgtaaccaagaagaacaacataaatatctcacatggagggctgagaaggatcctggctatccccttttgaagaagttaattggtgaaagtcgtgccgaggatctggtgatggagtttctgtttgaaggagtaaatactcttggaacaaaatcatttctggattatttccctgaatacgcccgtgatgatgggtcagtgaacaagaaaaggagtatgatcggcaagtcttttgaaactaggccttgggacgccaatggagaattcattggcgatgccgaagcacagtaa

SEQ ID NO: 72248 - DNA, 5173 bp, Oryza sativa
  Clone ID: PAT_MRT4530_72645C.1
atgtacagctcatactccgccgtcgccctcgcgctgagggccgccaagccgtcctcctgcgcccactccacttaccaccaccaccaccaccaccaccaccacggcgacggcggcgactgccaccagcaggagctgctgctcccgctgaaccctcgcgccgccgcggctccccgcttcatgctcgacgggtacctcctccgccactcggctcacttcctcctcctctccgctcggctccgccctcctcctcctcctccccgctgctgccaccgccgccgccgagtagccgcccgctgctgctgctgcggcggcggcggctccgttgctgggcacgtctcttggcgactggatccgccgcgggtgtgccgctgcagcgggcacggcgctgggaggtcgtcggatcttggagcggtttaccggcggcgacttgagtgccgctgcggcggcggtggtgggaggttggatctcggggcgggctgcgggccgcggcgggatgcgccgaggctggtggggagggcggtgaggcaggaggtgtgggagtacgagggtggcgagtggccgcacacgagctgttcgatggaatgccacacggactggggcgatgaagaggaagactgcggaattgctcagtgggaggcgccgccgaggtttcgtttaagtagaaggagaagtgaagaggatgagggtgacagatgtagggattgtcatcggaggaaggatgcggagagcgattactatgatgaagacgagtacagtggccggcaaagggagaggaggaatatgaatgaaagacatggtaggtttacagattctaaccagaggagaagggaccagagggactaccatgatgacgatgattatcttgaattcaggcgatggaaggagaggagggaaaggagagactctgaatttgatgatgctgttgcaaggagaggaattgaagatagaagatacagcgaggatgacaggaaatacgatcggagaagagaaaggaaggattttggatatgagggtgcagttgatgtcaggagaggagctagtaggtacactgataataaccaaagatctgattggagaacagaggatagggattatgaagttgacgtgaggagagaaggaaagcaccgtagaaatgatgatcaaagatatgttacacgacaccagcagagaactgatggtacagaggaagatgtttcactattggagtcgtatcgttggcatgatgaagaatatgattacgatgatcgagacattgctgagaggaggtactactccgggagaacccagaaatctgcaagagcatctgcattgcatgaggatgaatctaacagggcttcgagctcaaggaacatagttgatacaagggttgcaagaaacaaggagaattcagcctcaagggtccggtggcatgataatgtagacaaacgagctgagcagacatctgaagagagaaaccaacgatattcttcctcggtggttcaatcttttgatgagaagaaacatgaccatgacgatgcacagcttatcagtgtaagggattctaggataggaacacgagatgtcagggttataactgaggatgatgcaaatttggcctctagttcaaagaacactatgatttcaaagcaccacaacactgtagatcagaaatcaacaacacggaaggatgactcaaggaatagatcacagaaaataatggagctgtcagaagtcagaggtaccaacactgaacatgactcaagaacacaaagttatcaccaggaagatagaagaaggtacattgaaaatagggcatcttctcttcaaagttctgtaaagacgactagtgacactagaacacaagttgatcagcatgatgaagtggatcagcaggtggttgcactaactgactcaaggagaaggtctgaaaaactcacagatataaaaatggatagtacttctaatgttagcaggacctctctcaaacagagaaattctgatgaagtgaatcagatggatattgatgacagatctaattccgttcacaatataactcatattacaagagacaaaaagagatatgtaaaccagcaggtaatacatgaaacggacatagatgtgcagaatgtcacacatgttgatgtttccaaagttcgtgcgagtgatatttctgtctcaaggaattcacaaaaggcttctgaaactagatctgatatggcaaatagccagttagaacagatccatgctagtaatagttccatggttaggggtccacaaagttatctggaggctgcactgcacaaccgggtatactcgacttcagctaccgatattgttaacacgacagcggagaagcatggacaagtcgaagctagtaccaacaatgctgctatagcaagtacttctgaaagtcatatccaagcaagaatagaagattcagctgtaaatactattggcagtgtgcaagagcagattgatcttactagaatctgtgctagtgactccacagttgttagcagttcccatggtcttgatactagaagcggtcaagttagcagaacttcagctacaaatcttgttgacaggacaagggagacccgagataagagcgatcagcaaattacacaagcttcaaatatagacagaaatgaccacgtaacatccaaattttatgaatcctctcaggactctagacaaagtctagcaagattgaaagatgctgggagattgatggaacacaacgtgggtttgaactggcagcaggaagagtcaagaagagtttctaatgacatggatattgctactttggaaatgcagagcactgaagacggatcatctatggttcctgttgacgaggagaaaagaccaatgataactggaagcagtgaacaagaagtaaggagtgaaactactgctggaagcagtataccaagtggttcaagtgcaagacagcctgtgaatgaaagcttgttagaatcagctgctcgattagagaaatcatctacatttcatgtcgggcaatttgttggtgaggtccgcaaaggagtgtcagatgcggatactactttaacaaggaaaaatgataagtccataatggaaggtatagcaagatcttcatctagatctagaatggggggaccatcagatgagatgtgggatgtccaaagtgctacttctcaagagacctttaagacggctgataaggaggaaggctcatcagttgatggaggtactacttcgacttctctgacacccaagaatgaaactgctcttgctagaaaagttcacaaatcactctgggcctatgttgcagatatagtccgtcttggttggattcaacgtggtgaatctcttgattctaacagcaatagatcagttaagaaaagttcatcaagtaattctcagaatactgaaggctggatttctagccaggaacgcgataatgaaggcatacagaagaaaactgaaagttctaaaccaaaagatcatctgatgaagtcacacactggagaatcactaaagaaagaaagcttgcctactggttcacaagatctcctaatatcagaatctggtaacgtacctcagataaatacatctaaaggagattttatatccagaacttctaaagaagacgcacacatgacaggagaaaaagcaaaacaatcgaaagtcgctgcatcaccaaaacaaaatactgttggaggcttttctgaggacagcacgccaacattggttgacgttgcaaaaaaacattttcctgaacatgaagcttctacttcatccatgatcacgacaaagggttttgctgacaatgacactggtgaaggagtgatcgctggcacctcttcaatgcccatcagcacagagggagttggttggactgctggttcagatgagtggagatacgatccttcaggtgctatgaccccttaccgtcatcctcatacccaggtaatgatgcctcatgaggataccccagcaatcctagaatcagcagagttgcctacggttggttccacgaggtttgaagagaagattgttgtacaagagactcctgaagttatcagaactgatgggaaagatgctgaattgaagaggagaaagtttcagagaaataagcaggtaatgaaggaaacatttgatgaatgggaggaagcataccagcgagatgctgaacagagaaaaactgatgagttattcatgagggaagcattgcatgaagctcagagggctgcagatttgtgggaggtgccagttggagcagtgctagtacagaatggagaaattattgctcgtggttgtaatttagttgaagatctcagggattcaactgcacatgctgaaattgtttgcattagagaagcttctaacaaacttaagacatggcgcctggcggatacaacattgtatgtaaccctggagccttgtgccatgtgcgctggtgctattcttcaagctagagttgatacggtggtatggggagccccaaacaagcttcttggagctgatggcagctgggttaggcttttccccggtgatggtcaaacaagcagtttggattcagcaaacacaaaccagggggctggacctgtccaccctttccatccgaagatatccataaggcgcggcattctctccgctgagtgctcagaaataatgcagcaattcttccatttgaggaggaagaaacagaagccggagtcgccacctcatgcgcacccccaagggcgcaaccatccagtcaagttcttcagtaagatgcatcacatgtttggcacaatcttctgtttgtagtaacatttccttctatttttctctgctgtgagttacatttcttccgttgattcagtcccctttcttgtgtatttccctatgtgtatgccccccttttctcccctgctttgggttattctgtaatgttagattggaggtaatttgagccgaggaaactgccatcagttttcgccgcctttcatgtggttggttggttaggccgtagtggtaactgccacttccacctctgtaagcacccaattctgtagtggttgttttccacccctcttttttttttctttcttttttgggagaacagaggaaggaaataaattgtgaataagaggccgccattgataatctgcttatttggggattactcattatgccttttttgttcagcttaaaaaaaaaaaaaaaa

SEQ ID NO: 72249 - DNA, 283 bp, Oryza sativa
  Clone ID: PAT_MRT4530_72646C.1
gcgcgattggtttttcttggcttcttgtatgcatcttggatttgatcgattcgatggctgagttgcggacgtcgtggaagtcgatgctctgctgcgtcggcggcggcagggtggccggcgttgaggacgacttgccgccagagaggaggagggtcagagggggtggtcaccaccagcgtgtgctgtcgtcgtcgtcatctgcgtactcagcgtcgacggtgtcgatgttgagactgagctcgacggcgaccttcacgcgctatgacctagtcctgacgctgtc

SEQ ID NO: 72250 - DNA, 579 bp, Oryza sativa
  unsure (1)..(579): unsure at all n locations
  Clone ID: PAT_MRT4530_72647C.1
ggggcagggcggcgcgaggcggcgtgcggcggcaggggcacagctgcgcgaggcggcggcggcggggctacgcgaggcggcgtgcggtacggcggtggggcgcagcggcgcgaggcggcagcggcggggctacgcgaggcggcgtgcggtgcggcggcgcgaggcggtggcgacttcnttcggttgtgcagcgcagcggcggggtcacaggggtacggctgcgcgaggcggcggcggcaggcaggcgtgcgggccgtgcggcggcgatgaacggcgtgcggcgtcggcttgcggttgtgcgggagtcagggagtggaaggtcagtatttttttgttgtctttcttcttcctttctcacttctcaaatctcaaacctagctttagtacatcacattactcggttagatttggtttgaatttgtggacgaagagaagtaggacaaaaaaatgattctatgcgtgcgaagaaaatcattcaaaaagcatggttcaaagacatggcaaggtttagcctttaatttaggccctaggcgtgcgaagatcctgggtccagcactggttggcggctagccgtcatgc

SEQ ID NO: 72251 - DNA, 218 bp, Oryza sativa
  unsure (1)..(218): unsure at all n locations
  Clone ID: PAT_MRT4530_72648C.1
agagaatctctncagagtcaaactctcgnttaaatttnntcgatctcaaccnccaacnatnantcttaancaagttcaagtctgtcangntatcaatgtttttgnaattnaattagttcttttcattagatatnggtcaaagtttcattgtgaaaacngatatatgtgaggcgaaaacactntcgntttacaggatgaaatgaaattgttttgtatct

SEQ ID NO: 72252 - DNA, 211 bp, Oryza sativa
  unsure (1)..(211): unsure at all n locations
  Clone ID: PAT_MRT4530_72649C.1
tttgagcaaaccaaactggtgatggctagatgccttggaggttggctgtgtgtgatgtgtgttgaaaaggatggtcangaagctttgactgcctgtgcaaagtgaccggtggtgatttcttcttttggtagcagtaagataaacgctgcactgttgtacctgtacattacttcgcaccagatggcttccaaatactttttacaaaaaaaaa

SEQ ID NO: 72253 - DNA, 246 bp, Oryza sativa
  Clone ID: PAT_MRT4530_7264C.1
gctccccgggggtcccccgggggattcgaggcgggcccggggagccgcccccctttcctttttctggggtgaatttggaggtgggttcatcatggcacaaggagatttaccggagcaaaaaggttacccgccagaggtcactcgcagtaaacgggccctacattaatattcattggcagggggggccacatgcgtgacgtacctgtctttaaggggggggcttaataatggagttttcgctggggg

SEQ ID NO: 72254 - DNA, 227 bp, Oryza sativa
  Clone ID: PAT_MRT4530_72650C.1
aggggaagcgtgttggattcatccgttgggctgttgctgctcctgcttccatcttcgcagctgctgcagccagtcagagctacccgacctgcctcctgttcatcttcttcctcccatttctcgcacatgccgccgaggcgaacaacaccagctgcaccttccacaacgacgcgtcgacgacgagctccactccttggttggccagtgaagggaagaagaggaactag

SEQ ID NO: 72255 - DNA, 389 bp, Oryza sativa
  Clone ID: PAT_MRT4530_72651C.1
acaccaaaattaaaactgggtctgggagaacatggggaatgaaccttacattaattaaataacaaaaattaacacttaactcacgcccttgacccatgcatctcagatcaaaggatgcgggcaaaatattctacaacactcacataaagactaaaacatattatattcaattgttaaactcaacaacgcatagaacattaaccatgagatcaatcaaactccacataaaaaaaaagattaaacaaggagagaacatttgtcattctcaataacacgttaaacatgctgaactcataaaacttcatgacacaccctggccctaattaaattgatcacacgctaactctgacaggacttggataattgtgttgaaacaacgtttacacagg

SEQ ID NO: 72256 - DNA, 1254 bp, Oryza sativa
  Clone ID: PAT_MRT4530_72652C.1
agccacttcttggccgggactgccgcctgacgctgctgcgggcggagaggaggacgctcgccgtcgcccgggcgtcgtcgtcgtcgtcgtcgtcgtcgtcgcagacggagcccaagtcggagggcggcgaggcggcggcggcggagggggaggagcagccgtacgaggagtacgaggtggagatcctgaagccgtacgggctcaagttcgccaagggccgcgacggcggcacctacatcgaggccatcctccccggcgccgccgccgaccagaccggcaagttcgaagtcggcgacaaggtcctcgccaccagtgctgtatttggggaggaaatctggccggcagcagggtacggacagaccatgtactgcatccgtcagagggttggccccctctacatgaagatggagaagagatttgggaaatgggatggtgctgctgagctcagtgagaaggagatcatcagggctgagaggaactccggggtgatcagcaacagggtgagggagatccagctgcaaaattaccagaggaagatggagcagaagatgcagagagaggaggatcttcgcatggggctgaggctgtacaaggatggtaaatatgaggaggcattggagaagttcgagtcagttttgggatcaaaacctgagatcaatgagtcttccatagctagctacaatgttgcctgctgttactcgaagcttgaccggatacaagctggtatttctgcactggaagatgccctgaaagcaggttatgaagacttcaagagaattcgcaccgacccggatctagaaaacttgaggaaaactgaggaattcaacgtcctgctgaacaagtacgacgaatcgttcatcaatgagaatgctatcaacgccatcaaatccttgtttggattcaacaagaaatgagcactgaactggtcatggtggtaggagatattgcatcttttctccagctgcagttgaacacttctgaagctttgctaggctatatagcacttggcaaacacggttcaatttttctccctgccattagttcacacttcacacaccagtagttttagctattcttggtgagattctgcagaacggtttcagtcttccctcttactgtaaccagtcgatggagatacactttgtaaattcaagcaaccaaatgttaaggaaatatattgtgattgtgcttaaaaaaaaaaaaaaaaaaaaaaaaaaaaaaaaaaaaaatttttttttatattttatattttat

SEQ ID NO: 72257 - DNA, 382 bp, Oryza sativa
  Clone ID: PAT_MRT4530_72653C.1
gaatcccggacgcacccacgcgtgcggaggaggagcccttgcattatgagatctggatgagaaaccctagctctcagacatgataccactgctgctattaggatgcgtgcgctttaaccattgctgggctgacatgcaaatacatagttcccaaggccagccagctctatgttggtgcaccttactggaacgtgccaattataaaaatgtactacaacaatgtgagtcacatcgccatcagaactcgacatccctactcctaagaggctgcctgaaaaatgagatgtaaagttgtccgtattcggagttctgcatggggagtatcttttttttcaaaaaacaacacaatctgattcataccattcgccaaattacgtaacag

SEQ ID NO: 72258 - DNA, 2571 bp, Oryza sativa
  Clone ID: PAT_MRT4530_72654C.1
tcacttaacaccatatatgttgacaagctttttcactttggactggagtgaagggtttgagctgccaccgtggctctgtccatggcatgcaatgcaagcaggaggtggtggactccactcgtctccacctccgttctgcattgccatcttccctgggatcgatattacacgtgtgcaggcaccgcgcaatgccaatgcaccacgcgtgtcaaaccaagcaacaccccagccgacaatctgcatcacctcaatgggcagccgctctctttttactccagtcctacccatcgcaaactctttccaacaatcaattaacacgccctttgctgctcgcgctgcggccaacagcaaggcaacaaatatgtaaacattactgaatatgcccgaaccacctccgcgatcggcgctcggcatagtgggcatttgccaccactgcgaattagctcgtttgcacattttgagcaagtacacatgtgcccgcatttgatcccattttgatccatcgtcagatagatccgtcggatacccttcaggtcctgcaaagcgattcaaggccgccgacacttcttgtctcactgagcgttggagttcaagttgcatgtccatgcacgcctccagcatcctctgtatgctgctcatcccttgttgaagtctacccatgtcagctttcaaatcattaatagcatcccattccctgtgtctagtgctccagttgttatgacgcaattctctgtgccatagtggctgtcggggtggcaaaggtgggggagggataacaagcgcaggtctgttaacaggagcttggaattgccgagtttcagcattcctctcttgttcctgattttcgtttggtgaattcacagatggaatagctgcatcgagattccaattgaggggtccacgaccacgtctttgaacatatgaccttattaatcgctccaaactttcaccaaaaccattactaagaagattggatacacttcgcctgctaagcaattctctcagttccatgctgtacacattgtcatcatctggcgggatgaatctattttcagttctaggaatggggcccatgtcaagtggagaatcttggaaatcatcttgccagttctcagtaccatgagactcgtcatcatgccattcatcatgctcatcttgaagatgatcatgctccctggcatcatcctccatagtttcactgtgtagttcctctgcattatcttcccaatttctttcagcatcctctgcagtttcattgggccacctatcaagtgagtcgtccagagatggctgccaaaatcttgcatcccgtcctgcctcatcttgcagcctattgtcaacttgagtttcatgcatctcaaccatgttatccaaagctacacttggtgactctatggcagcattttctgcatctgcctcctgtaaacccacatcctcaagcataatttgggtcgtattctcagtaccagtgagggccctgacctccgccccttgttgaggttcgtcactacctagtactccaacactttcagccacagaagaatcaaaccggctaacatcttcactacttacagcactctctgatctcaaagtggacacacgatggctctgcctcaactgcccgagctccctcgccgccacggatggtggtcgttcctcctcctcaactggaagaaccacgttcctcaagaacctccccctaagcaatccctggatgcggttgcggctgcggtgagggaactcggacacaatgtgataccctgatatcccctggagctcgcgttggcgctctcgggccatccgagtgatgacatcgagacgcgcttgtcggccacggaggcgaggaggctcccctcgcctctccctctcgccagcggctgtgtcgtccctgcgcgaggcgacgcgggagtcgcgaggctggctggccatctgcacccactccctgacgagcctgaccctctgcctctccgtctcgccgagccactccccggtggtggcggcagcggcggcggcggtggggacgtcggtgttggcggtgaggcggcgggcgatctggcgcacgcgctcgcggtcggcggtgtcgggggagggctcgcggtcgaagggctggtcggcgtcggatcggcggtgctcgagctcgcgccacatctggaggagggaagggggcgcggtcggggagggtgcctgggggcgcggcggcggcgcggtgggcgaggagaggaggaaggaggaggggtcgagggtggagacggggtggaggcgtgcgagcgcgaggagctcggcctcccggttgcgtcgctcgacctcgcgctccatggaggagagcacctcctcggcctggcgcgcgacccaccggctgaggaggcgcgactcccgcctccgcctccgcgcggcagacgactcgggctcctcgtcgggctggtgccccgcggcgacccctccccccgccgcggagcacgacgacgaggacgacgtcggggagaagcatcccccgaggtggtcgcagacgaggtcctcgaggtcccggcggaaatcggcggcggcgcccatgcggtggtggtactcgtccat

SEQ ID NO: 72259 - DNA, 278 bp, Oryza sativa
  Clone ID: PAT_MRT4530_72655C.1
gcgccatccaatctctctatccaacaatgaatcccgttcctctctcttatcttctcttattccccaaatgcttcttcctcgcattcgcaatcgcaatcctgccctaatccccaatcccaatgcaatccccccgcattaatcctaatcctaatcctaatcctaatcccaatcccatggacgagtaccaccaccgcatgggcgccggcgccgatttccgccgggacctcgaggacctcgtctgcgaccacctcgggggatgcttatcccgacgtcgtcct

SEQ ID NO: 72260 - DNA, 650 bp, Oryza sativa
  Clone ID: PAT_MRT4530_72656C.1
cagtcaaaagaggtgggattagattaataatctatatgagtaactgccagtgtctcttctgttcagttcagttcaggacataaatacagggaaagaacttacaatgggcagccgctctctttttactccagtcctacccatcgcaaactctttccatcttttttttaacacgccctttgctgctcgcgctgcggccaacagcaaggcaacaaatatgccaccctgtagtagatcgatagatacacaagaagaagacgagagaggacagacaaaaatggaagaagaaaaagaatgaagaagaagcagcagcagagctcttgtttcccctttttcctgaacaaagcttcgtgcagcaaaacttcgctttttccatcagttttattcccttccctactgtatttccacaactttacattactgaatatgcccgaaccacctccgcgatcggcgctcggcatagtgggcatttgccaccactgcgaattagctcgtttgcacattttgagcaagtacacatgtgcccgcatctgtataatagagaatcaatttgcgcatcggagcatacgcaacaggttcccttcctcactggatcccattttgatccatcgtcagatagatccgtcggataccctttcaggtcctgcaaagcg

SEQ ID NO: 72261 - DNA, 414 bp, Oryza sativa
  Clone ID: PAT_MRT4530_72657C.1
ttgcaaacgctgatgagcgtcttcgtcattatcatcggttgctacactgctattgactggatcaccgacatcgtcatcttcatcaatatcctttatcgctgggcactttcatattcattgctggctgacctaactgttgccgactggtttcttcgcctccacggctatgcaacttcatcacttttgattggtatcactatcttcactactaccaatatttttgccacctctggtgggcaatattatctctatattggtcgtcttgtctctatgccaactgcgtcagctaccatcaatggacaattgtgactacgacagaaggacaagctatatactcaggggcttactatctcaaacacaagtaccgtaccttcaatttggacttattccggatacatacaacatgaatttgat

SEQ ID NO: 72262 - DNA, 466 bp, Oryza sativa
  Clone ID: PAT_MRT4530_72658C.1
ataaaaacgctgatgagcgtcttcgtcattatcattggttgctacattgctattgactggatcaccgacatcgtcatcttcatcaatatcctttatcgctgggcgccttcatcttcattgttagttgatctgtctgctgccgactggtttcttcgcctccatggctatgcgacttcattacttttgattggtatcactatcttcactaccaccaatatttttgccacctctagtggacaatattatctctatattggtcatcttgtctatatgccaactgtgtcagctaccatcaatgaacaattcttactagatcaaacacaagtatcataccttcaatttggacttgttccggatacatgcaacatgaattcatgatcatggttctattttctatgctcaaagactagactatttattattccccgtaaaggttatcaaccgaatacttgcgtcagtcaggatt

SEQ ID NO: 72263 - DNA, 497 bp, Oryza sativa
  Clone ID: PAT_MRT4530_72659C.1
gaggttctagcgagcgcttggtaggccggaggcgacaacaacgaccgaaccgtcgtcggagaatatggacgcggaagcaccaatatcattactcgtatatgtgttctagccccttatggaagctggtggtagtgactctccttgtctgcgccgtcgtctccgcagacgtcctcctcctgctgatctgcgctctccgatctatgaacaagaggctgcacaggtggaacaaggccatccggatgctcacggacggggtcggggtcaagtataccgggaccctggccataacgccgggcgggtactcgtctgggagagtgacggattccatcgactcgagctcgtctccgctaattcttgcaaaagagaaagaactagctgacacctgtcagaggcactgccctacaggggtgccagatctggtgaggaattctagagctctctacggccacgagttggaaaaagagagatacggcctcttccaactagaactggatgct

SEQ ID NO: 72264 - DNA, 1091 bp, Oryza sativa
  Clone ID: PAT_MRT4530_7265C.1
agtcagtgccatcaagaactgcattggcaacatcagttcgcttctgctctagtagggcggggagacttgatcataagattccaacatctggggtgcagtcacaactgggcttgccctgaatattgcacttgaaaaatcatcacctttctgtgcataaaagatcttctctatcggaatttccattcccaaatcaccccttcaaccataaaagcatcagattgtgccaggatatcatcaaagttagccactccctcttgattctcaacctttgacatcagcattattgactttgcatgcttcccaagcaccttcctgacctctacaaggtctgagcctttacgaacaaaagacagagcaatcatctcactctcgtttgggacccccccatttaagaatatcctccctgtcctcttcagtaagtgtcgggagatcaaccaataactcctggaaggttaacattcttcctctcaccaagcatagcagtgttctcacaacggcagcgaaccaagccttgctctttatcacagtgaaggacagtaagagtgatggtgccatcagcacataatattacactgcctggcttcagatccaccgctagcttcttgtagctcattgatatcatgttgtcatcaccctttatgctataatcagttgaaactgtgatttcttgacccttcttcaactgtacgggttttccatctttcagaaatccagttcggatctctggccccttggtgtcgagcatgacggcgcagaggatgccggtgctctccatggcggcgcggaggttgtcgagcgtctcctggtggtactcgtgggatccgtgggagaagttgaagcgcgcgacgcacatcccggcgcggagcagccgcccgatcatctccaccgacctcgacgccggccccagcgtgcacacgatcttcgtcttgggcctccgccgcatcacccccgcggctccctcctgctgctcctccatcaccgccatcctcctcctcctcctcgctctcgctggatctccccctcgacttggtcggcggcggcggcggcggaggcggagatggaggtgggtgtggtttcctccggacgcgtgg

SEQ ID NO: 72265 - DNA, 219 bp, Oryza sativa
  Clone ID: PAT_MRT4530_72660C.1
gatcctgataacaaacttttcatgtctttccactttcttgctgtaaaaacaacaccagcacatcaaacattgggaatcccctcactgccttactatacaggtagtcataaacatcatacttccgggagatgcctgtatctgaattctccatgcatccagtgtgtctgatatacaacatcagaggccctttaaacatacagagtcctaccggcaaggggt

SEQ ID NO: 72266 - DNA, 489 bp, Oryza sativa
  Clone ID: PAT_MRT4530_72661C.1
atgatgatgtcttcgtcgtcgtcggcggcggcgggatatgacggcgagctgggtccgtcggcggcggcgcaggccgccggggttcggcggaaggcgctgcgggcgatgccgacgatggtgtactcggcggcgggcgggccgagcccggcgtgcgccatctgcctcgccgacctggagcccggcgagcgcgtgcgcgtgctgcccaagtgcaaccacggcttccacgtccgctgcgtcgaccgctggctcctcgcgcgctccacctgcccgacgtgccggcagccgctgttcgccacgccgccggtccggccgttcctcgcgcctctccggccggaaggcttcgtcacgccaagcaatgtcggtggtggagccgtggtgctcggcacattggccatggtttccgcggtgctggaggaggaggaagatgacgatccctgcagcaccggaggaagacgcagcgccgggagccgggccgagctaaccgtttga

SEQ ID NO: 72267 - DNA, 3435 bp, Oryza sativa
  Clone ID: PAT_MRT4530_72662C.1
tcattggcttgatgttccttcattggacacatgtttctcaaacttgtctcttattgcttgcaactccttcagagcgtctccgatttgcacgcggtccgttggtgcctcctctgagcaggagattccaatgcgcataaccgaagtgacacaagtaattcttagatccttgccgttgtaagagtttgacttgattgctccgccatcttctgtctctggtagtaactgttgatccagaacattagccgcattgtctggcaatgccatttggacatacttgcgaagcccaaccgcttccccgaattcatcgtctgtgggtctttttctggtgaacatctctagcaacagtatgccatagctatagacatcaccttgaattgagacttcattgccaattccatactctggtgcagcataaccgactgttcctctcattgatgcccaaccacttgatttctccgactcctgatgcagaaaccttgcaagcccgaaatcgctaacatgagcaaccatgtcactgtcgaggagaacattgcttggcttaagatcacagtgaatgattggcgatggcttatattggtgaagatattcaagtgaagatgccacatcgattgcaatgcgtagtcttgcagtgagatctaatgccttgtgttcactttgtcccatgatattagggtgtagccattggtctaaatttccatttggtaggtactcatatacaatggccttgaactcattgccctgaaaatcaatactcgagcatacagtcaatatcttcacaaggttccggtgtcgaacacatctcagtgtctcacattctgccatgaaactttgagatgcaccacgttgtgtgaggttgagcaccttcacagcaactacttgttggtcattgtttgtcattcttcccttatagaccgagccaaagcttcctgctcctatgaggttatcagaggcaaaaccatttgttgcattgactaattcagcataagaaaccctcgtatattgctcactaatgagtgatatttgtgggtttggttttgccttcttgttcctatagtagaatgcaaacagcataaatattaatgtgattaatggcattattctgcatatggagattatgatgataagtttcctggatgccttcttggtggtttggttgaagcagggtggcaatttcatctctgggataccgccacacaggtcatcatttccagcgaggaaggtagctgttgcatttagaaaaacgccatctctgggaacttcaccttcaaatttgttgtatgagaggttcaaaatagatagacctctcatgcccccaagaaatgcagggatgcctccagataaattattgtcagaaaggtcaagcaccaggaggccctttagttgcccaagcgacgatggaattatcccttggagggaatttccagatatattgagctgctgcaagctcttacattcaccaatagatgtaggaatctctccagaaatgttgtttgaagaaaaatcaaactctccaagattttttagattacccatttcagctggtaaagcccccgataaaaaattatgtcccaaaaacatgttactggacaaagtagaaatgagaaaaagttgtttaggtatcaagccagtgaggctgttatatgaaagatccaatagttctagaggacaactgctaagattggaaggaatggacccattgagtgcatttccttggagttgtagtagatttagtcctgtaagattgccaagagttggtggaatggatccagacaggttattatatggtatagataatttattcagcatcttgagtttgccaagagaagctggaataattccctctaaacggttaatatccatatagagcaattttaagttgatcaagttccctattccttcaggtatttttccttctatattgttgttcgctatgataagatagctcaaatgcgaagaaagattcccaattgaactcggtagctcaccttgaagcttgttgtaacccaaatctaatgcattcaaattgctgcaattcgccaagctggataagaaaacccaatcagcatcatttgttgcttcaagctgattttttgaaagggccacaactgataagctcttctgttgaattccaagacactgaggaattcttcctgacaaaaagttgtatactgtttgcagaacttgaagcatggtggcattacacaaggatggtgggattgttccatgaaattgattgatgtctacaacaaacctttgtagattcggaagcttattgccaatatcaggtggaagagccccgctgaggcgattgctttgtaaaccaagatcatcaagggaggaaaggttgagcagtgaaggaggaaacgaaccttctagtttattataatccagacgaaggctactcaaggcaccaaggtttccaagagaatctggtatggagcctgaaataagattattttgtgaaagatcaaggctagtaagcatctgaagtctacctaatgattcagggatgtgtcctgagagccgattttgctggagactaacaaacactagagatgagaggttccccaaccatgcaggcacagttccttcgagattgttctctcccaattcaaggacaagaagtgatgaaaggttttgcagcgatggtatgctccctgtcaactttgcagaagggatgctaaggtacttgagtgctgaaaggtttccaagtgaggcaggaatggagcctgccagctgattagaaccaagacctagtccaacaaggccagcaagatcacctatctcctctgggattcccccagtgaggttgctgaattgcaggttcagagtcatgaggtttgcaaggtttccaatctctgatgggatgcttccggtgagggtgttcatgccaaggctgagtaccctgaggccgcgcaacgagcagagctccggcggtatctcgccgtggaacctgttgttgtacagagcgaggatctcgaggccggtgcagttggcgagcgacgccgggatctgcccctggaaggcgttgtcactgaggttgaggtgtctgagctcagcgaggccgccgagctccggcgggaggacgccgtgcagccggttgccggcgaggtggagccgcctcaggtatgtgaggttgccgaggtccggtggcaccgtgccacggaggccaagccccggcagctccagcgccacgacgcggccgcggcgccggcctctcgcgccgcacgccacgccgcgccaccggcacacggggacggaccggttcccccacgtcggcggcggcggcgagccactgcccgtcgacatgcgcgccatgaacgccgtcagcgcgaggccgtcgtcgacgtcgaccgccgccgcggcggcggctgctgctagccacgccagtggccataccgcggcgagcaagagacgcttgccggcgagtgccat

SEQ ID NO: 72268 - DNA, 491 bp, Oryza sativa
  Clone ID: PAT_MRT4530_72663C.1
ccgggctgcaggaatcggcaccacgcgggtcaagtcttatctgccttcctccctcctctcgccttccgcctcgcgtgcgctccaccaccgaaaaaaaggacaggtattcccctttcctctcttcctaatcaggtgcatgcatgtctcagatttggggatctctgggtgttcggtcgcatctggtcatgaattttcgatcggttcgataggtcgttggtcccggtgaagaaacggatctcgtagcttcggagttgttgcgtgggtgtggaggttttgggcggaacggatttggtgcgattttgctttgattcaggggtgtttggggcgtcggaggaggcgtagatgggttggatgtgttcgtttgggggtgatgggtggtttgatttggggggatttggggagtctcatggttaatttcgcgattttggggtggggtggaaaccctaatacgatctgattcgttcttccttgctttggggaattcatgaaca

SEQ ID NO: 72269 - DNA, 1626 bp, Oryza sativa
  Clone ID: PAT_MRT4530_72664C.1
atgaccttccactctgagctttggcggagctcgagagccttcagcaccccacgcactatgagaaccagcactgacccgtccggctcaatcgtggagtcgtttcacggcctcgtcgtggtacacctccgcacggcggcgccattgctggctgcagctgtggcgttgtacatcctcatagagcagctgtcataccaccgcaagaaggggtccatgccagggccgccgctcgtcgtcgtgccgttcctcggcagcgccgcgcacttgttccgcgacccggtcggattctgggacgtgcaagcggcgcgcgctcgcaagtccggcgctgggctcgccgcggactttctcttcggccggctcacggtcttcatccgtgactcggagctgtcccgccgcgtgttcgccaacgtccgcgccgacgccttccacctcgtcggccacccgttcggcaagaagctcttcggcgaccacaacctcgtctacctggtcggcgaggagcacaaggacctgcgccgccggatcgcgcccaacttcacgccgcgcgcgctctccacctatgccgtcatccagcagcgtgtcatcctctcccacctccggcggtggctcgaccggagcgctgccaacggcggcaaggccgagcccatacgggtgccctgccgcgacatgaacctcgagacctcgcagacggtgttcgtcgggccgtacctcaccgtggaggcgagggagaggttcgacagggattacaacctcttcaacctcggtttcataaccttgcccgtcgacctgccggggtccgcgttccgccgcgcgaggcttgccgggccgcggctgatgcacactctcggggactgcgcacgtcagagcaggcagcgcatgcgcggcggcggcgagccggagtgcctcctggactacttgatgcaggagacggtgcgtgagatcgacgaggccgcggcggcggggctgccgccgccaccgcacaccagcgacgtggaggccggcgccctcctgttcggcttcctcttcgcggcgcaggacgcgtccacctcctccctctgctgggccgtgtccgcgctcgactcccacccggacgtgctcgcccgcgtccgtgctgaggtggccgctctctggtcgccggagtccggcgagcccatcaccgccgagatgatgtcggcgatgaagtacacccaggcggtggcgcgcgaggttgtccggtaccggcctccggccccgctggtgccgcacatcgccggcgaggcgttccagctgacggcgcagtacactatacccaagggcaccatggtgttcccgtcggtgtacgagtcgtcgttccaagggttccccgacgctggcgcgttcgacccggaccgcttcttctcggaggcgcggagggaggacgtggtgtacaagcgcaacttcctcgcgttcggcgccggcccgcaccagtgcgtcgggcagcgctacgcgctcaaccacctcgtcatcttcatggcgctcttcgcctccctcgtcgacttccggcgtgagaggacggagggctgcgacgtgccggtgtacatgccgaccatcgtgccgagggacggctgcgtcgtccacctcaagcagcgctgcgccaagttaccatcgttctga

SEQ ID NO: 72270 - DNA, 297 bp, Oryza sativa
  Clone ID: PAT_MRT4530_72665C.1
atgggcaagggcgacaacgacagcttcctcctctcctcccctctcctccctcccaacggcagtggagcgctcaggcagtgcaagaggacggaggaggtgtgccatgacttcctcttcttctcccctctcctcttccttccaacggtggtggagggctcaggcaatggtggagagcagaggaggcgcgcaacggcggcggcgtttgcggcccgcgtggatccgacagcggtcaccctcccccttcacggcagtggcggatccggtggtggggaggcgcagcggtggcggatccggtga

SEQ ID NO: 72271 - DNA, 189 bp, Oryza sativa
  Clone ID: PAT_MRT4530_72666C.1
atgtctgtgatgcctagtggtaagaagttgtctctattgcttgtcaatgacttcagcaggttcatgcagattgagatcctccttatgctcaagaccaaggggctcctaggttatttctggggcagcaagaggattggaggaagaagaggaggcaagggtaatttcgtctggaatgacattatagcatag

SEQ ID NO: 72272 - DNA, 142 bp, Oryza sativa
  Clone ID: PAT_MRT4530_72667C.1
cccaatatcccggtcgaccctcacgcccccgatatcttacaccctcattccaccgtcttccactgggagataactaaacaccacccgggggtccataaaccaccactactctataagccagcccttcatctcatctggagat

SEQ ID NO: 72273 - DNA, 223 bp, Oryza sativa
  Clone ID: PAT_MRT4530_72668C.1
ctcgccgcgctcagcgctcgctcgaaagaaaaccggtgcagctaaagcgacaagtgaaagcctctgtaccttcttttgtcgccgcgcgcgccgccgacgccttcgaagatgctcgacatcaacctcttccgcacggagaagggcggcgacccggagctgatccgcaggtcgcagcgcaaccgctccgcctccgtcgagctcgtcgacgaggtcattcgccctc

SEQ ID NO: 72274 - DNA, 248 bp, Oryza sativa
  Clone ID: PAT_MRT4530_72669C.1
gtggagctcgtcggggcgggcggccgccactgccggacctccccgtaaccccgtgggccacggcgcttggaggctggagagaggaggggagacagatggagagggaggaagaagatgaggagatcgaattggcacgtaagcgccacgccagtgccatgtcagatgaagaccgggggaagaagctgcccgagcagaacgctatttttgggagcggcggcttgtggccaaatcatgccatgtggccgtga

SEQ ID NO: 72275 - DNA, 2339 bp, Oryza sativa
  Clone ID: PAT_MRT4530_7266C.1
gtgagcgtttccacgggggtgatgaaacccctcctttccaagctctccaagcagctggaggaagagtataccaagctcaagggagtacgcgtgcacaagaagattatgttcataagagatgagttgagtaccatgagagctgcactccaaatgttggcggattcagaagagctcaaccctcgaatgaaagattggagggacaaggtgcgtgagctagcctacgacatggaggattgcattgatgccttcacgtctcgcgttgatcacaacaacgatggatcgaccgggttcaaggagttctttcacaagttcaagaaactaaaagctcgccataagattgccaatgagatcgaagaactcaagacccgcgtgatggaggtaagcgagaggcacaagaggtatgattttgtgaatcaggagctgaccaaatctagttcttttgccattgatcctcgactgcatgcactttatgtggaggttgacagacttgtgggtatcgagggtccaacaaagcatattattgacaagttaataaccaatgaggatgaggattcctacagacaacttaaagtggtgtcaattgttggttttggaggtcttggtaagactactcttgcaaaccaagtgtaccatgccctcagaagccaatttttgtgctcggctttcatttcagtttctcgaaagcccaatctggaaaaggttctaagaaagattgctcaaggagtgacgttacccactggaaaaataccggatggcgatatccaccaattggttgataaactcagaacgtacatccaagataaaaggtactttattgtaattgatgacttatggggcacggaagaatggaaatctatccgtcttgctctgttcaataataagtgtggtagcagaattatcaccacaacacgtagtgctgcagttgcatcattttcctgttgtgatggcggttacgtttacctaatggaaccacttaactttgcagactccaaaaggttgtttttaaaaagagcattcggttctgaagaattattgtatcctcatcttgaagaagtctttcatgggatattggagaaatgtggtggtctaccattagccataaatactatatccagtttgctggtcgatcaacatgcaaaagaagaatgggacaggatgctaactgctattggctctgcacttgcaaaaaatcctgatgttgagaatatgacaaagatattatctctcagttacctggatcttcctcatcatctaagaacttgtttgttgtacttaagtgtatttccagaagattatgtaatagacaaacaacagttgataaatagatggattgcagaagaattcattcatgaagagcaaggccggagcacatacgaagttggtgagcgttatttccttgatctcatcgaccgaagcttgattcaacctgttgatgtaaagtatggtcaggtagaggcatgtcgagttcatgacatcattcttgatttcatcgcgtgcaaggccgctgaagagaattttgtcacctcattggatactgcagattttggccaagtttcggatcgcagggttcgtaggctaagtgtcatgaatatcagtgaagaccatgccaccatatcagcaagccaaatcgatctctctcatattcgatcacttactttatttgggcgtttcatgcaaactcctttggtggatttaccagctatacgtgtgttggatttagaagaatgtgaaaacatgggagacaaccatcctattcttgcgaatgtagaaacgctgctccatttgaagtacttgcgtattggaatgttgtgtccgataactgagctcccaagaaatattggagaactgcgtcatctagaaacactggacatgcgatttgcatgtcaagtcaaagaattgccatcaactattacaaggcttcaacgattggcccgcctaagctgcacatcacatattgtttcatctgtaaggttccaaattggatgagctcacttggaaatctcaaggaattaaagctttatatctactgtctaagagcagaagatgttaagatacttggagcaataccaaccttgatttttctcaagctaaaaaccttttacggcaccgatgggaggatctttatccctggttataaaggattcagatgcttgaaatattttggcctggtcatgatatcttgtggaaccacaccagaatttgaagaaggatcaatgccaaaccttgaacatctcaagcttaggttctgtgttcatgagatggagtgcataaatggtgctaccaatttcggcatccggcacctctccaccctcaacaaggttgaggtccatatctatggg

SEQ ID NO: 72276 - DNA, 386 bp, Oryza sativa
  Clone ID: PAT_MRT4530_72670C.1
attggagttgctcaggggtaatgaaggcacccttattactattaaaaatgcacacatcgtacttcacaaggattggtaataaatccttgtagctctggttagaactttgattcaaaaattcgaacgaatccacatgagtttgtccagaaaatgttaccaatactgctccttttctaaaggtataggtgttgtgcactggtttccaattgggatggaggggtgcagtaggtccatttggactggtgtttaataatacatattcatatcctctagatgctaataaatggtatgcttcttccactggaatctttttggtcgataatggtacatcagcttttgggatcgctttagattgacgtttgcttcttaaatagctttcacgtttt

SEQ ID NO: 72277 - DNA, 718 bp, Oryza sativa
  Clone ID: PAT_MRT4530_72671C.1
ttttttttttttttttttaagaaattcagtaggaaaccatcatttcagagcaggtatgactgatactattgtcaaacaaaagcgaatcaaacccccatccgggggagggcgaggcagaggggggaggcggagggtttgaagcctgtccacactggaatggatttgtcacctgagccaagcaggccaaagcttcttgcggtttcttgcacggttgtgctgcaagagcatgtttaataattccatgctatgtgaaggaaagcagaagaaccctgaggggtatgaagataaggaatcaacggtgataccattcatgctgtgatgtttcttgagaagtaaatagaccacacatgttttcctagttctgtaggcagttgtacaggataatcgatcgatcgaacgaacgaaccatcccctacgcgatctaggtctacgggcgagcactcagtccatccttcccttgatcactctctcctgaacctctgtgggagtcacaaggagaacataaccaccccagccactcaggcaatctcgatcaacagaagcctgcagcgcttgtgagatcgtctcgaatagttcttccggttccatgcttggcttatacatggactcacaagcaccatatagtgattctgaagcagtgccagaaaccacaaaatctttcgctagttccttggcaccaatgcaatccatggtacatataaatgggtcatcataatct

SEQ ID NO: 72278 - DNA, 216 bp, Oryza sativa
  unsure (1)..(216): unsure at all n locations
  Clone ID: PAT_MRT4530_72672C.1
ccatnacccnccaacaacaagagatcatcgaagccccaacaagtcgcatgacatccatngcgacgcnccncccaagaccctnctccttctcgtcctcgngctatccgtcatcctcgtctcngccaccgcgttccaccaccaccaccaccacgacggaggagccgaagctngaggaggaggaggagggggaggcgggttcttcgaggtgccgtggtt

SEQ ID NO: 72279 - DNA, 220 bp, Oryza sativa
  Clone ID: PAT_MRT4530_72673C.1
gacagcaacagcagtcgagcacacactagccagcaagacgaggttcataagcacctcaagtatacgtgagcgtgcatgcagacctatactgaacatgtaataactacttcaagaggtgtgcacacggattctattcaatacttcattccagcagctgaaagactgcaagaagaattaggacctaatgctcttgcttttgcattggctcatctgaatggat

SEQ ID NO: 72280 - DNA, 287 bp, Oryza sativa
  Clone ID: PAT_MRT4530_72674C.1
ccccaaaaaacttttttttttgaaaccggattttcatttttaaaaggggggagacatttggcctcctcccatttttaacggccggggccctaagtaaaccccaacaattccaatccggaaattcgtcctaaataacccgccttgttaaaacccgttagctggggtcgatgaaacaaatcataaaaaaaatcatttcccaggcgtttttggtgggaatatttggggggtctaaatggggttttggtttcaaaaccaacaaacgaaaaatttttttacgtccaaacaac

SEQ ID NO: 72281 - DNA, 411 bp, Oryza sativa
  Clone ID: PAT_MRT4530_72675C.1
ttgtttttttttaggccattagagtctgtactctgcattccaaattgtcaaacaacagaatactaaagttaaacaaatgtcatgatcacactttgtcggtaccgatggacactgaccttatcaggtttaaaatttggcacatgaccttgatggctgtatcataaaattatgtgacattgtgtcatggcttttgaagtcagaaatatgattgttgattaacaaattcacaattatctacttcgggcttcttttagttcgtcttgacgctttctcttccattcttctatgacttggcagctctctacacttgcttgtcgagtctttcatgatttaggaggtatcacatggatatcgagctggaattgccctttcgtctcgttcggttcaacactggagtactgtcatgactga

SEQ ID NO: 72282 - DNA, 2947 bp, Oryza sativa
  Clone ID: PAT_MRT4530_72676C.1
gttgggggtttgtttacaagaattctgccaaaatgctaatgtttgttacacaagaactatccatgaacaattctctgtatgtaatcagggaatttttcgttggaacaacaaccattccactctagtacaaattgcagcatacacaatgagataacacaaatgtttcactataatcaaacgagtaattttaatactactagctggtaggagtaccacaccaagaccccgatttggggaaggggaaaaaaaatgaaaagagaggatggccatgtctcccctgctcttcatcgtcttcctcctcatgctgctcgagccctgctcatcttctcgcagcaatgtgtacattgtgtacatgggggagaggcaccacgggctgcggccggagctggtccaggaggcgcaccacggcatgctcgccgccgttcttggcagcgagcaggcggccatggatgccatcctctacagctacaggcatggcttctccggcttcgccgccgtgctcaccggcggccaggcggcgcggctctccgattggcctggagttgtgcgggttgttcggaatcgtgttcttgacctgcacaccaccaggagctgggatttcatgggggtgaatccgtcgccttcaggtggtggaatcctcttggagagcagatttggggaggattccatcatcggtgtgctagatacaggaatctggccggagtcggccagtttcagagacgacggcatcggcgaggtcccgcggcgctggaaggggcaatgtgtcgccggagagaagttcaatgcctctaactgcaacaggaaaataataggcgcgaaatggtacgtcaaagggtatgaagctgagtacggcaagatgaacaccagtgatatctatgagttcatgtcggcaagagacgccgttgggcatggcacacacacggcatccacagcggctggagctctggtagccaatgccagcttcaggggccttgccaaaggtgtagcaaggggaggggcacagagggcaaggctggcagtttacaaagtatgctgggctactggagattgtaccgctgcagacattcttgctgctttcgacgatgccatacacgatggcgtcgatgtgatctcggtgtccctaggacaagcaccacctctccctgcttatgttgatgatgtcttgtcaattggatccttccatgctgtcgcaaaaggagtcgtcgtcgtttgttctgcagggaactccggtccttattcagagacggtgatcaactcggccccatggattgtcactgttgctgcgggcaccattgatcggatattccttgcaaagatcattcttggcaacaatagtacttacgtgggccaaacactgtattctggaaagcatccttcaaaaagtgtgcgtatagtctatgctgaagacatttcatctgataatgccgacgatactgatgcaagaagctgcactgcaggatctctgaatgctactctagtaaaaggaaatgtagtgctttgcttccaaacaagagcacagaggtcagcctcagtggccgtagagactgtaaaaaaggctcgaggtgttggagtcatctttgcgcaattcttgaccaaggatatagcatcttcacttgatattccttgtgttcaagtggattaccaagttggaacagctatacttgcatacacgacaagcatgagaaacccagtggcccaatttagctttccaaaaacaattgttggagagctggtagccccagaagttgcatacttctcatctaggggcccaagttctttgtccccctctatcctgaagccagacattgccgccccaggtgtaaacattctggctgcatggtcacctgctgctgccatatcatcggccattggatctgttaacttcaagattgactccgggacttcaatgtcgtgcccacacatttcaggtgtagttgctcttctgaaatcaatgcatcctaattggagccctgctgcagtgaaatcagcattggtcacgacagccaatgttcatgatgcatatgggtttgaaatggtatcagaggcagcaccctacaatgacgcaaatccatttgattatggaggtggccatgtcaatccaaacagagctgcgcaccccggtcttgtgtatgacatgggagtatctgactacatgcgcttcctttgctccatgggttacaacacctcagccatcagctccatgactcaacagcaaacaacatgtcaacatacgccaaaatcgcagttaaacctgaatgttccatccatcaccatccctgaactgaggggaaaattgacggtgtcaagaacggtcaccaacgtcggccctgctttgtcgaagtacagagctcgtgtagaagctcctccaggcgtggacgtcaccgttagcccctcgctcctaaccttcaactcaaccgtcagaaagttgccattcaaggtgacattccaggccaaattgaaggtgaaagggaggtacaccttcgggagcctgacatgggaggatggcactcacacgcgggcttgctgccggaggatgccacgaggagtgggcggcgagagccttattgtaggcgtcgagctcgtcgtagtagacgtcccagacgcagcggacgcagccgctgccgcagcagtcgccggggagcggcttctatgcgagctacgggaaggagtcctagcagggcctgttcgtggtggctccgccggcgtcggccattgcatcgacgaggtcggccggagggggcaggcggtggctgctgcggcggcggaggagagggcgcgccggcgaggggagcgacgaggggatcggcgccgggacgcggagggcggcgaccagcatgcggaagagaagggaagagaaaagccgattctcccacttgttgggctgttttttggtagagtattttggaaggcagagtccaactgccacaaggtgaagccaaccaattaa

SEQ ID NO: 72283 - DNA, 420 bp, Oryza sativa
  unsure (1)..(420): unsure at all n locations
  Clone ID: PAT_MRT4530_72677C.1
cacgcctccncttattccgcgcacagcatatgtatggctgtcatggtcacacaaacttaatggatgcgtttctttgtgtgtcacagtcgcgcatgacgtcaaagcaactttgatgaatttccttgttagaaaccaccgattnggcccccaacccctccgttcntgcccaatatttatgacgccaatgccaagcagctaacattctcactaaataacataacagttaacttttaactaatatgggctnattntgctgatatttgacatacttttacactagtaggacggaggaggatttgttatcatgttattgcttaagcttatcgtaatggtgaaagaaggaaagattgctacactaactttgagaagaacnnanactgaacctctctatgttttggttattctaaaaaaaaaaaaaaa

SEQ ID NO: 72284 - DNA, 659 bp, Oryza sativa
  Clone ID: PAT_MRT4530_72678C.1
taagaaagatcctaagtggcccgtagcagatgaagatcattttctctttgctcgtctggcgagtgcgtgcaagcagctgcctttgctgcaggtttgatgtttgtagggtcaaaagttatgagggcaaataatgcaaggctggcagtgcggcctgctgcctgactgacaaggcaacatggtggcttgtgagccctatgatgaatggagttgcgtaaaggcaaggcaggtgatgggcatgagcgggcaagcccactgtgatccacaaatgcaaggttggcatgttgcaagactggaggaaatgtaagccagagtgctggcacagctgcaggctgggtgggtgcaacatgtgctgcacctgatgcaggatgattgaaccttggtgtgcagggccatgagcgcatgcagctgacaagctgccagcgtgttggatgatgctgctgactttgggtgcggaatcctggactgcaagctgcaagctgcaaagctgctggtgtgggctgttggaacttggccatgctgaggatgatggtgatgctgaccctaggtactatagtgcacctagtagcattaccacccttgcggtgtattgtactgagttttaacatatagtggttctcggaagttagaaaataagctcagatatcaaaaaaaaaaaaaaa

SEQ ID NO: 72285 - DNA, 222 bp, Oryza sativa
  Clone ID: PAT_MRT4530_72679C.1
atggctgggggatgcgcgcagtggttggaggatgcgtcatcgggaggaataggcggcagtgttgttatcgcgagaggatggcgcggcgccggggactgcgtgatgcagcgattgggtggcgccactgtggggtcagcgcgttcgctggtggggattcagcgattcatagctagccctgggcgttctgagccgttggatgagatggacgggccacaatattag

SEQ ID NO: 72286 - DNA, 210 bp, Oryza sativa
  Clone ID: PAT_MRT4530_7267C.1
gaattctgacggaaaaaccaagcacaaggcaacagagtctcgatggtgttacattctgactaggaggggtacattacacacgaaattcaagacagcaaacaggtctggaggtttttacttgactgataggaagatactactcaaaggacacctgggcttgagtaaatcaactgcattgatctgagaaaccatgttctgtctttcctggga

SEQ ID NO: 72287 - DNA, 428 bp, Oryza sativa
  Clone ID: PAT_MRT4530_72680C.1
cggacgcgtgcgcggacgcgtgggcatacgcgtgggtcataagaaccaatgttccatctgcagggaggctgtacccggtgctaaattaagaacaaatactcgtacggcaagccaggagaacccatcagagaggtacattcaggtgggttctgtcgacaaccatgacttctgacttatgggcttcggcaactactacggagccgagaagagcctacatgaggccgatcgtggcgtaccggctttacttcaccatgacatgtatattgtgcgaacatggacgatacatgtattgacactgtccgtcgatcgcaatgcatcactgagaatgcgcatgtggaggtgtgtacaactgactggacagagcgctgactttgatgggtctattgactgtaatacgaggagcatctgcattcatgtatcggatgtag

SEQ ID NO: 72288 - DNA, 985 bp, Oryza sativa
  Clone ID: PAT_MRT4530_72681C.1
atgagcagcataggcacaggatacgatctgtccgttaccaccttctctccggatggtcgcgtcttccaggttgagtatgccacgaaggctgtcgacaacagcgggactgttgttggaatcaaatgcaaagatggaatcgtcctgggtgtggagaagctagtaacttcgaagatgatgctggagggatctaataggaggatccattcagtgcactggcactctggcttggatataattctcattaatgttatggctgttgctggtttagctgcagatggcaggcaaattgtttcaagagcaaaatcggaagcggccagttatgagaaggtctatggtgaacccatttctgtaaaagaattggctgatcgtgtggctagctacgttcatctttgtacactctactggtggctcaggccttttggttgtggagttattcttggaggttatgatagggatgggccacagctctacatgatcgaaccctcaggagtctcatacaaatactttggtgctgctctggggaaaggaagacaggctgcaaaaactgaaatagagaagctgaagctttccgagcttacatgccgagaaggcattgttgaggttgcaaagatcatttatggagtacatgacgaagctaaagacaaagactttgagctggaattgagctgggtatgcgatgaatcaaagcgccagcatcagaaggttccagccgaccttttggagcaggcgaaggttgcagcccaggcagcgcttgaggagatggacgcagactaagaaaccgccgatcatgatgctctagaatcatatctccattactcgatgctagaccgatcgatcatctataaccatatcactacattgtgtaacagacttgaggcagctcgtcagtttcatttcaacgtagaaccacctcaagaaaagaatgttgtactatgcagctcgatcgctgtcacatattgtttgctcctgatttatgacgaaccac

SEQ ID NO: 72289 - DNA, 1490 bp, Oryza sativa
  unsure (1)..(1490): unsure at all n locations
  Clone ID: PAT_MRT4530_72682C.1
atcattcatcaatcgtcgcctgatcgcctccagcgaaattcttcctccatttctctctccatcgaatctcatcccagcagcagcagcagcagcagcagccgccatggattccaaggcggacgcggagtcagccacggccagggccgccacggcggcggaatacacgatcccgttctctctctcgatcccgtctcgcgtcttcaggtcccacccggttgcctccccgccgctctcctctccggtctactcctccgccgtcgccgtcggcaccgccgccggagctcctccctgctccctctactgggttggcggggagtggatcggggatctgcacgcaggggccgatttcttctcttcgtaaggagtagataacacagaatagttgaagatgagcagcataggcacaggatacgatctgtccgttaccaccttctctccggatggtcgcgtcttccaggttgagtatgccacgaaggctgtcgacaacagcgggactgttgttggaatcaaatgcaaagatggaatcgtcctgggtgtggagaagctagtaacttcgaagatgatgctggagggatctaataggaggatccattcagtgcactggcactctggcttggctgttgctggtttagctgcagatggcaggcaaattgtttcaagagcaaaatcggaagcggccagttatgagaaggtctatggtgaacccatttctgtaaaagaattggctgatcgtgtggctagctacgttcatctttgtacactctactggtggctcaggccttttggttgtggagttattcttggaggttatgatagggatgggccacagctctacatgatcgaaccctcaggagtctcatacaaatactttggtgctgctctgggtaaaggaagacaggctgcaaaaactgaaatagagaagttgaagctttccgagcttacctgccgggaaggcattgtggaggttgcaaagatcatttatggagtacatgatgaagctaaggacaaagcttttgagttggaattaagctggatatgtgatgaatcaaatcgccagcatcagaaggttcctgctgatcttttggagcaggccaaggttgcagctcaggcagcgcttgaggagatggatgctgattaagaggagacccgactatgttctacgtttggccactgatgaaatctttgatgtcattactggcacacagggacatggccattctgtcggattttaaaacttcgcatgtacttatggtactaaattcatggaaagtttgatgctggacagtgaatggatatctgacttttgactgaaaaagtttgatgctggacagtgaatggatatctgacttttgactgaaaaaaaaaaaaaaaaaataaaaaaaaaaaaaaataaaaaaataaaaataaaaaaaaaaatataaaaatagatgaatattaaatattttatatttnttattttgtggggaattaaaagttattttttttatttt

SEQ ID NO: 72290 - DNA, 174 bp, Oryza sativa
  Clone ID: PAT_MRT4530_72683C.1
agtctcctcgtccacctgagcagagagtatagcatatcgtgcctaaacctaacgcgaagcgctagtgcagctctacctagattcttcctcgccatacatcgctagctcaccttctgctcgaggcatcacttcagtaaggtcggcgagcacagcggcggccttccacacagctcc

SEQ ID NO: 72291 - DNA, 1007 bp, Oryza sativa
  Clone ID: PAT_MRT4530_72684C.1
ctacagtcctaccaatctcgtccgccaccgaccgctccacctccgcgtcgcgactttgtacaaacatccaaaaatcgcagacggcactcattaggtgtgagaacatagatctcgacgatgtaccaaagaacataccaacgacgcggacattactaccaataaaatacctgggactacctttcaccgttgggagattgcacatgcaaggcagacctgcaaccactcttcgataaatcaacaggaacgatggccgcttggcgggaaagaaacatggggctagctagcgcaccaccttggtcaagtcagtgttttccccgcagtcagtctatgtcctaataacatttaaatttaccaaagaatctataaaagtgcttgacaaacaacgaaagagcttcctatgagcgggtcaggaaaacataatgggcgggaaatgcaaagtaaactgaaaaagatcatgctcaccagttgcctatatatggcggcctggacgcgctaaatctagaaagcttcgcactagcactacatgtcaaatggctatgtcataaataggaatcctcaaacaaggcatgggttgggttggataccccatgtgatgaaaccgataaaatactcttcgtgattacgatgataaccgttggggacggagtagcatcacgttttcgggactcggcctggatgcatggtcgccacccgaaggaagtcatgccacaagtgtacgtatacgcaatctccaaaacgaagaatagaaccttgagaaatgtcatcgcagataatacctggtcacgagacctaaacctctcaatactgtagccatgacaactgagcttctggagcaactagtgatcctgtgggcaacagttcaaagcgtgcagctcacaaatcatgaagagtacctggttccacctaaaaaaaagttccttggatccactagcacaaactatgcgtgggcatcaaacaaatataagctgttcgcctggcttgtgatccataatagggactggacgtta

SEQ ID NO: 72292 - DNA, 493 bp, Oryza sativa
  unsure (1)..(493): unsure at all n locations
  Clone ID: PAT_MRT4530_72685C.1
ccttngggtgcaggattccgcttgagctcgtacggaaatnangcgggnaggctngcagaatatggcccnttncgggaatggcntcntccggnnaaaaccgaattcccccttnctttgggttcnnttcccccccccgggagggacccttcnccngggggttccaggngaactnnaagattcgggtaacttnaaccannggggggnaaggaatnaagttgaattccaggtttttggccnaattgaaangngcgtnaccaangtttccaaaaccctcttntttaacttgcccccgggttcaacatngnaagaaccncccnaaaccccattgtaattnnatccttcnagtnccaaagttggggtngccccgcnntccaattcnnncaaggtcgggaatttgttctcccctgaanaaccccaaggtccccccggaaggctacaacngccngtggtggaaccntntttgaaacctncccgtgtttcggatanccccaac

SEQ ID NO: 72293 - DNA, 110 bp, Oryza sativa
  Clone ID: PAT_MRT4530_72686C.1
atgatgaatatattcgtggcttcaaatgggatcgttgggcaagctggtgggttccataagatttctgtatggtacctgcctgcttcgcacagggaagttcgcaatgatgc

SEQ ID NO: 72294 - DNA, 725 bp, Oryza sativa
  Clone ID: PAT_MRT4530_72687C.1
cccgggctgcggaaaaaaggaccccctcgctcccccactcatctcgtcggcggcggcggcggagcggaggagcacggcgagctagctgctctaccttggaatggcgactgttccagttaacccaaaacctttcttgaacaacctgacagggaagcctgtcattgtcaaacttaagtggggtatggaatacaaaggataccttgtttctgtggactcttatatgaatctgcagctggctaatacagaggagtatattgatggacaattctctggaaacctgggagagatactgattaggtgcaacaatgttctgtatctccgaggcgttccagaggatgccgagatagaggatgcagaatgagataacctggacctatgcgcagatcgatttgtgtaatatgcagctgacatgaacaatttaagtgtcatgtaaaattgatgcacagattccttgttgacctggatcttaactatggtcatgatatggttatattaggcattgaaactgatttcatattgactagtgtcattgctcaaatgtgtgagagatcatatttcgtgagataatataccatttgcctgtcgagatggatgacgaactgaacataataatcgttagcaaaatcagatgaagtttatgcgatttagcagtttgaaagattccttgcaaattgattcctgcgcctcgggtatatgaagatcataagttcatagagccttcttgc

SEQ ID NO: 72295 - DNA, 290 bp, Oryza sativa
  Clone ID: PAT_MRT4530_72688C.1
cggacgcgtgggcacgagcgtgtcttgttttgagcacacacttgccaatactatggtcttgaactcaattcctgttgatgatgattatgacgtatgaaaggaagttgtttcctgactgacaacaaatatggccatcaacagaatattttatacagattctaatggacgagatttcctcgaaagggttagaaaccacagggatgaatgggaccttgatttgtctcaaactgttggaggaaatactacccggtctatcaaagatatatgtagcatatggcaaatatgaacta

SEQ ID NO: 72296 - DNA, 320 bp, Oryza sativa
  Clone ID: PAT_MRT4530_72689C.1
gtggggacataactaacgcttatacagggacacctagatacctcgttcaagccgaattcatatgactgaatacaacaggaaactagagtactatggacaaaggtatatgattcaccaacgcaaccagagcaacggtgaaaaacgagtcgcgcccgcgaaacacatacattcttatcccaagacgatcggatagcactacattaaacgaatgacttaattgtgatatgacgatcatatgggccttacctaccgtaggtgccatagccgtggagcgatcaagcgaacgatggaacggatgatatcggaacagatgatcactt

SEQ ID NO: 72297 - DNA, 611 bp, Oryza sativa
  Clone ID: PAT_MRT4530_7268C.1
ggagcaaaggggtaccctatttcaagagcatttgggaaatgcttgcctaacatgcgacatagtgcaagaaaatcttgaaccggcacatacaaaggttcttgatatgcttatctcaattctcatctatactagagcagctaatgagcacggttgatctttggatgccaactttacaggttcatagtgacaaggcattttagacctcatagatccatgggtgctgcttgctcctccactcagcgatgcccttaaggaaccacagagcagtcttcttgctggcgttctagaccgaaaaccttccgtggatgacttttctgccgatgtcgacagccaactcgccaaggatggtgcccggttcagcgcccagggggttggtggtccccacaagcttacggccggaggagactaccttcttgcccttccacaccatggggacgacggggccggagaccatttacttcacgaaccctccgaaaaatgtcttggaggacagataggggtagtgcttctcgggaaacgacttctccacggtgatgagcttactggcttagaggcagaatcccttgttctccaaacggccgaagacctcgccattgaggcccctctggacg

SEQ ID NO: 72298 - DNA, 309 bp, Oryza sativa
  Clone ID: PAT_MRT4530_72690C.1
cttccaaatttcatatggcttcatttcttattccaatttaaaatctgtaacaaggattccatccgaattatttaaattagaacccatgtctcgatactcaattagagcgacatgtatccactagcagcgtcatttacagagacactacctacactgtgaatgactatttgtgtattagacccctctctttctttctcgagaggatggtcgtcttcctccgcaacgcctggtacgccatcgccgccttcaccttctccgatatctcctccgcgccgatcaccccggcctccccctcccagctccaggtgt

SEQ ID NO: 72299 - DNA, 177 bp, Oryza sativa
  Clone ID: PAT_MRT4530_72691C.1
attatttacagagagagagtgagagtgagagagagagagtgtgagagagagagagagagcaaccaatcgaagaggcatatggatccaagagactgagaggaaaggagatgagcggcagaaattgctgcactctatcgaggccaagaaagccacccgagtcttcttttttccattaga

SEQ ID NO: 72300 - DNA, 126 bp, Oryza sativa
  Clone ID: PAT_MRT4530_72692C.1
atggctggtggccgtgctctgaaccgcatgctgtgcctcctcggcgtttgcgtcatcaacagtgttaatgtggatgcagtacaacaccatatggtcgaattttccaggttttcttatactacttaa

SEQ ID NO: 72301 - DNA, 501 bp, Oryza sativa
  Clone ID: PAT_MRT4530_72693C.1
atgtcgcaaggtggaggcatcatcgacaggcgccgccacggtgcacgccttcatctcgaagcagtaggactaggtatcattgacctcggcggcgaggggggcggagttgctaaagcccttggcggcttgggcggggggcggggggcgaggaggtggtcgagggtggcgtcaagctcgacctccttctcccgcagtcgtcgcgctgctgaagccacacgcaccagcgcctggcactgtcgcttctgcacctacttcagcccggcgcgcatccactcgcactccatccgcaccaccgcgtcaatcttcgctctatgtggtcacaactccgacagtagtgcatctcccaccgccatagccgaggccacgaaccacccactcattgacgtcattgccgactccaccaatcggctcatcggtgcagccaccacaaccagctgcatcatccccgggatcggcagcagcgccgcggacaccactaaccccactgctgttgttgcatga

SEQ ID NO: 72302 - DNA, 1818 bp, Oryza sativa
  Clone ID: PAT_MRT4530_72694C.1
ccggccgggaagagagagcagacaccaccacaccatccaaccaaccaaattcctctctcctccgccgcgcccgcgccgcagcaagcaggagggcctccgcccgtgcgatgccggcggcggctaggctacgggcggcccggtgatggcgaccttcttccgcagcgccaacctcgcctccagggtcttcgaccgccagttcctctccccacgccccggcgctactgttaacactgttagacagttctatgagaacttggttccgagttacactatatgtgacatagattgcccagattattcatttcgtaaattcactgatgatggcaactatcttgtggcttttagccggaaccaccaagatttaatcgtgtaccgtcccatctggccaacattttcatgcaatgagccatgcgactctcatgatcttccacccaaagcaaagaaattcgacagcttctttaagcagctctactcaatttcacttgcatctagcaatgaatacatctgcaaggactttttcctttacatggagtgccatcagtttggcttatttgccacatcaactgcacaaagcaacgattcaagtgccactgagggtgctattcatggggtaccatcaattgagaaaattactttctatcttgtcaggctagacgatggcgcaatactagatgagaaagctttccgcaatgattttatcaatctggctcatagtattggagcttacttgtatgaggacctgctatgcattgtctctcttcgatatcaaacaattcatgtcctacagatacgagattcaggcaaccttgttgaagtacgcaaaattggtgcattttgccaggaagatgatgagctatttctccattcacatggtcaggctgcacgaggtgtttcttttcttcctggcatcaagcaacggttgttgtcatttatttttcgcaagacatggaatgaggaatctgatcagaccttgagagtccagcatctgaagaagaagttctattttcactttcaagactatgttgatcttatcatatggaaggtgcagtttttggatcgtcatcacctatttatcaagtttggtagtgtggatggaggggtttctcgcagcactgaacagaattcagcattctttgctgtgtacaacatggagacgacagatattgtttcactctatcagaattcttcggaggagctctattcattgtttgaatatttttatgaccattttcacacaaatccacaaaattcatcgcatggaaattttatctcgtcacattccaataatgttcatgctctcgatcaacttcggacaattaaaaataaagcaaacagcacctcacagcagtttgtgaaaaagatgatggcgtcactaccttacacttgtcaatcacaaagtccttcgccatactttgacctatcattgtttcggtatgatgagaagctgatttcagcgattgatcggcacagacactgtacagagcatccaataaaatttatatcagtgaaacagccaaatgttgtcaaattcaagataaaaccaggttcagattctggtgcttctgacagcagggcaaaaagaatatcttccttcttgtttcacccatttttccctctcgcactttctattcagcagacatatatgcagccaactgttgtcaatttacatttcaggagatagaacgatattgccgttccttcaattgtatttgtaacagttgtgagcggtgcacagctcagtaaaaattttggccgcttgtagtaggatgttttatcggcaaagatcttattataggccaaaaaaaaaacccaaccccc

SEQ ID NO: 72303 - DNA, 1047 bp, Oryza sativa
  Clone ID: PAT_MRT4530_72695C.1
tactccaatgtcgccggaataacccccggggccgccgttttgtaaggctggctactatcgggctaaaattttagagtaaattggaaagtttaacgcactattccatcgatgacaattcctcaccgtgtcaaacccgcacgaggagtccccctattaatcggagcaatggtggggaacaagaccgttttccctcgggggttcggtccaccgattggaactaggtcctccgctctccggtgggtggaaaaatgtttttgttcgccctaaggggaccgctgcccgcccgcaaaaattttgaaacgcacacggatttaatgtttaactacgtcttaaaccaaacgggttgttttgatttctcggacccacaacggtttattatgtataacaccaagtcgcgtactgttaaacagcttctcgaggaagcccctttttgagaatcacacgggagccttcccgagccttcaagtgtatgcgcggcaacaacataccaatcggggtaagcaggccacatcgccacgaaagcgcttagcccttgcggtaccccagcgtatactgttgcccacccgggctggtactttgaccgccccttccccgtgggctcccccgggacaacatggagcgcggagcggcagtcacagctgtcgcgttccgagctctccctaggattatctctctatgcaaaagttgtatacctattagcaatgtatgcgcgtacatatatgtacagagtctccccatgttcacggcggttccttgtgcactacacctctagccgccttgcgtgcacttagaccgaagtctatttatgtgaagtctcctctgggttccaccaatgtttgctcgtctgggacacttttccgtgtgtattccggatgtatattgtaattatattaagcgtgtacccacgattcgtggggtgtcctttcgggtaatttgtccaattaagctacaagaatggttgcaattcactggacttatgaaagtcgggactgatctgcagacccccctttcacaaggatgttttcattaatcaaaaaaaaaaaaaaa

SEQ ID NO: 72304 - DNA, 169 bp, Oryza sativa
  Clone ID: PAT_MRT4530_72696C.1
actttatttttttttgccccgacacttttcacaataccaaactgaggggcaatttggtagacgcgcatacatgcctgataccgcttttcagacgtagcgaaaataggcaattctctaagaaaattcaacatggcagactgcaaagagcacacgtggatactacctaggg

SEQ ID NO: 72305 - DNA, 534 bp, Oryza sativa
  Clone ID: PAT_MRT4530_72697C.1
gcacgtggtccagtgaagttagcaagaagggcattatctgccctcaagggtgctgtaaaggaaaacccctgtgtcattatggggcatagctttcaatgtgtctgtccagaactgagccgtctgtggtgtagaggttaggaccacgtgtcaggctgtgctgctgaacgacgtgctttgtattcgttccagatggcaaaggggacacgaaaatgttcatagcagcccaaaagttatattacaggtcttgaatgcctagactgacatatgctaattatcctcaatagattgatagcccatcaccggctaacattatgtctcttggcctgaagacctacatcaaatgttcacttcttttgtcggattggcttcacacacttttgtagacgaaggcatttgtctaaaatctttcatgaaacatgaatcgtttataatttgccagcttaacctcgaagcctctattgcgcactgacctactaaatcaactctcacctcccaccttgtgatgtgaatattctatcccccaaccacccacat

SEQ ID NO: 72306 - DNA, 294 bp, Oryza sativa
  Clone ID: PAT_MRT4530_72698C.1
gggggtggagtaacactaatttgggatagttttttttttttttattacaaaatattttattgaatcttaaaccaagacggaaatggggtaaaattacacacgaacactgttagtacaacaaatttttttccttcaccaggaacataaccaacggcaaaactggggttgggctcttatggaacatcttccccagaatgtaggttatcaaattccactgcagtttgtctacggatagagtttggttactcctttaaaacatcttccctaagggggtgaccaaatgacactgcaata

SEQ ID NO: 72307 - DNA, 396 bp, Oryza sativa
  unsure (1)..(396): unsure at all n locations
  Clone ID: PAT_MRT4530_72699C.1
naaaatttggtttatgtttcatgtttagcggatgatggatataattgctttttcgatcaccaattatgttcaattatattcaagaataagtgtgtgggtcttgccatataacaaggcaagctttatatgttgcctaaacataatgttgcgtgcaatagtatgtcttccccgtctacgaatgtaagaaataagcgcaaacgatgcaatgacgaaacatctgcgaaattgtggcactgtcatttaggccacatttcgaaggggataattgaacgattaattaaagaagaaattttgtatccgttagactttatggattccgaatattgcatcgattgtattaaaggaaagtatgttaaacaaataaagaaaggagccatacgaagtctaggatccatg

SEQ ID NO: 72308 - DNA, 363 bp, Oryza sativa
  Clone ID: PAT_MRT4530_7269C.1
tttctttatctaacaaacttaaaaaccaacttgtggactttcaatcaaccaaggtgtcactaaaaacatattcaactgttataatagtacagaaatgtcttattcatgacacaatacatatggtttgacaaaattctagcatttgaatacagagatgtacatttgggactggggtatttttcaaagactccaacatgtactctcattactattttaaaaaaaactctaccttttatgattctattatatctaaaaccatagcctaaactttttgcatgacaaacatcattagttacactcatgagagtactagttaactagttatgagtacacacgttataacttacacgattcccaggtttc

SEQ ID NO: 72309 - DNA, 405 bp, Oryza sativa
  Clone ID: PAT_MRT4530_726C.1
atgtgttcatgtaggctacatttagcattgaggacgccaacaggcttacccgctctgccggtgctgaagctccgcctcgaggacatcgatgccaccgtcatcgtgggtggagattggagcagccgggacaaaatcatgctttatgcagcggcggtcgttgccagtggcggtggcgacattgcgtgcaagcggcgacgagcccgctgttgcctcgagctttctcgcggtcaaggatgctcggagccgccaccgctcctcctcggcctccgccagcacgttacgaggagcccagtagccgccaccgctcctcctcaacctccgccggagccccgtaggcgccaccagcacgtgcgagaggaggctcgcaactgccacggctcctcggccagggatagagagagatag

SEQ ID NO: 72310 - DNA, 635 bp, Oryza sativa
  Clone ID: PAT_MRT4530_72700C.1
ggtgtgggagtggctcttttgtcatgggtcttctggaagaacttggctttcccagatcgatgatcaagccttatcataaccctgaggatattcacaacgcactctccagaggaagcaaaaatggtgggattgctgctctggtgggtgaaattccatatatcaaattatttctcgcaaagaactgcaagaggtacacaatgattggaccaatttataaaactgctggttttggatatgcatttccaaagggatcccctctagttggagacatctcacaggcaatcctcaatataacagggggagacactataattcaaattgaacagaaatgggtgcgagataagaacagttgccagaatgaaggctccatcattggttcagggagtctcacctttgccagttttgaaggaccaatcatccttaccggagttgtctcgacttcttctctcttggtcgccttaataatactagccaagcaattgggagaaattttcctgttatgtcctgacttgaccaaaaagaggatcatggatatgatccttgaacggcgcggcatcctcgggatgaaccaaaggctgttcaaaggaagaaattgccttgccattttacccttatggcatcatagtcaagaataa

SEQ ID NO: 72311 - DNA, 177 bp, Oryza sativa
  Clone ID: PAT_MRT4530_72701C.1
atggtgggatgggactgggctcgcaagtggcagccgggggagggggcatctctgcatgatgatagcgggctagaggacgtcagtctcgcatcgtcgctgaccggctcagccctcctcgctgcggtggcgccgcagctaccaccgtcgtccatggaatgccggccactctcaccctaa

SEQ ID NO: 72312 - DNA, 355 bp, Oryza sativa
  Clone ID: PAT_MRT4530_72702C.1
aggaaggaaaggggtggtgtctttttatatccccctaaggttcacaggtcccatcccaccgggcccgggggggcccccggggtttccgggccgggccctgggggggtcccaactttccctttgggggggcgttttaaggctggggggaatcaggggcaaagggggtcccggggggaaatgggtttccgctcccaattccccacaacaaacgggcccggggggcttaagggtaaacccgggggggcctcttgggggggccacccccctttaggggggtggcgccccgggcccttttcccggcgggaaacccgggcgggccgccgcttttattaatccggccccccccggggggggg

SEQ ID NO: 72313 - DNA, 1734 bp, Oryza sativa
  Clone ID: PAT_MRT4530_72703C.1
atgtcttcaccaactggctgccttcgtctgccgccgactagtgtctccgccttcatggttggatggtcacaccaccattgttgggcatctatatcttcaccgaccggctgccttcgtctaccgccgactggtgtctccgcattcattgttggatggtcacactaccgttgttgggcgtctacgtcttcttcaccgaccgaccgcctcgtctgctatcgattggtgtctccgcctggacggctggcctattatgccgccattgatggggatctacgtcttcaccatcagcttgccgtcaccgccgccaactggtttcctcgcctccacggctggttgatcacaccacaatcgatgagcgtcatcgtcttcactgccagctcgtcttcgccgccgtccatggagtcttcgctttcacggctggcctattataccgctactcaaggacgtcttcgttttcatcattattctgcttcctctatcggcgactgcacctctgcttcatcggtcgtgatgtctccaccgttgctaatgggtgactacgtcttcgcctccggggttttagctccgcctccgctcgtcgccatgaccatcccaatccccactcccgtcgtctaccccgagatggccggctctgcctcctccccgtacgtcgcgcccctcatctcctcccggatcaccggtcgcctccgccccgcctcggcgcggacggatcccctcggcctagccgccgccgccgccgctgtcagagtccgttcctggaggcgcttcgcgggtgcccgctgcgaagtcgcgctcctcccggcccggaggatcagcgcgcagccccgtcgccggaacgccctgcgcgagaaggcatcgccgccgctgccagccgatccgcaggtactagaagaatctggttctttggatgtgcagcggctgccggatcttgatcgcgagccgggaatttctggtggtctggatgccgttacaagtggaaatattgtttcgaaatggaacttggaaggtgggagtgatgtggttggacttggagttgcacagactggtcctggaatcgttggcaggggtggcaatacagaggtacaagggcgcggtggcaatgtggaggaggttatgatctctcgtgcaggagcaatggctaatcaatttggaagtggtgaatgtgaggttccaacgcttagctcatcatttccgtttctcacagttgaggcgaaggaaccgctggttgtagatgctcagtttttggctgtgcaaatagacaagcctcgtttgaggagcattgcatggagcggttttgctgcgctgtgtgctgcttgtgttttgcttgcggtgtccaagttgatttggggaaatggtaagaaatacctgtcaaggaacatgtttgacattcttaggcctcggatgaacaagggtgaatcgggcaaaggtggaatcaaggttctcaagaatgatacattcagtgaagctcggcctaatggcttcagtattagtacgatgaggaaggaaaaatcaaaacacaatttccaacctctggaaagtgtagaggcagcagcagtaaaatttaaaaccaataggcatggtgacaatatcatgaacgagagagcaattgatttcgacatatcaaatttgggtgtaaccaccaccaagaaaatgacaaagagaaggtcattgtcaaagcgtaaaaagcctgctaatggactcggaggagccactgacgtgccaccagatgtataa

SEQ ID NO: 72314 - DNA, 481 bp, Oryza sativa
  Clone ID: PAT_MRT4530_72704C.1
tcagagaacctccaatacgatgtcttcaagaagttgtgacataatgaatccatcactattctggacatccaaaacaaggttttcacccggagagtatagaagcatggctgcgacgataatggccaaccgggtcgatacatcggagggaacaccaatgccatccacattgccacgcaacaagatccggatcagcgtagccacacaaccgaagttgtcccaaccactcaaggccacatctgaggtcgccatagctccaaggccgtcaaagctgcctagacttgaagccacctcagccgcctcccttcatgtcagagctgtcctgctcgtcgtagccaacacaccacatcatctggtgaggaggagagatggggatgaaactgcacgaaagggtggaggttggcccaatgttgagatctttgactatcgcctgagcatagaaatgtaccacctggctccctacctggataccctcctccactag

SEQ ID NO: 72315 - DNA, 2886 bp, Oryza sativa
  Clone ID: PAT_MRT4530_72705C.1
atgaccatcccaatccccactcccgtcgtctaccccgagatggccggctctgcctcctccccgtacgtcgcgcccctcatctcctcccggatcaccggtcgcctccgccccgcctcggcgcggacggatcccctcggcctagccgccgccgccgccgctgtcagagtccgttcctggaggcgcttcgcgggtgcccgctgcgaagtcgcgctcctcccggcccggaggatcagcgcgcagccccgtcgccggaacgccctgcgcgagaaggcatcgccgccgctgccagccgatccgcaggtactagaagaatctggttctttggatgtgcagcggctgccggatcttgatcgcgagccgggaatttctggtggtctggatgccgttacaagtggaaatattgtttcgaaatggaacttggaaggtgggagtgatgtggttggacttggagttgcacagactggtcctggaatcgttggcaggggtggcaatacagaggtacaagggcgcggtggcaatgtggaggaggttatgatctctcgtgcaggagcaatggctaatcaatttggaagtggtgaatgtgaggttccaacgcttagctcatcatttccgtttctcacagttgaggcgaaggaaccgctggttgtagatgctcagtttttggctgtgcaaatagacaagcctcgtttgaggagcattgcatggagcggttttgctgcgctgtgtgctgcttgtgttttgcttgcggtgtccaagttgatttggggaaatggtaagaaatacctgtcaaggaacatgtttgacattcttaggcctcggatgaacaagggtgaatcgggcaaaggtggaatcaaggttctcaagaatgtaaaatgtccagaagatttattgggaagaccacaattagacaggcacaaattgatgaataacatcaaaagagccaagcaatctagagaattgtttgacctcagtagtgtatttggttactgtagtgttgctacttgttatgatgtaattataacagagaccagaagaatggtaacaaatgttcacacgttacttgaaggaatccttgaacaaagcaaaacaaagagcaaacattctgtgttgtttccacaccctgctgctaccaatggccaagaggtttctgcaagtcatggctgtgctgaattacctgatatcagtatatccaataatattattggggaaactgtggagtcgtctgtggatttcaaaagcagtgcacaagtcatggacaatagtgtaaaaaatcagaataatgttggagatattgaaccacctgtggacacacctactaatgatatgccgactgatgcaaaggatagtatacccatggtgcacgtggttgaaatagaagaacagattggttctccagatgaatgtattgacggtcttaatagtatcagcatcccatcatctgaatttgaaggacaaaaacaatttccagacataagtgtgaagaatgtggatggcatttttggaataaaatcatcacagatcagtagtgatacagatgtgattggtacaaatgataattcacacaagtttagcattaatgttgcctcaaaaacaactggtgatttgtcatctggctgttccaacagcataccatctgaatcagaaagtaaggaaatacccgtggatattaatcggaatgatctcaattactttcaagaaattgaagcacaaagtacctttgcaaattatgatgctcagacagttcagtacgaagaaatttctcatagagtaagcatgataactaaagaagcttgtataaatccagcaatggctgatattttgattacaaaatcacctcagagaatcggtgaggagcctgtggatctgatgagaggtaatgcacaatccatgcaagaactagaaccatccagctctattagggatcacaaacagatagttcttgcaaatcagaaaaacaacataataagtagaagtcacaatgaaacacaggctagttcagaaatagacagtattgggacaaatgataatgctagcacatcttcagtttatgacctgccggaagaatcaatacaccaaagtgcaaaaaattcaacagagaacacatcttataacgaagagcctgaagaatctattattaaaaggaaaatcaaattacatcaagaaatgtgcaacgataaggatgctcaaacaaagcacaaagtagaaggtgtatctgaaattggccctgagtttggtccatcaaatgatgtatgtaaaactgaaacagtggcaaagaaacggtcaaagaaaacgccatgtgataagggacttaaagtgccagaacaggatatagttcaatgtaacagcatggctgataagaaaagcagtagcaagaatgtcaaaaggacaaggaaaaatctgaaaagtgcacttcgcaaccaaggaactcaaacaacacaagaaatttctgaaacagcactcgtggtaaattcgcctgatgatgcacccagagctgaaaacataagaccttttggtgggtcaggttcatcgacagaaacacaatctccaatgttttcagatacattcagtgaagctcggcctaatggcttcagtattagtacgatgaggaaggaaaaatcaaaacacaatttccaacctctggaaagtgtagaggcagcagcagtaaaatttaaaaccaataggcatggtgacaatatcatgaacgagagagcaattgatttcgacatatcaaatttgggtgtaaccaccaccaagaaaatgacaaagagaaggtcattgtcaaagcgtaaaaagcctgctaatggactcggaggagccactgacgtgccaccagatggcttttcggcagagtggcagcacctagttaatgtgcaacaaattgcttga

SEQ ID NO: 72316 - DNA, 142 bp, Oryza sativa
  unsure (1)..(142): unsure at all n locations
  Clone ID: PAT_MRT4530_72706C.1
gtttcccaaggacccgaaaaagattcnaactttggggtatcgtgcaaaaaaccgcaacgggaatagtcgtctnacnggtgaccccaacnaagtaccgataagccacggtccggtnacgggggtcgtgcaccagccagcttga

SEQ ID NO: 72317 - DNA, 774 bp, Oryza sativa
  Clone ID: PAT_MRT4530_72707C.1
atgtctggttgcgtgtgccgcagacgtgtcggagaacggttcgtgcctttgcgcacgtggaccaaattgatcctgatcgctgatcggagcgccgccgccccacctcctccccaccaacgccgtcgaccccgctcctcgccgaccgtcaaccgcgtcgccgccgtcccccactcaagccgccaccggccccccactgctcgatttgttttcttgtccatggagggtggtggcttcgatttcttctccgaagatccaaatccaagcgtctggccgtcgcagcccatctatcgatataataagtactccgtgttactactagtagtattctgtttgcatgttcctatagcaacttttactagcaagcgagttgaagccatcgacaaaaaggcatcatcatacgcagcgagggcccaccgggcagcttctccgccaacctctcgacgccgacgcgacgcctggaaaaaggagaccgaccgcgatgcccgctgtctcgctcgccacttatacccgcgataccgtggaacagagatagagccttccatggggtacttccgcgactgctgtactccacaccgacgccgcacaggcagcggcggatctgcgaaccggcggcgttcccgcatacgtgtgagtctgctacggccgcggcctccttcctgcatcctccatcctgtctggcagcggttggaagagctgttgctgctcgtcgtcctttcctgctcggcggcggggcgccgggccgagggcgtggccatggaagaagaaaaagcccag

SEQ ID NO: 72318 - DNA, 4306 bp, Oryza sativa
  Clone ID: PAT_MRT4530_72708C.1
atggagaagcaagctggggaattcgagaagatgctcgagggaatccagaacgccatcgacgccgtggtgttgaagcaggacgagacacaggcggtggtgctcaagttggatcaagcgatgaccagtcggcgaccacaagtggatgcagcagtcaagggacttcgagctaagatgaacgagctgaagaatcaagtggtgatcctggaaaaatttcgcggcgagtttggcaattcgtcgaacatgtcgcgtgtagtagcttcatcagcacagaggcggagcgacgaggttgatagacctcttcctctgcttcccacgcccgcgtcgttcatcgcattaacgtcggctggtgattcgggcccagatgtccaccgcgttgccacaaatcaccgggggaaagcactgggagttgttactccttctgtgctacctccggtcacgggtacgacctgttctccttttaattctcgttctgctatggattctttttctcgggatgagattggagtttcggaggagcggggttataatcatcgggtgccgaagttggattttccacagtttgatggggtggatccgcagaattggcgtatgagatgcgagcattattttggggtttatggtactcatcctatgctttgggttcgtgtggccaccatttttttcatgggaagagcagcatcgtggttgcgttcttcaaaggctcatttgcgttttggggagtggactgaattttgtttagcagtggatagaaaatttgatcgtgataggcatcagatgttaattcgtcagatagagcaggttaagcaaatggggtcggtggaagagttttatgagcgatttgatgatttgatgaaccagttgctagcctatgatcctatgtacaatcctcttacgattgtgcataggttcactgaggaattacgatctgaaattcatcatgctgttatgttacaacgaccccgcgatctcgagactgctcttgccgttgcttgtttacaggaggaatggttggaaactcagaagccgaaggaatttcgcaaagtgggggataatgtgcagcatgaagtgtttgcgattcttcatcaagatgacagtgacaatggtaattcttcatctgatgaacttgatactactcctttgttggcattgtcggttcatgctattcagggcactactgtggctcaaacaatgcacttgcaagatgttattcagggttatgctgtgcttattctagtggattcaggctgttcttgcagttttatcagttcatctgtagtttctcatttgttagatctgttacagttgcatgtattttttcaagtaaaggtggctaatgggcaaacacttcaatgtcagtctgaattggctagagtaccttggtcaattcaaggtcaacaatttacttctactttgaaagtgttgccacttcaaagttatgatatgattttagggatggattggttggaacaatatagtcccatggatattgattggcaacagaaaattataagatttcatatggatgaccagctagtgactttatgtggagtggttccatctgtggcttctgattcagtattatctgctattgagttacatcaacttcacttgtcgggatccattgaaggattggttcggttacaggctttggaatcagaaggaagtcagtccatgccaattcctgctaacattcagcaattgttacaagaatttgctgctgtgtttgacgaaccgcaaggacttccaccaactcgtgattgtgatcacaccattcctttaattccaggaactcagcctgttaacgttcggccatatcgatacactcctttgcaaaaagatgaaatcgagagacaagttgctgacatgctagacagaggtatcattaaacatagctccagtcctttttcttcaccggttcttttggttaaaaagaaggatggttcatggcggttttgtgttgattatcgtcatctcaatgctttaacagtcaaaaacaaatatcctttgcctataatcgatgagttattggatgagttagctggtgcatgttggttttctaaattggatcttcgttcgggttatcatcaaattcaaatgcatcctaatgatgaacacaaaacagcttttaagacacatcatggtcattttgagtttcgcgttcttccttttggtcttactagcactccggctacatttgaaggtgtgatgaactctggtttggccacacatctgcgccaaagtgtcctagtttttgtggatgacattttggtatatagtcagactttggcagatcatgaattgcatttgagctgtgtcttgcaaattctgactgagcatcagttgaaagtcaaacaatctaagtgttcctttgctcaacctcaattagcttatttgggacatgtgattagtgctcaaggtgtggctacggatgaagagaaaattgtggctgtcaaaaattggaacacaccatcttcagtcaaagaattacggagtttcttaggtttatcaggatactatcgcaaatttgtgcgtaattatggcatcatttgcaaacctttgactgatttgttgaagaaaggacagttgtttgtttggacatcagttcatgaggaagcatttcttactctaaaatcagccttgatatcaaccccagttctagctatgccagattttcataaacaatttgtcgttgaaactgatgcatctgacaaaggaatcagtgcagttttaatgcaagttgaccttcctgttgcgttcttgagtaaagctcttggtcctcgcgcacagtgtctttccacatatgaaaaagaaagtttagctattatgttggctgtggatcactggcgttcctatttacaacatgcagaattcgttattaggacagatcatcgcagtttggcttatttggagaatcagcgtttgtctacaacttggcaacaaaaggcactcaccaagttgatgggcttgcgttatcgcattgtatataaaaaaagcattccttcctggcttcaggatgttccttcaggttatgtcactgaccctgatacccagtgtattctcaaatccttggcaaacaatgggaagcatcatgctaattttgagttgcagtctgagattctgtactttaagaaacgaatttggattggcgataatattcctttgcagcaacagattctagcaaatcttcatactgctgctgtaggtggtcattcagggaatttggccacttatcagagggtgaaacagttgtttgcttggccaggtttgagacaatctgttcactcatttgttcagacttgtgatatttgtcaaagagcaaaatctgaacatgttaaattgcctggtttgctgcaacctttggaggttcctgatcatgcttggcagatcatctcgatggattttatcgaacgtctgccattatcagcttcttgcaatgtgatcttggtcatcgttgacaagttttccaagtttgcacattttttggcacttcgacatccttacacagctttgtcagtcgctcaactgttcatggatcagaggggtgccaaacttattgaacaagttcaggttgagtgggttggtgcatcttctccagccattacttgggaaaatttcgaggagttgcgtcacaagtttccggcagcgccagcttggggtcaagctggttctcaagaagggaggaatgtgacgccagaagctactacatcatcttcttgcgcgaagacaaggttcaagccaagtgggccatctgatacagtccgagttcttcgctgttctaacccagttctttccaattctaactctgaaacttcctatctctctttccctctcactattgctcgtaacagaaccttcaagaactgctatgtgtacacttcatatggcatattatttgtttcattttcattttcatactcaagacagcagagagcggagagaactatgatcgctggaaacggcggatggctgaactacaagaggcaagaggctagcaacctacagcgagagcggggcgcatcgctcggcgagaagcgacaccatggccagcgcagcgccgagcagccgcaggaggagcacgacgaggacggtagggctcggcgtggacaggcattgcagcgtgaaggtacagccagagccgagctggaggaggagcagcagcagcagccgctggtgattgcaatggcgcggcgacgatgcttgtggtggttgatgcgggatcaggatcctcgggctgtcgatccgccgctggccctcgtgcccctcatctgccatgtgggcccgatgtgtcgtcggacccatatattag

SEQ ID NO: 72319 - DNA, 1847 bp, Oryza sativa
  Clone ID: PAT_MRT4530_72709C.1
cttcttctccttctctacggggagttgcgggctccggcgggcgcgcgacgagaggatcgccgaagagtgtgggagactgagattttgagtttctaatatcgattttcattccaagggagaattgatatacatatgaaactctgagaaggatgggttatggcatgagtaggatggaggaggaatacagcgagcatgaagatcagaataatggtggatctaattcacaagtgaataatgagttcttaaacacacataatgatattttccatatgactcaaataagatcaggacctagtgaaagtcttcgcaagtctattggtacaagcaaagatgtgatatcgacaaccaggttattgtctggaagggaaattaattcttcaggaaatgggaagttctcttcagttgatcgtgcgtttcttcttggtcgttatcttccagttgatggccctgaaatagtggacaggatggattcccgagcttatgtttcacagttttctgctgatggatctctttttgttgctggttttcagggaagccacataagaatatatgatgttgataaaggttggaaagtacatagggacattcatgctagaagtttgagatggaccattagtgacgcatcactttcccctgatcaacagtttcttgtctactccagtctagcaccgattatccatatcgtcaatgttgggactgctgcaaaacaatcatatgctaatatcactgacatccacgatggactagatttttcacagcatgaagatgttcgatatacatttggaatattttctgttaaattctcttctgatggccgagagcttgttgctggcagtaacgatgattcaatatatgtttatgaccttgtggcaaacaaactaacgttgcgtttgcctgctcatcattctgatgtcaacacagtagcatttgctgacgaaactggccatctcatatattctggaagtgatgataatttatgcaaggtctgggataggcgatgtttatccacagaagaacctgctggagttttgactgggcatttgcatggcattactcatattgatagccgtggagatggtcggtgtttcatatcaaatggaaaagaccaagctatcaaaatgtgggacatcaggaaaatgacatccaatgctgatagttatgaagacagaacctcaaattgggactatagatattcaagatatccacaacagtataagcaactaaagcatccccatgatcagtcaatagctacatactggggccattcagttcttcgtacattgatccgttgctatttttctcctgcatatagcacaggacagaagtacatatatacaggatcctatgattctagtgtttgtatctacgatgtggtgagcggatcacaagttgcaaaactcaaaggatatcatcagctggcaattcgagactgcagttggcatcccttcgaccctatgcttgtcagctcatcctgggacggccgggttgccaagtggtccaggtcttcctgtcagcaagaagagactactgatctcgattgattcggtgcttgcgatcttccattagcatatatgcagataatggcacgaaacaaatgggtttaaacagattacacagtttggctagatattagatatattgtgaagaagatggcgcgtcgtaaaaaatggatactcgtagtcagagtcatgcgctcgtccgggaatacacagagttttctttggttgtctgtacagcgtttcccttggtggagctttacatgtggtccgtatacatgtcaatctgtatatgtcactgatttatggagcatgagctgggagttaatttgatccgtgcaaattcacaac

SEQ ID NO: 72320 - DNA, 541 bp, Oryza sativa
  Clone ID: PAT_MRT4530_7270C.1
ctagtggatccccgggctgcaggtttttttttttttttaaattgttccttataacattagatggagtatttacacaagctatagagacaagaggacctgttctattagagagtatacctaagtagcattgaatctacaaaaagatggcaaaccacgtagtgccacgatctgtaactccagattccttttagcaatctgcataacagtaactgattaactgacaagatgttggtgcttccaggtcgtcaaatgcaaatgcgactctccactgcttccatttgaattctcagatatggactcagcacttgtcgtagctagctcggagattttatatcacttctttgccagaccaccagtgcccatgacttctgtagaggaacacagtgctagggcttgaacttgattacttctctagatatcctcaattcctcataatgttagggcttgaatttgatcacttctctagctatcctcatgcagatcacagagagaatggccgtcaatcatgccgggaaaaataactgctcatcatggctcaatc

SEQ ID NO: 72321 - DNA, 380 bp, Oryza sativa
  Clone ID: PAT_MRT4530_72710C.1
cccacgcgtccgacatgacgacgcctcgcgccaccaccaccacgtcgcccttctcctctctcctcctgctcccgatctccccctccgccgcgactcctccgcgccgcgccaggacgccgccgccggcggtggcacatggcggcgtgcggtggacggctggcgggaggcggcgacggcgagggtgccgggcggcggcggcggtggtcgaggacggcgtgcttctccccaaagaacaggaggacgacgcgtcggcggcgagatactactgagggagggggggacctcgtgtacctcgccaggaggggtccggacacgcgcgcttgcgttacggtgtctaccggcgctggtgctgtaccgagacgctcagcgtgcttcgtgca

SEQ ID NO: 72322 - DNA, 458 bp, Oryza sativa
  Clone ID: PAT_MRT4530_72711C.1
cgattatccatatcgtcaatgttgggactgctgcaaaacaatcatatgctaatatccactgacatccacgatggactagatttttcacagcatgaagatgttcgatatacatttggaatattttctgttaaattctcttctgatggccgagagcttgttgctggcagtaacgatgattcaatatatgtttatgaccttgtggcaaacaaactaacgttgcgtttgcctgctcatcattctgatgtcaacacagtagcatttgctgacgaaactggccatctcatatattctggaagtgatgataatttatgcaagagtgttcccagattgcaaggtgcaataataggattaagttaaatccttcatatctcttctttttgctggtctgggataggcgatgtttatccacagaagaacctgctggagttttgactgggcatttgcatggcattactcat

SEQ ID NO: 72323 - DNA, 1566 bp, Oryza sativa
  Clone ID: PAT_MRT4530_72712C.1
cgagcccgggcgggcgcccggcaggggggggacgcctccccgccgcgcgtcccggcgcacggattctcgtcgcggcgtgccatttccggcggggcggtgcactgcattatggttgcctcgctcgctcgatcgatcccctctcctcttccaatcccatccccaaatcccgaatcctccatcgagatcgatcgacgtcgagcggagcgaaggggggatatgggcggcgtggcggcgggcaccaggtggatccaccacgtccggcggctcagcgccgccaaggtgtcggcggacgccctggagcgcggccagagccgggtcatcgacgcctccctcaccctcatccgcgagcgcgccaagctcaaggcagagttgctgcgcgctcttggtggtgtgaaagcttcagcatgcctcttaggtgttcctcttggtcacaactcatcgttcttacagggacctgcatttgctcctccccggataagggaagccatttggtgtggaagtaccaactctagcacagaagaaggcaaagaactcaatgatcctcgagtgctaacagatgttggtgatgtccccatacaagagattcgtgactgtggtgttgaagatgacagattgatgaatgttgtaagcgagtctgtcaaaacagtgatggaggaagatcctcttcggccattggtcctgggaggcgatcactcaatatcttatccagttgttagggctgtgtctgaaaagcttggtggacctgttgacattcttcaccttgacgcacatccagatatctacgatgcttttgaaggaaacatctattcgcatgcttcttcatttgcaagattttggaaggaggttatgctaggaggcttctacaggttggaatcagatcaattacccccgaagggcgtgagcaggggaagagatttggtgtggaacagtatgagatgcgcactttttcaaaagatagggagaagcttgaaagtctgaaacttggggaaggtgtgaagggagtgtacatctcagttgacgtggactgcctcgatcccgctttcgcgccaggtgtctctcacattgagccaggaggcctctccttccgcgacgtgctcaacatcctccataacctgcaaggagatgttgtcgccggagatgtggtggagttcaacccgcagcgtgacacggtggacgggatgacggctatggttgcagccaagctggtccgggagctcacagccaagatctccaagtgagcatccattcagattcagggcatatcatatcaccaaccaaccccttgagtctgaagcagcaaagaggatgattcccagactcctttagctgttagtctaggttcctatgtagtagacatcagctatgccagattttgtatgtgacagtcatttatatactcattaggttgcaataatgtttgcctccatttagcacttgtgatgttatggttatccctcatctccgggcgcgtgctctcccccgtgcaaccgtttttgtcgtgctttcaggcaacatgctgacgaccaaaatgcttggcccataagagtaataaattattggcatttt

SEQ ID NO: 72324 - DNA, 234 bp, Oryza sativa
  Clone ID: PAT_MRT4530_72713C.1
gtacaccagcacgtaccggtacccgatagttcccgagcgtcgacccacgcggttcgcggacgcgtgggcggacacgtgggtcacgggccatgtcgcattctctacgaagcaaaaacacacgactcgccatatgctgtgggaacaaatccaacgacaaacagcacccgcaggggcgcgaaatacgaccaccacaagacgatgttctggcgcgaggtacgactgtaccatgaccag

SEQ ID NO: 72325 - DNA, 180 bp, Oryza sativa
  Clone ID: PAT_MRT4530_72714C.1
atgggggagaagacaacatggagtggcaacgaggctccccttccacgcaacgggacggtggcggtcggcattgtgcctatcgggccgtgccggcccgatggctgctgggccgtgccctgccgtgcctgggccgggccaggccgggcgagccctttggccatccataggcccttctcatag

SEQ ID NO: 72326 - DNA, 294 bp, Oryza sativa
  Clone ID: PAT_MRT4530_72715C.1
atgccacctccggggctcgctgagaaatgcaaacggacgttggatgatccatgccttggaagaaggttggctgatgggcgaagtgatcactgcctcactggccaagaggacggtgtgaccaattcagcaaatgatagatcgtcttcaatgtggaaatgggagtggatggacgatcagacgatgtggacacgatcatgtttgatcaaaactctgtgctatgatgctggaaatcagcacctaatcactggctcaagccacattcggcatacggccataattcagctactccgatga

SEQ ID NO: 72327 - DNA, 1447 bp, Oryza sativa
  Clone ID: PAT_MRT4530_72716C.1
ccggccgggagcagagtcaccttcctttcatttcctttctcttttctctttctttctctctctttcttggtgttggaaggcgaaggcaacccagggggggaagcaccggaggagccgcagatcccgccatgcgggtgctcccggcgtcgtggtcctccgccgcctcctcctccgcctccgcctccgcggaccgcctcaactcccccaccccggcgccgccgccgccggcccctcctcctcctgctccaaaaagcagcagcagcagcagcgcggagctgtacctcaacatctacgacatctccccaatcaaccactacctctactggttcggcctcggcatcttccactccggcatcgaagtgcatggcatggagtatgggtttggagcccatgaatacccaaccagcggagtcttccaagtagagcccaaaagctgtcctggctttatcttcagacgctccgtgtgcgtgggttccactgatatgtctcgttcggaagtccgcagtttcatagaggatcttgcagaggattatcacggggacacttatcatttgattgcaaagaattgtaatcattttacagcagacatctgcaagcgtctgactggaaagccaattcctggatgggtcaatcgacttgccagattaggttctttctgcaactgtgtactgcctgaaagcatcaaggtttccgctgtcaaagatgtaaccgatccccccgagtttcctgttggctctatcaacattgcattagctggtcatactcaaatcatttatttataccacatttcctcccaacgtgatgttgaattagtggagatattttcccgagatgatgatatggagtctaatgcatccattgttgacggaagtgatgcggatgatttagaccatcttctaataaccccaagtagcgatgttgtatcttcaaaagataagatattaactcctggcagggatagcttgtaattgcatgtattctccattgatatagttcaagtattacttgtggggttgttttctgaggatcaatctgatgatttcttgctgagtggcgatgtggctggaggaggggtatgctgtgggcagtcaaccttgaatagttgaatgtataatccatgaatggtaattctgtgtgtcttacactagaggtagtgaatgtgattgtctaactgtggcgaagggccatgtttccattataagtatatgctgttttgagagaggggaggggaggggaggagtgcgttgacagtgtggtatgtatatgctgtaactagttggagaatgattgacttcatttgagttacctaggtgggcttcctgttttgttttgttgtgtgtaactgatttgtttgtacaaatgaatgatttgcagttgtggaagaaaaaaaaaagaacggtccgtccaaaaaaaaaaaaaaaaaaaaaaaaaaaaaaaaaaaaaaaaa

SEQ ID NO: 72328 - DNA, 1092 bp, Oryza sativa
  Clone ID: PAT_MRT4530_72717C.1
atggacgaggtgtgcgaggggaaggacttctccttcccggcggaggaggagcgggtcctccgcctctgggaggagctcgacgccttccacgagcagctccgccgcacggcgggcggcgaggagttcgtcttctacgacgggccccccttcgccacgggcctcccgcactacggccacctcctcgcgggcagcatcaaggacgccgtcgcccgccaccacgccatgcgcggccgccacgtcgcccgccgcttcggctgggactgccacggcgtccccgtcgagcgcgccgtcgacgaggcccttcggatcgccacccgcgcccaggtgctcgagatgggggtcgccagctacaacgacgcgtgccgcggcgtcgtcaccaggtacgtcgccgagtgggaggccgtcgtcacgcgcatggggaggtgggtcgatttcgaggacgggtacaagaccatggacatcaagttcatggagagcgtgtggtgggttttcgcgcagctgtgggacaaggaccttgtctacaagagttttaaggtgatgccttacagcactggcatgaaaacaccattgtcgaactttgaggcaggacagcaccgccagtttgttccggccgaaacagccatggtgtccttccctgttgttggtgatgtggacaatgcagctcttgttgcatggacaacaacaccctggacgctacctagcaacctagcactctgtcaatgcaaaatttgtttatgccaagaaactaggctagaccaattgccggtcacggtcaaagttactggaaagaagccagggccttcaaaggggagcagtggagctgctaaaaatggactggatactgaatcgtatgaactactcgaaaagattcatggatcatccttggtaggccttagatatactcctttgttcgactatttctcagagctgcaggacaccgcatttagagtcgtagcagataactgtgtagctgatgatactggaactggtgttgtacattttgcccctgcttttggtgaagatgattatcgtgtctgtcttgcttcggggatagttgagatgggaaaaatatttggacgtttctctctgtga

SEQ ID NO: 72329 - DNA, 791 bp, Oryza sativa
  Clone ID: PAT_MRT4530_72718C.1
gagattgttcatttgttccattgcttcttctcttgatcacttgctacctcactactgcgatttgccaacaatttttttggtttttggatggccatgtcgtcgtcgatgtcattgcttacgtcgccggccgagctcggccggcgcgggccggcgttgaaggcgaggaggtcgtcgccggcggcgtgctgcgccttccggcgagaccagtacagcggcggggcgctggtggactcgagcatggcggtgctccggcggaggatgagggaggcgaggatggcggagaacaactacgaggcgccggcggggtggtcggcgtgggagaagcggtactacccggcgtacgtctccgacgtgtccgccgccgtcggcgcgctgcagctgctgctcatgggcacccgccccagcgtcgccatcgccgccgccgcgctgctgttcgccggcgtgccggtctccgccgtcgccgccgtgcaccacctggcgcagctggcggcggagtccgccgtgctcctgcagcaccacgtcgttccttgaccggatcatcatctctaccttgcagctaaaatgttgcctgaaactgatttccaacttgtaaacaagagtgtgttagaaaggaattaaccctgcattattatcgcagtgttaaatgtagatagaatgatatgctatacacagctgatcttgtgtagttgatcttaaatttaatttgttggtgattttataagataatgaaagttttattaaactcatcattatatcgggatgatatatatgtctataaaaaaaaaaaaaaa

SEQ ID NO: 72330 - DNA, 345 bp, Oryza sativa
  Clone ID: PAT_MRT4530_72719C.1
atggccggaggcgatgggggcgacggagctcaccgtcgagcgagggagacgggactccggcgggattccggcgaagaggaggggaatgcagaggagcggtgctacgggtggccacggcgcagcttgggatggctgagagcagcggcaaacggcgaccagaggcggagaatgcggcggcgacatcgggttcgcggtggaggtggtgatctggtggtggattggggaaatggaggaaagaccggcgtgcggcgaggtgtggcgatgctggtggtgcaaatggcgcggcacggggatggcgggagcggcggtggtgggcggcagatggtcgccggagagcggcgatga

SEQ ID NO: 72331 - DNA, 531 bp, Oryza sativa
  Clone ID: PAT_MRT4530_7271C.1
agctggagcaggagctgtacgacctgaacgcggggggggagagggacggcctgcagtgcgcgtacccgcggcggcggtcgagcagggtgtcggcgacgtcgaggaggtccaagccccggcggtcgtcggtgtccgcgggcgcatggaacccgcgctcgccgtcgttcaccatcaagaggaagaggaaggtgatgcccaacctcctgaagctgatcaagaataaaagaggcggcaaaaagaacatcaactgatcgagctgcgtagattgtcatgaccgctcgcgacgctgcgaccgtttttcttgttctgatttccggcggcgcagcacaagaatgttttgatcatcagtttcgcgggattaatggcactgatactgtatacttgggctagatgtaagtacatattaagctggccatccgttcactacataatgtaacctgcacgttcctaaatggatggctggacgtcaacaagtgacgagttccgtgtggtctgttggccaggatggatggcttggatcagttgttggtt

SEQ ID NO: 72332 - DNA, 567 bp, Oryza sativa
  Clone ID: PAT_MRT4530_72720C.1
atgaccttagtggtgcgcaatcatttctcgcaaattgtgttcttcactcgagctgatcttgaagatgaaagcattgtggatattagagatggcggtgtaatcaaacatcgaaacggtacctcggatataggaagtaaaatcataatcacaagccgatcagacaagattgcgaggttaggaaccacaccacctctcagattacagctccttccaaaagaagcttactggtacttcttcaaggtgtgcacatttgggagcatggatgcttcagagcatcctgaaattgcatccgtagccatggagctagcaatggagtctgaaaggagcttcatggttgccaatgtctttggtagattactgaggtcgaataccaacacgctttactggagattggttcttgcatccctaagagagttcaagaagaagattcgagttgttctgttaggaggtgctgatcagcctcaaggaagatttgatgcacttggatggaaatcccagatagcacctaactatagctacacgtatagctgtgagatacagaggccaatgtgtattgttagtagataa

SEQ ID NO: 72333 - DNA, 157 bp, Oryza sativa
  Clone ID: PAT_MRT4530_72721C.1
atcgagagcgtccgcccttactattttcattgcgggttgctgtcatccattcacggggtacgctattgcaaacggacagagatgacagggcagaagagagcttgaacaaggcatttctctccccttggaattatgtaatagatgaatctttcgtata

SEQ ID NO: 72334 - DNA, 213 bp, Oryza sativa
  Clone ID: PAT_MRT4530_72722C.1
atggatcgatcaaccgtggcgacgcccagttgcgagcggttgctggacgacgtcgccgcaacgacgctccgcggctccggccaacagtcggcaagcggcgtcggcaaagcggacgccgggcgaggacaggcaaaggcaccgcagacactgggagttggacaccggtggctcggatatggcgaggtccaacaaggtgttcgatataatgtctag

SEQ ID NO: 72335 - DNA, 1281 bp, Oryza sativa
  Clone ID: PAT_MRT4530_72723C.1
gtaggtacctcatcattgttgatgatatttggagcacaaaagcatgggaatttgtcaagtctgctctacctgacaacaatttatgcagtagaataattacaacgacaagagatactaatgtagccacatcatgctgctacactgtagcaggacatattcacaatattcaacctctaagtgaacaggactctcgggagctatttttgaagagggtttttcgtgatgtgtctgcatgccctccttatttggaggaagtctcttgtggaataattagaaagtgccatggcttgccgttagctattatcagtgtagctagcctgcttgttggaaaaccaaatattgtggagcaatgggaggaagtgtacaactctattggttcagcatttactcaacaaggaatgacagatcactacaacaaaatactcctgcttagctattatgatctcccacattatctaaaaacttgcttgctatatcttagtatgtttccagaggattacatgattgaaagagaagtgctaatatggagatggatagctgaagggttcattagtaaagtgaagggactaacattggatcaagttgctgagaactacttcaatgatctcgtaaacagaagcatgatccaaccaattgacatccagtatgatggcagagcgagtgcttgtcgagtgcatgacatgatccttgatcttatcgtatccctgtcgaaggaggagaattttaccactctaatgcaaggggaagggtacaattgttctaacaagattcgtaggctatctgtccatgtgggacctgatctgcaaacacttcattgtttgagagtactggtatttgaaaattgccatggtatcggtacacaacacattaaacatcttgagagcttcttccggctggcatatttgagcattagttctgatggtattactgagcttccagagcaaattggggacctgaagtatttgcagacactagatatacgccatagtggaattaaaaaattgccaccgaccataggtcgtttgcaaaatttagcgcgtctacttgttggcaatgatgtagaattgccaaatgagattggggatctacaagccttacaggagctatcggatgctggaaaatatgactccataaaatttgtgcaagagttgaggcggttgaccaggctaagtgtgcttcgcatagaatttggaagctattatcacggtggcgggcttgagatgctgtgagcaatgccggatctcgatggcatttggagagttgccatttataagggtggca

SEQ ID NO: 72336 - DNA, 594 bp, Oryza sativa
  Clone ID: PAT_MRT4530_72724C.1
cctcggctgcatgaattcggcacgagtatacattcatggcgggaggttcacgttcaatcgacttgagtggtgcgagacattcaacaagcctggcaagaagtcagaaatgatgcttcagacaccaactggattttgttagcttatggtgataataaagatgttgtacttgccggaaaaggtacaggtggtttagcagaaatgaaagaacaattgaataataatcaagtcaactttggcgttgtacgtgtacgagccgtcgatgatcatggtagcaaacgggcaaaattcgtttttgttacatttgttggcgcgggcgttccggctattcgtcgagctcgtgtttcgactcagaaacactgaatttgaaagaattttcaatggttatcatatacaaatgtatgctaacactgatgacgatttgtctgaagaagctataactgcacaattacatgcttgcgctggtgcccataagccccaagcttatgaattctcttaaatcaactctttctatcgggttcggttttcatcatctttcggttcttttttttaattatattgattctggttaaggtctttgatcctgttgggattgat

SEQ ID NO: 72337 - DNA, 347 bp, Oryza sativa
  Clone ID: PAT_MRT4530_72725C.1
cgctatgctcattttgtggcattgtcccaccctttcatagctttagatgtggccctggcttatctcaacaacatatacaaactgcatggtatgccatagtcaattatctcggatcgtgatcgcattttcaccagtgccctttggtctgagttatttcgactgacagatactcaactcaagatgagttctgcataccatcctcaaactgatggccaaaccgagcgtgtcaatcagtgtcttgaaacttttcttcgctgctttgtccatgcctgtcctactaagtggtaccgatggttggctctagcggagtttggtataatacagcttatcactctgctcttggcaca

SEQ ID NO: 72338 - DNA, 292 bp, Oryza sativa
  Clone ID: PAT_MRT4530_72726C.1
gagagtaaatttgctctctgaaataatcacaatcacaaaaagcgaagataaaatgcatcaaactgaacgaagtgagtaaccaacatcaaaattcgcagaacagacagttctgcacgaacgagcagcgtgggattagatcaacgccaagaaggcgcaactgcgatccgatctcctccttcctcctcttgcggttgggtgggctaattgcagagcaagtacctggtgagcacgaggacgccgcaggcggcgccgaagaggaggaagacggcgaggtccctggccgcccagcgct

SEQ ID NO: 72339 - DNA, 153 bp, Oryza sativa
  Clone ID: PAT_MRT4530_72727C.1
atgagcgtcttcgtcattatcatcggctgctacaccgctattgactggattaccgacatcgtcatcttcatcatcttcatcaacatcctgtcaagcctcttcaacatagcccactctactgctattgatgggcaacttcgtcatcatatttaa

SEQ ID NO: 72340 - DNA, 1773 bp, Oryza sativa
  Clone ID: PAT_MRT4530_72728C.1
gaaaatggtgaattacatattgcgcacctgcaaatctcaccgcagaaagcggggcaaattacagttgaaaattgattccctagcgggagattccaatgttgtgagctcgacaaaacatggcatggctgattactgatactgatagtagatcgatccaccgatcaagagggaaaagaaaagaaaaacaaactttaaaagagatcccgaccttgtctttccaacccaaaatcctccaccaaaaaaattgaaagcaaaattagctacgaacaagaaagagtaacaataaacatcatccttatttctcctctaaacgatcaaatttaacttaattttaaggcactctcttcttcaacctctcctcctcaccaggtaggtagtctgctcttcttacctcagctgctgatctgcgagattttttttgttgttttccctctgtttcttccgctggtgagtgaatgaaggtaggtgttgttgttgtcgtcgatgactttgttgcactatttgctctcgacgggcttgcggaggagcaccatgtgcatcggcgtgaagatgccggtctcgccgccgcgggtgaggtgctgcgcggtctcgtagagcatctcgtgcacctcgcagacgcccttgggtgcaatccggagcatggtgagcacgcggacgacgagggagttgcgccagtatgcgatgcgccccatcttgaggcgagtccaccatgggagagcgggcgggagggcgaggtcgagctccttgagcacctcgaatccgacctccttggcgatggacgcgatctcgtcctggcggcggagacccgggagcgcgtcgccgcgctcgatgccgtggatggcctcgacgtgctccgggttgtcggcgcggtagagggaggtggtgacccactcgtaggagacgtagaggccgcccggcttgagcacgcggaagacctcgccgtagacgtcctgcagcctgggcgcgtggcaggtggcctcgatggagtaggcgccgtcgaaggaggcgtcggagaacggcatggagaggaagttaccgcagacgacctcgcagcgggagtcgaggccggccttgcggttgtgcgcgcgggcgcggttcacctggtactcgttgatggtgatgccgacgacgttggagccggagtgggcggcgatggcgcgcatgggcccgccgacgccgcagccgacgtcgaggaggcggtgtcccggcttggcctggaggaggtcggcgacgcgctcctcgtggacgcgcgtggcctcgcggtgggagcggccggggagggaaggggagaagtggaacgactgaccccaaccccactcgtagatgtcggtgacgaggttgtagaaggtgtcgacgaaggccggcaccttctcggcggaggcctcggtggtcgccgtctccttggggcggcggaagaacgaccagtactgcgtgtacttgtccttcaccttgtcgttcgtgatggatcccatcttgagatccaccgcccgcttccccttcacctccgccgctcccatcacccacacgaaccagtacaccagcgccatccccacccccgccgccgtccacgccatcgtcgccgcctccatccccgcccggtacaagcaacacccaccctcgcagcagagcagaccagagcagagcggagacgagagcggagcgggggaagaggggaaaaccgattcctggggccggacgcgtgggcggagcgtgggtgcgtgggcgtgccgcgcggtgcggtgccggggcgacgatctgatcggaccctcgtgc

SEQ ID NO: 72341 - DNA, 641 bp, Oryza sativa
  Clone ID: PAT_MRT4530_72729C.1
gctaatccccccgcctggcctttgtccaagggagggattgaaggagatattttgtgatagggctgtgctgaaagtgcagcccaccgatgaatattggttcctgcagcgtcgtgccatagtcgacgcgagcactttgtgctacagctgaccagagttcttccttcataccgagaatttacttcaggtacaggctagttgacatctcaaatgtttataactggattccctcacagaaataaagctgaaaagaagctccaaatcaacgggttcagacttcaaagaagagacgagcatccaatctgctcatttctcccatcagttatacttatgtaattcttgattagttagttggtcaggttttccatttcattccattcttctgcttcttttgtttccattgtttaggggcagtgtaacactcttgactctgatcatactgatgtagaagttcagtgtcctcatagtgttccccccaccttctctgaggagtttcctcaaagccttttgtattactcaccaaactattggtaattttttttgggttcattacagaaatttcctgtaacacattatttttttaagtgagaaatcaagatatgccggatcattctgtttctttccaaaaaaaaaaaaaaaaaaaa

SEQ ID NO: 72342 - DNA, 290 bp, Oryza sativa
  Clone ID: PAT_MRT4530_7272C.1
ctgaggtgggcaggctctccctccccctcccggttcggctcggttcgggtcgggtcctgttcgatctcggctcttccttcggctcgggggttggcgggaaagcatggcggcgccggatgttgagtaccgttgcttcgtcggcggcctcgcctgggccacccactaccgctccctcgaagccgctttctccacctacggcgagatcctcgagtccaagatcatcaacgatcgggagacggggaggccgcgcggtttcgggctagtgaccgctctcgagcgagctagccctg

SEQ ID NO: 72343 - DNA, 280 bp, Oryza sativa
  unsure (1)..(280): unsure at all n locations
  Clone ID: PAT_MRT4530_72730C.1
cccacgcgtccgcccacgcgtccgcccacgcgtccgcccacgcgtccgcccacgcgtccgcccacgcgtccgcggacgtgcctncgggcctgcatccacgncccaagtccttnagcgccacctngccaacccagccacacttnagcgccaagnaaggccaggcgtncagcttgatgttgccatnctngncacgaagnaccttcncaagncctaacggcttaggtacagcatgttntgttntttgtttttgtggaagctgnaggatgttnaattcaagtat

SEQ ID NO: 72344 - DNA, 334 bp, Oryza sativa
  Clone ID: PAT_MRT4530_72731C.1
gccaagcctacggaatgttaagcatgcctagcataggacgcatgatgactactgtagcacaccaaagcacgttaaccgtgctgcgcctgaaggttgcaacagactcctgtatgccaaaacttggacctacagtgatgatcgactacagctatatgcctttacatcttctatgtacgccggctagccgctaggtataaattatgtctcctatctatgaagggcatgcgctatgtgaatcagatcgcgccctagccataactggatatgacgaggttttgctaataatactataagatgaacgatatgcgctattctatacattagaataaagcat

SEQ ID NO: 72345 - DNA, 420 bp, Oryza sativa
  Clone ID: PAT_MRT4530_72732C.1
atgggcggcggttgcgtgtggctgcgttgcacggctcgggagggctccggcgagctcggcggctgcgcggagtcgaggcgggctccggcaggtatgactgcttgtgagacgtcacggtctattccatggtcgtcgacgtggggtgcttgtgtgagtgatgtgaagacgctggcgaaagccttgccgtgcctttggccggttcgacgacgacgacgctcttgggcgccgttaaccttcttggagacgtcgtcatggcgttcttgtggtgggcgacacgctcttcggttgcttctgctgatgaagtcggagctgctcgctgatggggtgtggcgatgcttggcaacgatgacaagttgcagtctcttccaaggagttggtgctggccgtgtgaaggaagtgtctctttggtggcttggctga

SEQ ID NO: 72346 - DNA, 431 bp, Oryza sativa
  unsure (1)..(431): unsure at all n locations
  Clone ID: PAT_MRT4530_72733C.1
ggangcnntnnancatnatggnctcaggttcttctaacgtgttccacaccatctttttactatacagcacttacaaacacaacgataaagatattctgtagttgtnttcttaacatatgtatttaatcttattacgtaacttagttttctggaaatggaagatgtgggggtggaagcaagggtagagtgatgcaaatgcttcatcgggccacgatcgtctgtcggccttctggctgtttttncacctgtcctgtccaccgctgacggcgcaagggaacttcggtgagctgtagcaggtaattggacgagctgaatggcttatgcatcgacaggttataaagatgatctttacctggttatacacatgcttacatgatggaattttttttaatgatgtacctttagtcgaaatacgnacaaatttcggnttn

SEQ ID NO: 72347 - DNA, 648 bp, Oryza sativa
  Clone ID: PAT_MRT4530_72734C.1
atggcgacgtcggcgcggcggcaggcgatggcgcgacgggacggtgacggcgaccgcgcggcagcggcggcgcggggctcggggcatggccgggcgcgtggcagagaaggggtgttacaccaccacaacagggacctctgccgtgccgtcatggttgtctcgctccagcctggtgctgagtggcgcgctccgtcccccggacccgcgccaccccggccggatctggatgggcggcggctgctagcggcgaccgacgacgcgtcgacgccagcggcagcatatgaaggcggggaaggagttgggcggcaggaaaggaggagaccgggagcgggcgtggcgtgggcggcggttgcgtgtagcggtgttgcatggctcgggagggctccggcgagctcggtggctatgcggagtcgaggcgggctccagcagggttgctcgctggtggtgagcctcctgctcgcgatgtgtggatgtggatgcgctgacgtgtttggtcacgtcgaggctcttcggttgcttctgctgatgaagtcggagctgctcgctgatggggtgcggcgatgcttggcaacgatgacaagttgtagtctcttccaaggagttggtgctgaccgtgtgaaggaagtgtctctttggtggcttggctga

SEQ ID NO: 72348 - DNA, 414 bp, Oryza sativa
  unsure (1)..(414): unsure at all n locations
  Clone ID: PAT_MRT4530_72735C.1
gtcttcgtggttttcactacaaaacgttccgaaggatgaacagaacactgataggcacacagggcctgctgtgaacaccgcccttatggcgatacactatgcagatagagaactcgtgctcatcggggatacattggatgaacagaagcatagcctgtaggggggggaatgaaaatatcgtgnggtccataaaacgatagcccaactgtcaccaggcgcgcgaaggtaaaaggngccgcctcggaggatgtcgaaccggaaaaagggaaccatactgcgcgtgcctcaacctcgataacgaagaaccaatgcgacttgaaagtacatgcatcctttaacagtgaaacattgactttcgaagaccaaatgggcgcaaagctcacttaaaggtatctgaaccatatgcctcaatgg

SEQ ID NO: 72349 - DNA, 921 bp, Oryza sativa
  Clone ID: PAT_MRT4530_72736C.1
atggacatcagccaagccaccaaagagccacttccttcacacggccagcaccaaactccttggaagagactgcaacttgtcattgttgccaagcattgccgcaccccatcagcgagcagctccgacttcatcggcagaagcaaccgaagagcgtgtcgcccaccacaagaacgaagcggacccaaggaggcgaaggcctcgccgaacaccaaagttttcacctggagatttgtgggcaatatgaaagaacgccatgacaacgcctccaaggaggttaacggcgcccatgagcgtcgtcgtcgtcgaactggccaaaggcacggcaaggctttcgccaacatcttcacatcacgcacacaagcaccccacatcaacgaccacggaaaagtccatgacgtcttacaagcagtcatacctcgacgcaaccaaacacgccaacgcatccacatccacacatcacgagcaggaggctcgccgccagatctggtacagtggacgaatgtccggctcgacgtcccgttggtgcttcttctggtcgtccagtcggctctcaaggcctggctgcggcccgccgagtttgagagctcgcctgccccgtgcctgccagtgactgatgtccttgattcgccgtcagttccagccactgacgcctatgctgatggactcactatggatcaccctattatgacaacagaattctggacatcacatgagtgccttcttcttccctatgagcaagcattacctgaaaacattagagtgaaactccctcacctcatacgtgctgttcatgttgctgtccagatagtaacatgggttaccgacccgatgcatggtaacacaatgaaggctccttgtggcctcaagactcgctcctttgctacttttcagtatttgcttgttcctattacttctcagtag

SEQ ID NO: 72350 - DNA, 514 bp, Oryza sativa
  Clone ID: PAT_MRT4530_72737C.1
tcggctgattcggccggccggtggcgacgaacgtcggtcgggggcgggcctcggagggcttgaagacacgactcatctactcctactcccggagaggtcctccctcgctcccaaccggccgcaaccacccgtcgaggtcctcccctcgcgaccggctggccaagaccacccggcgagctcctcccccgcgcccggcgggccgcgacctcccgacgagctcctcccacgcgctcggcccgccgcgaccacccggcgagctcctccccggcgctcagccggccatggcctcccggcgagctcctcccccactcccgaccagccgcggccacccggcgagctccttccccgcgtccggccgggcgcgaccacccggcgacctcctcccccgctcccggccggccgtggccactcggcgacctcgtcccgcactcccgaccagtcgcggtcacccgccgagctacttccccgcgtacggccggtcgcgaccacccggcgaccttctcccctgcttccg

SEQ ID NO: 72351 - DNA, 1802 bp, Oryza sativa
  Clone ID: PAT_MRT4530_72738C.1
ttttttttttttttttttttgggggttttttgtaagaagagaattgacccagttataaaaaaactggaccctgaaaacatacaattgactggttaattcgggaaacggtaataacccaccacacatgaatgaaagcaagagatctagctacacaagctagcaaaacaaggggggagtccaaatgtagaacaccattgccaatgctaaaaccacaaaagtggcccacaacagctccaacatcacagacacgaggtgtcatacgtcagccgagctagctgcccaaacgatccagcagcgccgacttcacaaccggagcgacaacgtgaatccgcgaaagtcgccagagcgaaaagcagctccgacatccaacaatggacatcagccaagccaccaaagagacacttccttcacacggtcagcaccaactccttggaagagactacaacttgtcatcgttgccaagcatcgccgcaccccatcagcgagcagctccgacttcatcagcagaagcaaccgaagagcctgtcgcccaccacaagaacgaagcggacccaaggaggcgaaggcctcgccgaacgtcaaggtatgaaagctttagaaccgaaaaagaccatccacggtcgttgatgcataggaacttctccgaagcgacgcccccaaggaggacacgacgcgtaacgtcgtcgctgctcgtccgaaatcggaacaaggttttcacccggagatttgtggggaatatgaaagaacgccatgacgacgccttcaagaaggttaacggcgcccaagagcgtcgtcgtggtcgaaccggccaaaggcacggcaaggcttttgccagcgtcttcacattactcagacaagcaccccacgtcgacgaccatggaatagaccgtgacgtctcacaagcaatcatacctcgacgtgaccaaacacgtcagcgcatccacatccacacatcgcgagcaggaggctcaccaccagcgagcaaccctgctggagcccgcctcgactccgcacaacggccgagctcgccggagccctcccgagccgtgcaacgccgctacaagcaaccgccgcccacgccacgcccgctcccggtctcctcctttcctgccgcccaactccttccccgccttcgtatgctgccgctggcgtcgacgcgttgtctgctgcacggcgccaccatcgccagccatcaccaccacggccgtcagccgctgtggtctgccggtcatctccacgccaccgtcaccagccgccgccgccagccgccaccatcaccggtcgctgccagcagccgccgcccatccagatccggccggggtggcgcgggtccgggggacggagcgcgccactcagcaccaggctggagcgagacaaccatgacggcatgggagaggtccttgttgtggtggcctggacgcgccagcggtccagccgtcgatgtcgccttcagtcgccgtggcccgccgccgtcgtcgccaccgtcaccgtcagtccccagccgccggccacccccccttcagatccggccggaaacggcgcggatctggccgccaccaccagccgccccggacagctccgccagccgccgagcgtggggagggcgaggcgagaccccgccgccgccgtccattgcggctccgcggctttgccggcacccgctcgggcggcggcgaggtggaggagggggcggggggaggaggaaagcggcggcgcagcacgtcagcctcccgagccgcccgggggagggcgacgcgagggctattcaccgatcgcctcgtgccgaattcctgcagcccggg

SEQ ID NO: 72352 - DNA, 849 bp, Oryza sativa
  Clone ID: PAT_MRT4530_72739C.1
ccggccggggtaaaaaccgacccagccaagcctcctcacccccacctgtcgtcccgtccccaagagagattcgtctcgtcgccgtctagggttttagccggccgccgccgccgccgccgccgcttgtcaccccttccgtttccaagatgtcgaagcgagggcgtggaggtagtgctggtaacaagttccggatgtcactgggtctgccagtggcagccactgtgaactgtgctgacaacactggagcaaagaacctttacatcatttctgtgaagggaatcaagggacgccttaacaggcttccttctgcttgtgttggggacatggttatggctactgtgaaaaaagggaagcctgacctgaggaagaaggtcatgccagctgtcatcgtgaggcagcgcaagccgtggcgccgaaaggatggtgtctacatgtactttgaagacaatgctggagtcattgtgaaccccaagggagagatgaaaggttctgccatcactggacctatcggaaaggagtgcgctgatctctggcccaggattgcaagtgcagcaaatgcgatcgtctaatcgaagcagccattgaaagttccattagcgttttctcttcttgaaagagttaaaagagctgctagttttgtatcgaccttaaaaatagtttcccaggattatgtttgtgccgctggattatgccccgttagcttctttaaacacatttgagcaatatgatatggcactgatgcctagcctgacatttggtcctagtttaaaacttaaagctgtcttggaatttcgatgacgcgtgccatttttcctgcaaagtgtcttttttggttaaaaaaaaaaaaaa

SEQ ID NO: 72353 - DNA, 775 bp, Oryza sativa
  Clone ID: PAT_MRT4530_7273C.1
gcacgaggggtagctgctgctaattaccccaagcttgagctaagctagctagccatggcgaccaggctagagcagtgctgcttgctgctgctgctgctgctctgctcctgcagctccgccgccgtggctgcggcgtcgccggcggccatgagcagcagcaggaaggcggtggatcgcctgcccgggttcgctggccccctgcccttctccctcgagacagggtacgtggcggtgggcgaggcgagattcttctactacttcatcgagtcggagaggagcccggaggaggaccccgtcctgctctggctgaccggtgggcccggatgctctgccttctccggactcatctacgagattggccctctcttttttgattttcatggccacaaaggagggttgcctactttgcactacaaggcaaactcctggaccaaaataagcaatgttatcttcgtcgattctccacctgggactggcttcacatatgccaccacagccgaaggactcaagtccagtgacaccattgttgttcaccagctctacactttcatccaaaagtggtttgacgatcatccacaattctcctcgaatccgctctatgtttcgggtgattcttatagcggtataattatacctactctcaccatggaaatagctaaaggaaaagaatccagcgacgagcggcatcttaatctcaagttttctgatatcccaacagtggtagctacactccaacagtcacactctctttgtgaaataaaatcttcagatatta

SEQ ID NO: 72354 - DNA, 228 bp, Oryza sativa
  Clone ID: PAT_MRT4530_72740C.1
atggcgacagataatgtagtggcaattgatgcttttctctcggacacgcctcatgtttccactagccaagctgatgactgcatcctgtcctccatgagcagaatcagcataccagcacagacgaaagtgaaggggatcgatcgttcatctgttgccatcgtcaccatcatctgtgctgtcgaatgtatatccgatgtgacagggcaaaaattttcaccctggatctaa

SEQ ID NO: 72355 - DNA, 315 bp, Oryza sativa
  Clone ID: PAT_MRT4530_72741C.1
atgaacgtgcatacgatgactctatgtcatgacgatgatattagagtagtatttggtaatttaagcgtggtgtttagattactggatatcattatttggggttatatgatgcggaagcgaggtgggccgttgatggtgacagctcagtacgggtattcctccgcgcgtgtatatagtcctaagttactttcctggggagggtactcctccgtatttagccccggttggatggtcatgatggattgtcataagaaactcggcaatcaggggttgcttctcgaatcaaccattgaagagatatgagttggtgaaatg

SEQ ID NO: 72356 - DNA, 633 bp, Oryza sativa
  Clone ID: PAT_MRT4530_72742C.1
atggcgggagctgccgcttgcagcggggctgctcgacctgcgcccctgcaagctcgcccctccccctcccccgcctctctccctgtctccccctcccctccccgccgctcccactccaccatcaccaccaccgccaccgcctgccgcccctcccctcccctcgccgacgaggagctgccgctggcggacgccgtggctcccgagaccgttgtcgctgcacctgaggcccgggatggcggtggagaaggggaggtgacggcgatggcgacggcgacaggtttggacgcgaaggaggtggcaagtggagtggaggcgacagcgacctcggatggctacaccacacaggaccacgacgacgacgacgctcgagccaccgcgggctgccgtgctcgccgagagagggagagagagtcttcaactgacaagatggcgaaggacaacaaggatgaagaggagaaccctgaaactgaagaagcagggaagaaggaggctgaagctgaaggagcagaggagggagaacctgatgaatctcaagacagggtggcgccaagactcaagaaagcaatgggccaaaggcgttctacaagggctagcaggcccaatccacgttaccatgggtcccagtgggtgtga

SEQ ID NO: 72357 - DNA, 727 bp, Oryza sativa
  unsure (1)..(727): unsure at all n locations
  Clone ID: PAT_MRT4530_72743C.1
ancgggngccggcgggttttttntccaaaaaaaacnttcccggcccagtcccagtttgccaaccanactaccgggccaacnaacaaatgtgattcccctcaanaccttgcccggcccaaaagtacacgctcncaaaccccgacgccaanaagtcgtacttctgaaagggctctcccaccagcggccagttttacgtcaaccccctcaatgtcccggttgaggacgcttgtgtctggaccagccccacgaacccagactccgccggcaactgggcccccgttaacatgggagttggcaaggatgttcacggcattacctacctttccatcttccccaacctgcctactagccatgcgcaactcgatttcgatatcgaaatcactggcgacattactgctccttgcgccctcaagggcggctcatacactggcggtggcaacggctgcactaccgcaatcagcaagcccggtggtcaggcgaccattgttttcagcaagggcagctgaatgttcaattgaggtgtttcttttgtcgttggattcgtaggtgctcctttaaaagtcaatgtatcttgggtggcatcatctgctttgatcgatctttcgttctcgcaaaagcgcgtaaaatgactgtggtctcgcattaagcgcgcgggcggggaggctttagcctgttatttaatgtttcattattatttacctgagaaaaaaaaaaaaaaaaaaaaaaa

SEQ ID NO: 72358 - DNA, 277 bp, Oryza sativa
  Clone ID: PAT_MRT4530_72744C.1
atcccatgtcgacgccgtctcgacgaccacggcaccactacagccgacggtgccgaagcgggactacctccctagcctagactgagatctccgggctcactacgaggaactaccgctttcagcataccaaagttttggtgttgctttatggtgacctaagcacatcacctctttacgtacataaaagaacattctcaggaagactacaccgatatcaagatgagcacacagcttttggtgttctcgccctgataatttggacctacacactttattc

SEQ ID NO: 72359 - DNA, 382 bp, Oryza sativa
  Clone ID: PAT_MRT4530_72745C.1
gcttccttcgcgcgggctgaggtgaaaaggtggagagggtttcccgcgtctcgcgacgagggtttaggcccagccaccgccgccgccgccgcggtgccagagccagctcgccgcgggcaacagagaggaacttggagcttcaatgggggaacctagtgttgcacgttccaaagactgtgatatggagtatgatgatagttcttctagacaaagtggcgagcctttgtgggaacatgcggaaggtgtggaacgatctgtcgattattcagatggcttgccccctacaagcaagggtatgtttcagtcaaataaaagaaagagcaaagctgcagatgaggatcttcatatgaaacttcgaactcgattggatgctgaagttgct

SEQ ID NO: 72360 - DNA, 327 bp, Oryza sativa
  Clone ID: PAT_MRT4530_72746C.1
agaagatgcatagctattccgacaccatctaccgatcctctaaaaatacattattacggacaatcatcgattcccacatgactagccgtacgcataacactgaacaagaacccttgtcacatcacacgcgaattcaattcaaccacacacgaacttacgtccgtatatatacgcgcactctgccaggatccccatccctaagtccatctcctacaccattaaactgaccccctaactgcagatttatcacaagtttttaacctgaaacaaccctaccaatgtacggctatctaaactttttcaccgatgtggcagttgaccatattt

SEQ ID NO: 72361 - DNA, 219 bp, Oryza sativa
  unsure (1)..(219): unsure at all n locations
  Clone ID: PAT_MRT4530_72747C.1
aacaaccaaaaatccaagaaaaaccccaccgtntcgagaggccgctcagccatggagctcgcggaggccgtccgggacgagacagccatggccatgcgcntgctcggccacntngcgcgcgcccnacgcggcggcggcggcgacaaaaacntggccgtntccccgctctcgntccacgnggngttggcgntcctnggngcggggncccgcggcgaaacg

SEQ ID NO: 72362 - DNA, 402 bp, Oryza sativa
  Clone ID: PAT_MRT4530_72748C.1
atgtctcttctcttgctggtcgtctgtgctggccagggacgtttcgcatctaggccgccgcgccgtcgtgcatcgagcccgccaccgccgtcatgcatccagtcgccgccgtcgcgcatccctccgccgccgttgcgcatcgactgccgccgccgtcgcgcatctggctgcccctgcctctcgcggtctcgctgccctcccgacgattttttccctctcgtgaaacaggaaatgacagaaataccctcccacccatggtatcacttcgatgaggaggtgcaataccatgaggctgcagctcacacagatcacaatccacaaggacagacagacagccaatccatcgtcttcctcgcgagcatggccatgattggaagcgagcatggccccaagctcagctga

SEQ ID NO: 72363 - DNA, 3285 bp, Oryza sativa
  Clone ID: PAT_MRT4530_72749C.1
atggcgattggattgccggtatggatctccgttgcgctgttgattgctctgtccattgtggcttctgcttcttctctaggtctgagcaagagcaatggcagcgacaccgacctcgctgcgcttctggctttgaaagtgcacttctccgatcctgacaacatccttgccggcaactggaccgctggcacaccgttctgccagtgggtgggtgtctcgtgcagccgccaccggcagcgcgtcaccgccctggagctgccgggcattcctctccaaggagagctcgggcctcacctcggtaacatttctttcctctccgtcctcaacctcaccgataccggcctcacgggctcggtgccggatgatataggaaggctacatcgcctcaagctcattgatcttggccacaatgccctttcaggtggcatcccagccaccatagggaacctcatgaggcttcaactactccacctcccgtcgaaccagctatccggtccaatcccaatagaactacaggccttgcgccgccttcgcagcattgatctcattgggaattaccttactggctcgataccggacagtctattcaacaacacgcctttgttagcttatctcagtattggcaacaacagcctgtcaggacctataccaggttgcatcggctctttgccaatgctcgagttgcttgagctgcagtacaataatctcactgggccagtgccacaagccatcttcaacatgtctaggttaactgttgttgatcttggctttaatagcttgaccggctccatcccgggcaacacaagtttcagcctcccggttctgcagtggttctcaatctcccataatagattcaccggtcaaattccaccaggactcgcagcgtgtccgtacctccaagttcttcgcgtcggtgacaatctatttgagggtgttttcccttcgtggctggccaagtcgacgaatctcagtgatgtttctttgagtaggaatcaccttgatgctggcccaatccctgctgcacttagcaacctcaccatgctaaccagactaggccttgaaatgtgcaacctaataggggccatccctgtgggtattggacaactaggccaactttcagtgctggatcttacaaccaatcaactaacaggtcccattcctgcttgtcttggtaacctatcagcattgacaatcctttcattggcagagaaccagttggatggctcagtaccggcaacaattggtaacatgaactcgttgaagcaactcagtattgcacaaaacaacctacagggagatatcggttactttctatccatactttccaactgtataaatctgtctaccctttacatctactcgaatcatttcaccgggagcctcccaggcagtgtagggaatctgtcaagtctgttgcgagtattctctgcatttgagaacagctttaccggtgaacttccagctatgatttcgaatttaactgggattcaggtgctagatctcgggggaaaccaactgcatggtaaaattccagaatcaatcatgatgatgaggaatcttgtattccttaacttggagacaaataacttgtctggctccatcccattaaacactggcatgctaaataatattgaattaatatacattggaaccaacaagttctctggcttacaattggaccccagtaatttgaccaagttagagcacctagcattaggtcataaccaattatcatcaacagtaccaccgagcttatttcatcttgataggctcatcctgctagatctatctcaaaatttcttcagtggtgaattgccagttgatataggcaatataaaacaaattaactacatggatatctatatgaaccgctttgtcggtagcctccctgattcaattggacatcttcagatgttaggatacctgaacttatctgtcaatgaattccatgattccattccagactctttcagtaacctatctggcttgcaaattttggatatatcccataacaacatttctggtaccatcccaaaatacctggccaattttaccagccttgctaacctaaatctgtcttttaataagcttgaaggtcagataccagaaggaggtgtcttctcaaacatcacgttgcaatccttggcagggaactcagggctatgtggtgttgtccgtttaggattttctccatgccaaacaacctctcccaaaagaaatcgacacatactaaagtatattttactcccgggtataatcatagtagttgcagcggtaacttgttgcctatatggaataattagaaagaaagttaagcatcaaaatatttcttctggtatgcttgacatgatcagccaccaattactctcctaccatgagcttgttcgcgctaccgataatttcagtgaagacaatatgttgggatctggaagcttcggaaaagtttttaagggccagttgagtagcggtttggtggttgccataaaagttatacacaaccatctggaacatgccatgagaagctttgatactgagtgtcgtgtgcttcgaatggctcgacatcgcaacttgataaagatattgaacacatgctccaacctggagttcagagcattggttcttcagtacatgcctcagggtagcttagaagcactcctacactcggaagaaaggatgcagttaggctttctcgagaggttggatattatgctagatgtgtcaatggcaatggaatacctgcaccatgagcactatgaggtggtcgtacactgtgatttgaagcctagtaatgtgctattcgatgatgaaatgacggcacatgtggcagactttggcattgcgaggttgttactaggcgatgataactctacgatctctgcaagcatgccaggaacaattggttacatggcaccagagtatggggttcttggaaaagcgtcacggaagagcgatgtgttcagctatgggatcatgctacttgaagtgttcactaggaagagacccacagatgccatgtttgtgggagatctgagcatcaggcagtgggttcactgggcatttcctatagatcttgtccatgttgtcgatggccagcttctacaggacacctcttgttctaccagtagcattgatggattccttaagccagtcttcgagctgggcttgctctgctcggctgactccccagagcaaaggatggaaatgaaggatgtggtcgtgatgctgaagaagattaggaaggactatgtcaaatcgacagcaaagacaggcagcaatgcccagcagtga

SEQ ID NO: 72364 - DNA, 3246 bp, Oryza sativa
  Clone ID: PAT_MRT4530_7274C.1
tcacgggaaatcttcaatcttgataaaaggatgaacaagcttcactgtttcctgtagtaaacggaaggtgtgatagtgtgaaacacagttgtaggcctcctcacagattacttccacattgggttgtgcctgtgccttcgaggtaagaggggaaccaagtgcatctctaatatattgatcctgcgattgcaaaatcttttcgagagagctatcactgctatcctgtgaactgtagtaaacatcaactgggtcggtcagtctcagctgagcagtctttttcaacttctgaattttgttcacaacctcacgaacaactccagcttcaaacaatgattgatcaacttggagatccaagataaccaaaacatcgccatctcctgcagcatcaatttccttctctgacacatttgcggggcgcttgaattctcgaaaaaccttaatatcttccaacgtcaagagatgactgccaaaaaatatttcgccactttcctcaaatgttaggatctgatcctgagtcatcttcttcacctcatttgatattttgcccatgtcttttcctaatcttttgcctaacacactgaagttaggttcagcacgtaaagatgaatacactaagggatcgctacaagcagtgaccatcttgacattcatctcctccttgacatactctttcagctttccagttatgtcttcaagaaaatcattgtcaggatgcacaactaccatctcccataaaacaagaaattgtgtaaatagtatagttgtataatgagcatgccttaatggtgttttcaaaggtctgttatgccgctcccgaatatttcgagcaagatcaacgatggtcatcatcctgttgacactgtgctcaacacgctcatctatctgcccagttgaggaagggaaattgcagaaatgaatgctcttttctgatttgctggacacctttcttaagttctggtacagaacttcagtgaagaagggagtaaacggagccatcacaacacaagttgttacaagcgcatggtaaagtgttgaaagagaaatcctgcagtcatcttctccagtacgacctttcagacgcttgcgattgaaacgcacatatatgttggtaaggttgtcaatgtactttactaaataagggacaaccgtgtaaagcctatatgcatccatctcctgtcgaacaaaactaactagactttcagtagcggactgtatccagtgatctagcacattagatgacctcagaagaatagcttgattgattggtgaaaatacagcaagaccctcaacttcaagcctcttagcattttgaacaagaaatctataagcattataccatgggaggaagacatctttcaccacaccatggacaccatttttgttgaatcgtagggactccgcacggacgacaggagaatttattacatatagcctcagggcatccgctccataattatcaatgacttccatgggtgaagggtaattatttttacttttgctcattttcttgccatcctcagccaagaccagaccgttgcatataagatttttaaatgcaggtttcccaaacaaagctgtggacaggaccatgagagtatagaaccatccacgagtttggtccaacccttcggctatgaaatctccgggaaaattcttttcaaacagttcgcgattctcaaatgggtaatgaatgtaggcatatggcatggatccactctcaaaccagcaatcaaaaacctcatcaacgcgtttcaacgccccaaactcttcccctctctgagagggaactgtgatgccatctatatggtgtcggtgaagatcactaatcttgacaccagacaacttttcgagtttatcaacagagtccataacaattatttcttctccgtcttgactgatccatagaggaagaggagtgccccagaatctagttcggctaacagcccagtctctagccccttcaagccagttatggaatctcttttccttaacgtaatcaggcacccagtatgtctccttattacattccagcaactgatctctaatcctttcaactctgatgaacctacactttacagcattgattacatatttgttggtttctttgtctgtgacaagtagaccattaaattcggagatcttgtctttgaagaaaccatcatcatcaacagcaacaacaagatcggtaccagtagctaatgatttaaaaccatggtgattattgttgggtacaacaatgaaaacctccccacccacccacacatccctcccccagaattcaccaacaccccctgcaaacaccaaagcacccaaaacacctaaaacacccaacacagcaagctgaacatagtgtcccgggtatgcctcttttaggaacgcaatgcacctatccatagtgtcttcatccacctcctcatcctttgtgataatgcctagcttcttcatgagtacatatgttttcatttggtcaatgaggagtcgccttttcttcatgtttgaaggtagagggacacttcttcgagaggtggcagtgataatcttttgccgcactcttttggccaacctattcttcaccgctggagcttttgtgatctcaagtagctctgctttatctgtcaccaggttgcttggtgcaacctcaagaggaagatgctcacacctagatggagggtccatagttggagtaacatgctcttcctttggtgcagctatcttgctagataccccatgtccttcattgagagatgaaggaacactcccatgggatgttgaaacagtcaatgcgacggctgtgttaggtgcgctcggagaaaggggcgatacaactgaaggaaggggcgctgctgtaagcttctccaaatctccctcgggtggagaagagggcacttcctgaccatctggcaaatggcaccccaaaaccaccttattggggacaccaacattgtcatttgtcatctttggaagaacctccacccgggactcggcaccaacattgtcatttgtcatctttggaagaatctccacccggaactcggcaggtgggatacaaagcttctcgctaatagcttgagaaatcaaagctgtagaaatcgcgtcggcattgaacgtgatcaacatcgactggtatccccctgcactctgtgaagagtaggcaacagggacagccctctgtgaagctgaggagaagtggcccggatcaaggatattgctcccgaggcatggcggaacacatctgaaggctgccat

SEQ ID NO: 72365 - DNA, 262 bp, Oryza sativa
  Clone ID: PAT_MRT4530_72750C.1
atggtgatcatactagctgatagtacatgcatgtgggggggggatgttatagctagaagcgcgtgggtatacattctgcatgcattggtaagaggtgtgaactaagctagcattacatgatttacaagtgggaataaatgtagagagaatatattctatacccactgagtttgttcaagttcatgactacaaaatagcactattataaatgaggttaattgcattttactaatttacaaataataatttgggggggcctttt

SEQ ID NO: 72366 - DNA, 196 bp, Oryza sativa
  Clone ID: PAT_MRT4530_72751C.1
gcacgaggagagagagaactagttcgagtttttttttttttttttttagaacaaatcttacactgtggcaatttgtcatttgtcgatgctgtagcaactagcaacaaaatgcctgaaacatcacaacttggctagcaccatgctactatacatgtgttggaaacatcagagaggacgggcatcaaattctcctctc

SEQ ID NO: 72367 - DNA, 543 bp, Oryza sativa
  unsure (1)..(543): unsure at all n locations
  Clone ID: PAT_MRT4530_72752C.1
ggggggggaggcggaaggggggnaacaggggaagcacgcaacaaaggcgagaaagggcccaagggacaagcagggcaggccaaaggcgggacaaggccccgcgagacccgcaacgagggcaggcggacgcaagggacgacaagccgaggcagacgggacgaagcgcgcccggaggcacgcacgggccggacggcgaaaccggaaacgcagggnagcggacgacagacgaaagagggcacgccggcgggacggcaacgcgccgcgccgggggaggcggggagcaaaagccgcgacccgnacccnggaggcacaagagcgaagaagaaccccgcaagcgacaagggccggccacccgagacgcgaaccccgagcagcggggaggcgaggccgggccggagccggcggagcgaagccgccgcggnagcccgccgggccacccccgggggagatgggccgagagggaattggcccatcgaccccgggggaggcaaaatagacttttgcggaggaaaaagatttggaagaatttggattcggaattga

SEQ ID NO: 72368 - DNA, 543 bp, Oryza sativa
  Clone ID: PAT_MRT4530_72753C.1
atggccgtgataggcccggacggcgcgcgcccccccgtttgggcatctgtaccgcgcagcgtccggccggacgaggacacgcacggcacgggcacggcagccgacgcggtggccgtatggaatttccctctgctcttctttttttccactgtgcgcggcgagcgcgcgcacagtgacgcgcacctggatttcccacctttcgcggctcccgacgacgcgacgccgctcgcaagcggcacggttttctttctttcacgccgcgccgcgcggaaaaccacggcggtgcgagccgcgagccgcgagcggcaggggagcgcaactgttatagccactgggctgggctggctgcgtctgcctctgccggccgcggcgtggttgcgcatcccgcagcagaggagcgccatcaccactgtcgtcgtcaaggtcgccgtcgccatccaccgctactgccgaggtctttgtcgccagccgtcgttgccgtcgtttgtgccgtcgccattcgctgccatcatcaccgaggtcgccgtgtctaaaggcctctag

SEQ ID NO: 72369 - DNA, 625 bp, Oryza sativa
  Clone ID: PAT_MRT4530_72754C.1
ccggccgggaccattcctctgcctctcctcctctctcaccgctctctctcctgccaagcgacggccgccgccgctgcttgccgtccccctcatcctcttcttcccgcagttggcgacctcccccgcgcactccctactgcgagccgctgctgtcgccgtgccgtcgtcctgccatcgccatcctttcgctcccgccgccgcatccgccaacgaggaggccgggactgtcggatccggtgactccggcctcctcgccggcagatccggccgccctgaagcgggggaagcctggagccgccctctactcttctccctctacgcccggcacagcccctccctctccctctccatcttcatttccggatcgatggatgcctgtgattaggtggcctagggctcatggttgacggcgttggttgatccggcggcgcagcacacgatctggtggtggtgcgacgcaaagggatcgacacagttcagccaagcaaggcagatatctgcatctcagcagctacatgcgcatccaacctctgccatcggccttagtacggaagcctgatttcttgcattcttcttcattcagtgcctttctatttctattggtgatgtagtagcagattgttgg

SEQ ID NO: 72370 - DNA, 180 bp, Oryza sativa
  Clone ID: PAT_MRT4530_72755C.1
atgggctttttgggcctcaagaagcccaaccacgtgcaacgggagccctcaactctggacctcaagtccaacatcgtccagggcagcaacatccatcccctcggcctcatcgcggcagcgccgctcgtcgccctcccctcagacctcaccgccgaaggccaggccgacacgccgctgtag

SEQ ID NO: 72371 - DNA, 354 bp, Oryza sativa
  Clone ID: PAT_MRT4530_72756C.1
atggagacgtccaatacgacatgcacttgcctttactctcgccggaaatgctccaatgccttctacacctatccatctttgtccaatgctgtctttgccgaccaccagttcctcaccgcaatagcatccacgaccgcacatcaccggatcgtctggccgaccagcgaccgcttccacttccaactctcttggccaccactgttgcgccgcgcctccaatgaatgctatgacgaaaaccgggcaagccgccaactagggcacctcgccggatttgaaggttcattgcagccttccgcttgcggcaaccaagacctcactggatccgaggcaccgccacccatgtgcctcccctaa

SEQ ID NO: 72372 - DNA, 357 bp, Oryza sativa
  Clone ID: PAT_MRT4530_72757C.1
atgccccagcccccaagagcccacagagcaatacaaaacaatggaaacggagataacgtgaacaaataccagagttgtttgccgtttgcaggtgttcctcaccgtagctttggattcatgatcctcattgttggaggagacgtcgtcggattcctcattgcccctgttcctcctcccccaaaatgcaatcccatctatgagatcagaaaccacatcagcgaaaatcactcaaaccaaatgcgacaggccaatgctcaagtcactcaacaaaaaaggaaaatcatggtcacttgttttcagattgtgttttcaactaccaaatgctacaggccaatgctcaagaaggaagaagattaa

SEQ ID NO: 72373 - DNA, 2493 bp, Oryza sativa
  Clone ID: PAT_MRT4530_72758C.1
gctgccgccgcggattccttcggcgccgggccaccgccgcggtaagagatggacagatttgtgcgagtttacagtggcggggagctggtgaagggtccaaacggggtggagtttggcaacctcgccgaggagggtttatggttcaaggcgaagcctgcattcgatgaactgattgatgccgtgtacaagaagctcgggtgggtgcctacgatgctcagcattcgtgcgcagggaaggttgaacgttggtggtggtgctcatcggcacttcatcatggtgcctatcgatgatgacatgtcatggagtagctatgtgaaagctgttttcaatgggactgagtggaactgcctagagatttttgttcaagcagaaatttgttccttgacagagggcatatcctcagagagagcactaatggctatcaaaccgctttatgcacaacgtcaaaatggccaaccgcagaatccagaacaggacatgtcgtttgttatcccttcaacggtgaatgttagtccactaaatggacatcctcagaacacacggcaacgaaaaccaagaaagagcaccaggaccttctctgatgatggttgtccagatcagaatggagcttcagaagcagttgataccacttcctatgatttaattgggcagtatgatgctgatcatcgggctcgtgctttagcatcaggccagcatttgactgagctcaaccctcgtacccgtgaacctcttcgctttgacaggaggtatgagcgttaccttaggcccgctggcctgatgggactggcaaacatttgtagggctggtctgccctccattgatcgggcactcgtctctgcactagttgataggtggagacctgaaactcacacttttcacatgccttgtggtgagatcacaatcacactacaggatgttgcaatgattcttggattgccaatcgctggccatgctgtcactgtaaacccaacagagccccagaatgaattggttgagcgataccttgggaaggctcctccgccggataggccacgtcctggattgagggtttcatgggtcagagctgagttcaacaattgtccagaagatgctgacgaggagaccatcaagcagcatgccagggcatacatccttagcctgattagtggtctgctgtttcctgatgcctctggtgatttgtataccttctatccctttccactgattgctgatcttgagaatattggttcatacagttggggttccgctactctggcatatctctacagggcaatgtgtgatgcttgcaggaggcagtcagatggaagtaatctgactggttgtcttttgctccttcaattttggtcatgggagcattttccaattggcaggccagacctggtgaagctaaaatacccaaatgtggaggagctagaggatgagagggatagacccacagttggtttacgatgggttgtgggggtgtgcgcccgtcgagcagctcccgcacgttgctatgagcacttcacgaatgagtttgacttgctaacggatgaccaggttgtttggtgcccatatagggaggaacggatgaaggaactacagctagcccctatttgtacccaggattctcatttgtggctaacccgagcacctctactttacttctttatggtggagatctacatgcctgagagagtgatgcgccaatttggcctccatcaggtgtgcccacctccattgcgggacactagtgcggagcttcactggtgccgtcgtggaagggttcataatgactgggcacagaagcacaagtcttttgtggatatgtgggaagcaaaggagcaagatgttgtcatggaagaccggccatatgaccacagcagttatatggattatttgcggtggtacagaagatcaacacgtattcgcctgtgcacaccgaagaggataagtaatggtcacaagggtggggcatctggtgggagtgcaatttctgattctgaagatccttttcgtgcttctcagcttcgttacacccccagggctcatttgatccactcagtgaccgacaaactcactgtccttgcgaaggaggcagcttctcaaaaaagttgctctagaggcaaatgccgtgcttttgttgaccaagtcaccagaacatgtgtagaagttattggggaacttggtggatcatcactttgcgacattgtggatctggttccatgctcatcgactgctgcaacaactgcagctgaaccagaggcagagcaacagagggataaagaggaagatatacatcattccatggcgcctgatcaggaaactgagtctggcctcggttctgagaagcgatctcgatcacggactcgccgcacacaggcagacaggacagttcaaacaagatcaaccggaaagaggaagaggggcagatcagccccgcggtttatgtaccataagaagctgtgggatgaaggaacggcatggtgctcaaaccagcttatcatttcatga

SEQ ID NO: 72374 - DNA, 141 bp, Oryza sativa
  Clone ID: PAT_MRT4530_72759C.1
acaattacaattatcaatagaaatatattggtattattcaaaaacagggtttcacctattaaacacaattcaacctgattaaacaccttctttcatcacatctaattcaaattaatactattttagaaaacatactaattt

SEQ ID NO: 72375 - DNA, 1713 bp, Oryza sativa
  Clone ID: PAT_MRT4530_7275C.1
atgccgaccaatctctcctcctcctactcctcactcttcgagccactcctcgccctctcctccctcctcctccgccgcctctccgccgccgtccgccaccaccgcggccggaacacgccgccggcaagcagcgacgtccctcctcctcctcctccgtcgtcgtcgccgctcgagctcgacaggctgtacggacggacggtggtggtggacgtggacgcgtggctgctgctgccggccgtggacgcgttcaccttcttcatggtcgtcgccgtcgaggccggcgggttcctccgcggcctcctgcttctgctcgtctacccgcttctgtgcctcctcctcggcgacggcgatggcggcggcggcgcgagggcgagggccatggcgacggtggcgctggtggggctggaggagagggaggtggccagggtgggccgggcggtgatgccgaggttcctcatggcggcggcggcggcggagggcgcggaggcggtgagggcggcgcggcggtcggtcgccgtgagcgcgacgctcccgcgggtgatggtggaggcgttcctgcgggagcacgtcggcgtggacgccgtcgtggggccagagctgaggtcggtcgccggcgtcgtcgccgggatcatggatgacgccgacgcggcccgggtggcggcgaggaggctccgggcgctgctcggcgacgagatggatcagggcgaggccgacggtgccggcgccgccgtggggctcgtcggagaggggaggagtggtggcacggtgcactacctcttctcgcgttactactgcaaggaaaccttcactgcgactgaggctgacaagcggcggtggcggccgctgccgccgggcggcgagtgcggcggcgtcaagccgctcgtcttccacgacggccgcctcgccttcccgccgacgccgtccgccgcgctcgccatgtacgcctacctccccttcggcgtcgcgctcgccgtgtcgcgcatcatcgcgctgtccctcctcccctacggccgcgccacgttcctcgtcggcgcgctcaccggcgtgcactaccgcctcgtcggcgccggccacgacgccgccgccggcggcggcggggggaggctctacgtgtgcaaccaccgcacgctgctcgacccgatcgtggtggcggcggcgctggggaagccggtgaccgcggtgacgtacagcctgagccgggtgtcggagatgatcgcgccgatccggacggcgaggctgacgcgcgaccgggaggaggatcgccggagcatggcggcgctgctggcgcgcggcgacctggtggtgtgccccgaggggacgacgtgccgggagggttacctgctccggttcagcccgctgttcgccgagctcggcgccgacgtgaaccccgtcgcgctcgacgcccgcgtcgacatgttccacggcacgtcgacgacgccggcggccaagtggatggaccccttctacttcatgatgaacccgaagccgtcgtaccgcgtcgagttcctgccccgcgcggcgccggcgccggcggcggaggacggcggcgacagcatccgcgtcgcgaaccgggtgcagcgacagatcggcgaggcgctcgggttcgagctcaccgggatgaccaggaaggacaagtacatgatgctcgccggcaacgaaggcgtcgtggccgccgccgcggcggcggcggcgaccatcaaagccagtcgttga

SEQ ID NO: 72376 - DNA, 665 bp, Oryza sativa
  Clone ID: PAT_MRT4530_72760C.1
tttattgtaattcatgtgtacgagacatatgactttggtgattcattattaatcacacttcaagtggctaagtatttttatgccttaatgattattgtttcaatagccacttgaaactagtattcatctagacatattagttgggtgttataatttttcatatgtctagaaagaaggaattttggttcaataatttgatacaccaagcatctggctataatgtgaaaaaaatttatatactaaaagccgatgcttatgagtcagaagtagactggaaaatccctttgatggaatatttgaaagattctagtcttagggttgatcgggaaattcggtggtaagcattcaaatacattttgcttgatagagagttatatcgccgaaatatagatggagtgatttttctaaggttgctatgggagaagtacgtcaagggatttgcggaaattcatcaattggcccataagatgaattggttgcttaggagagcggggttctattgtccgaaaataatcgatgattatttcaaatactataggggatgcacagcttatcaacggtttggcaatgttcaattggcacctgtcgccgtattgaattctatcatcaaaaccatggctgtttcgaggttgggctttggatttcattggtcaaatttatccttc

SEQ ID NO: 72377 - DNA, 518 bp, Oryza sativa
  Clone ID: PAT_MRT4530_72761C.1
ccctccttcaaggaaatgagtaactaacagtggggaaaaaaacaggaatccaatattgaagcttgcaacagcaaatcaatgctgacccttttgcgtttggcaggacaacaaccggcttcctttaaaatcgtccgtaaacatgtttaggtggcaatccaaacaaattcagcatggaaataaccagggatcatgagggtttatttgcctggaatcccgtaacaatcctgaaaaaaaacaaaatcaactgagggttcaaccttttccatcgatgtccataaaacaactgctgaactgcccaataatttccaagcatgcttgcgtacatagggggggaaaattttatcatgccccctgatggaaatattttacatgcccctgccctggtaacgggatttgcagccacggccagggtacctgtttccgcaaccagaacaaatagggttgcaagccccacctttgccaagcggtttgtaaacagggttgcccccttgtagcacccttttttgccccttttgcca

SEQ ID NO: 72378 - DNA, 750 bp, Oryza sativa
  Clone ID: PAT_MRT4530_72762C.1
atgatgattttaagtgcacaagctaccctaatctgttcagtgtgactttgtataagaatgattcagttaggaccatgtgcctacggcaatggaggactcttttgttcttcccctctcagatgatgcatgtggagaatttttgcaactgcgagatcgagcaattgaatcatttgcagcttcaggcaagaagtgatgtttggagttttatttggggaacaggtatatacacagccaagagattttacaatctcaattactcttctttgcaacttcctaggcccatgatttggctgtggaaaaccaaatgtgtcatgaagataaaggtgtttgcatggcttctgttctgtgatagacttaacacaagggatatgcttgacagaaggcattgtgcaaaagaagatgatgatctcacatgtgctttatgcaatacacaccaccagacttcatgtcttcttcacatgtcctttcagtgtggcttgttggcagcagctagtcattcattgggattgtaatttggaattctttcagatgattgttttggcaagaatcaggtttgcacaaaggggtttccttgaggttttctttctggcggtatggcatatttggaagcaaagaaatgggctaatttttcagaatattcggccttcattccaatcatggaagtctttgtttatgaaagaagttcttctgcatatgtgcagaatgaaagatcctctcaagcaatctctttttgattggttacaaacttta

SEQ ID NO: 72379 - DNA, 450 bp, Oryza sativa
  Clone ID: PAT_MRT4530_72763C.1
atgaatgcattggcggacttgtcgcagtcgctggaaggggaacctagcgctaaggagtgtctgctggatgggatgctgagataccgcactatccgctattccactcgtggggcgtcggggtccgtcgctctcacgccggatctggcggggaccgtggctggcacggcggggcacaggttggcgcggccggacggcggcggccggagtggtgtgcggcagatctggccctcccgtggccagatcgggtgcgggcggcgacgaagcccacggcgagtgggcgactccgacggcggcatggtggaggcgctcccgtggccggtggcggaggaggaggacggcgtgaggccagcacggcggctgcacgtcgcggccgtcagcgaggccggaggcatggaggccgtcaccgtgaggccagcgcaggcgcgagcgacgacagaggtctatacctaa

SEQ ID NO: 72380 - DNA, 978 bp, Oryza sativa
  Clone ID: PAT_MRT4530_72764C.1
gattccaaatccaagccattgtttgatttcatcccgattaattactagttttcggaatgtaaaacaaattggaagaagagtaatatgagtactatttggttacttgtttcgtcgagaatggaaccgtcaatagattgaatacatcatcaggggcgtcggggtccgtcgctctcacgccggatctggcggggaccgtggctggcacggcggggcacaggttggcgcggccggacggcggtcacagccgttcgtggcggcgcgacggggcgcggaggaggccgagcggcgcgcgtcggacgcgggagcaggcggccggagtggtgtgcggcagatctggccctcccgtggccagatcgggtgcgggcggcgacgaagcccacggcgagtgggcgactccgacggcggcatggtggaggcgctcccgtggcccgtggcggaggaggaggacggcgtgaggccagcacggcggctgcacgtcgcggccgtcagcgaggccggaggcatggaggccgtcaccgtgaggccagcgcaggcgcgagcgacgacagaggtctatacctaaagcacccatatcaccaaaataaggcacaatgtttatgtggaggttggatagcagcaacagagcctggcacaatgccaatgtcaaattcttatgagctgtcataaggcaccacttcagctgtacaaagaaggaagaggtgcatatcttttcgatgttccccccccccctatcaatctggaaaatagagggcttgcctatagtgatcacatatatgtagaaccagaactataggattgctggtcacattttttacgtcccattccttgaagcagcctatgaagcattccatccttaattttattccagtataacagggttgctcagagattcattggacactatacaacaaaaacacagctgcgtatccggatgaggattcgatgatggtaatatagcttatgagtattacaatgcag

SEQ ID NO: 72381 - DNA, 337 bp, Oryza sativa
  Clone ID: PAT_MRT4530_72765C.1
atcccttcctttaattctctcgaactacgactagcttcgagctttcatcactcgtcagcttgagcgcccagcagctatcgtcagcttaaaattagcgccccagcttagcttctgagctgactcgagcttgaagacagattttggtcgcatttcagctaacacaaagcttaacacacgagctcttgtcagctgatcgatccggggttgaagagatattgaaaaagaagaagaagaagaagaatcaagcttggtgcacggcgtcgccgccatggcggcattgcgcgtgggcacgagggcggtggaagggaggttccaagcgagcaacggcggcggcggc

SEQ ID NO: 72382 - DNA, 341 bp, Oryza sativa
  unsure (1)..(341): unsure at all n locations
  Clone ID: PAT_MRT4530_72766C.1
ggattgctgngctcgctggnggtcggggcccctgctcgtcggggccgccgcgcctgccgcctttcccgtggccgcggccatccctgggttgggggggccttgctcttttttncnaatactccaccnctcccnctgctccnncccccctgtttggcntcgctcctattgctggctgnggtcgaggacgcttccgctcccgctcctcgccggtggacgaggacgccgccgctcccgctgttcgtccttggtgaggccgtcggccctgtctctcgccgggggcttgcggcgtggngtttgcgcgcccgtcgtcgctggggccggtgccgtcctccccctccggc

SEQ ID NO: 72383 - DNA, 318 bp, Oryza sativa
  Clone ID: PAT_MRT4530_72767C.1
atgggggtggtggagaagaccgatgcgagcaaccctgtgttcatcggagagatccgagtcggaggcgagctgagcaaggccatccaaggcctgcgtgaggtgacggcggccggcgcgagggaggaggagtgcgccgtttgcttgcaggatttcgtggcggaggagaagctgaggatgatgccgtgctcccacaccttccaccagcgctgcatcttcgactggctccggctcagctgcatctgccctctctgccgccgcgctctacccacacagcactacagcaggaggatgacgacaagcttgggtgcccggagctag

SEQ ID NO: 72384 - DNA, 2463 bp, Oryza sativa
  Clone ID: PAT_MRT4530_72768C.1
atgggaaatctgtgtgtctttcccctgagaaggcacatattggatgaggtataccagcatggtccttataattgtaccatacagaggaggtggaaaaagccagttgattcagcaagaactcgtctggagggcagaacaagggatcataaactggacaagctgatgattcagctgaagaacctcaggctggctttggatttacatgagttgatatctcagcagaggaacaaatatgcatctctccaactcctctccaggtggagacatgaggtcggcttgaacattgagataggcgctttcctcaagaaatatccccacattttcgacatttatgtgcacccaatcaaaagaaatgaatgctgtaaggtcaccccaaaaatgtctgaattgattgcacaagaagatgctgccatcagggaaaatgagcctgctattgctaagcggctcaagaagcttctcacgctatcgaaggatggaactctgaatatgcatgcattgtggctcgtaagaagagaacttggcctgcctgatgactataggtgctctatactaccaaaccatcagtctgatttttctctaagttcccctgatactctgacattgatcactagggatgaaaatcttgctgtagctgatgttgaagaatggagagcaaaggaatatacagaaaaatggttagctgaatctgagacaaaatatgcttttcctattaactttccaaccggctttaagatcgagaaaggttttaggggaaagcttgggaattggcagaggcttccctacactaaggcttatgagaagaatgaattgcatccaatccgcaatatcgagcggctcgagaaacgtattgttggcattcttcatgagcttttaagcttgacaatagaaaagatgataccacttgagaggctgtcacacttcagaaaaccttttgaaatggaggtaaacctgcgggaacttattcttaagcaccctggcattttctacatctcaaccaaaggaagcacacaaactgtccttcttagagagagttacaattccattaatgataatgtagtagtgtcacaacactttagcaggctttgtttatctgtatcattctctacttctcttgcatctcgatattgcatatacattctggctactctgatgcgttggctgcatctgcaatcacctggcaagacactcagatatctttctgagagtaaagctgttgtcacatccggcaacgtgctggatgaagattcatttagtgaaccaaacaagattgatgtgatggaaaaggacttaagtttggatccaaactttggatctaaggctgtatttagttcagcgcaaagtttagattttggttgaaattggagatgatgtgactgaaaagttatatgtatgataggttgatgtgatggaaaaggactgaagtttggatctaaactttagatctaaacacagcctaacacaatggctaagtattgtctcccaccgatggaaaggggtcagaaaagcttttgtattgcaccaatatcagggagcaattctgataatttctcgatcccaccgatggaaaggggtcagataagcttttgtattgcaccaatatcagggagcaatgctgataatctctcgatcctcacagttgtattatccagctgctttttgcatcaattgccacaaatgagcattgcgtcctctttctcatattagttccaaaatttcttcaaacttcatgcatccctctaatcctccaaacaaattagacctctcttcatagaaacaaccacactgagagcatcaagctgctcaccgctgattaattttaccctccgccactgccaactgatctacaattgctatagatcaatggatctggcattaatatcgtggatcaatcttatgtagccaagaacaaccaggccaaaatagcgatgcacttaattaatcactttagcgacttggttgcggccttgtgtttctgagtaaagtcacaaactgcacgcagcatattagccagctctgatatgcgtgcacatttccgcttagaggtgttgggttccaaagccagcttcctggatgagagcaaaggctttaacagttgtcaaatgtagcaatatcattagtatatcatgatatctgttagtacaattgtcagtatgtaaaaaggaaatgcttacaacttgtactacagctcattgttgtttgcactgtcagcctcatctatatcgaaaggaaatacatcagatcctaaactacattagttattatatttacattggagaatggagaataactccagtgtagatcaattattatttgaccgaacaaaaaggtggttgacaaatagaaaacatgtctagttagacttagtatccaaggcaatgggtgtctaaaatgtactgcaaaatatatatgtcttgttagtttatgtttaaaaaatttccccaatgtacacaaatggcagcaaca

SEQ ID NO: 72385 - DNA, 443 bp, Oryza sativa
  Clone ID: PAT_MRT4530_72769C.1
cgaataaatcacccatcctggttaattaccatttattcattattatcctttcctttcttatgggctagggttaattttggggttttttttcatggtttgagtctgaatttaatttctggcttggaaggaaaattttcttcttttcttcggatggtttcaaaatttcaaggggtccttaatttggtgatttaaggtggccgctttttgggaaccccggcctggaggaccgggatgggaaccaccaaaggttgcttgcccaaccttaacatgggatttgcttatttgcctgcccttggtgatcaccatccgaccgggccctgagtccctccatgcccttaaatttgggctggttcgttttagttgcctgttttatctgatggttagataaaaaaagtccaaaaattcagacattcagtgctgtcttccgagtttttctcccgaca

SEQ ID NO: 72386 - DNA, 316 bp, Oryza sativa
  Clone ID: PAT_MRT4530_7276C.1
tcgaccacgcgtgcgtctggtaaacacaaggccattaatgatgaaggcatgccccagcatggccgacctttcatgaaagggcgcctgttgcacgaactcaacgtgcagtgccctgagctctggagcactcactcctggccaatgccgatcgcttgataagacttggccaccacaacccatgaatagaccgccatacatggtgctagatcaatgtagggagacacccatgcatgatgtcaccatcgaaaaggagattatgcgcaagccgacgcccaggctgctggaaccataccatgaatacaacgaccaggatgct

SEQ ID NO: 72387 - DNA, 301 bp, Oryza sativa
  Clone ID: PAT_MRT4530_72770C.1
actaccaatccttgttatgtaagattttattaccagaggtttccatacagtggtgtccatccatacagtggtagcaaaccatgctgataccagaacatctcctatgacatacagtgaacaaaagcagcagagctatctaccaggcttagtgttttcaaggacctgtgctctgtagttttcatgttaatccaatccatctcttgaaatgcaatgctgcttccctccgtttcagttgtgcttctgtttgcactttaggagccttacctttgtacaatgttctgtggtatttaagccacaggga

SEQ ID NO: 72388 - DNA, 1966 bp, Oryza sativa
  Clone ID: PAT_MRT4530_72771C.1
atggcgacgtcgattggcgtaccggcgacgtacaggagccgaccggagaccgggaggtactggaagccgacgaggaggccactccggcgagcttcgggcgaggaggaggatccaaatccgaatatgataaaagggattcatggctttaagcttatctcctatgcttcaggaatggatcagtcagaacatcaccatcggcttgccatcgtcgccgcctacaggtgtcctcgcctatacggttggatggtcacaccgccgttgttgggcatcatcgtcttcactgatcggccgcttcgtcgtcgccagctggtgtctgcacctattcagttggttggttacaccaccgttgttaggcatctacgtcttcactgaccggccgcttcgtcgtcgccgactggtgtcttcacctatatggttggttggtcacaccaccgttgttgggtgtctacatcttcaccgaccggccacctcgtccgccgctgactggtgtttccgcctgcatgactggcctattatgccgtcgttgttgggcatctacatcttcaccgaccggctgcctcatctgccgccgcctggtttctccgcctgcacggatggcctattatgccaccgttgatgggcatctacgtcttcaccaaccggccgcctcgtctgtcgacgactggtgtctccgcctgcatggtcggcctattatgctaccgttgatgggcgtcattgtcttcaccgctggccgccttagtcgttgtcgcctggtttctccgtctccatggctacgcgattctgccaccactgattgatgccatcatcttcactgccagtcgcctcgtctgttgccgaccggtctactcgcccccatgattggtgcaccctgtagccgttgctgatggcaacatcgtcttcaccgctggttcaccttcgccgttgccgactggtgccttcacctacacggcgagcctattatggtgccactcatggacgtcgacattttcaccattattctgcttcttccatcgccggctgattatgccaccaccgactggtgtttttatcttcacgactacgcgtcttcgccaccggtttgcttctattgccgccgactcttgttcatgtcatcatggccatgcaactttgtcactatggtggagcgacttcatctttgttatcttcggcactggcaaactctattgcctctacttcgcaagccttgctacttcaccaaccatgacgtctacaagagcctcgacatctcagcatgcgtcaccaaatatgatgctgtattattttactacaacaagtggtgttccaatattcaagatttttacccggacgtcggacgttgcatcagtctttgttatgcacacgcttaagttaagaaaactattcgagcttcgacatctcctcaacaatttgaaggattattgtcactgacatcatcatcagcacctctacttcatcggccctgacgtctccgccgttgctaaggggtgactatgtcttcgtctttgtttgcttctatcatcaccgactttcatcactgacttgttatttcgtcttcacggttgacctactatgcaaatgctgatgagcgtcttcgtcattatcatcggctgctacactgctattgactggatcaacgatatcatcatcttcatcaacatcctaccatgcctcttcggctatgcctactctgctgccgttgataggttaacttcatcatcatagccggctatctctattgtgcatctacatcttcatcatcggttttctttcttaaccaccgattggtccacttgccttcacggctagattattatgctattgctgttgctgagcgccttcatcttcactactggctgacctgactgatgccggctggtttcttcacctccacggctgtgcagcttcatcacctttgattggtgtcacagtctttaccaccaccaatatcttcgtcacctctaatggg

SEQ ID NO: 72389 - DNA, 308 bp, Oryza sativa
  unsure (1)..(308): unsure at all n locations
  Clone ID: PAT_MRT4530_72772C.1
tgctctgcccgccgaggaggccaaagagcaaggggggggtttgattataaaaggcgttggccaaaaacgccanccagttagagcattccaagcaaggctagctcgccttcgcctgtacaccttgaagtacatgcatgatctgccctctccgaccccttcggcgactttcctaagctgcactaaacagtgcttgcagccagtgatgagtctactgagcatggactggtactactcgactccgtacgtgtgtgtgcttactcaagacgtggtgctaaataaaatagtatgtcatcaagggccgaggggcc

SEQ ID NO: 72390 - DNA, 156 bp, Oryza sativa
  Clone ID: PAT_MRT4530_72773C.1
atggcgactgtgcgtggtaagttcgtgggcatggttgttcggcggtggaactcaaacttatgggtgacggtggggatggtggcagcggagcttggggatggtagtgcgacggcggtgaatgagcttggggatggggactgtggcggcgggatgtga

SEQ ID NO: 72391 - DNA, 1713 bp, Oryza sativa
  Clone ID: PAT_MRT4530_72774C.1
ctatccacggacgagtggacgacgggagagggagcgaccggcgcctcctctctctccctcccggcatccttcgttgctggccggcgagcgcgcacggagagggaaaaaggcgttggccggcgaggggggcggagactgccgctggccgctggccgctgcgcaatactcttcggcgggctgcgacgcagagctagggttgcaggagtcggagggctgcgggaggatggcgtggatgacagtgaggagggtgaggacgaagtagtccgggaggtcggcgccgttggccttgagcttggtgtcgaatgttggaaataaacacgtcatggtgtattcctggcgtggttgagtcagtgtgtgtgtgtgtcgtgctgctgcatgtgtgcgtcgtgtgcgttctgttagtttgattgagtcgtgatcgcgagtgcatggctgctgcatggttgtttgcatggccgttgcagtgttgatcgagtcgtgggagtgcgtggtgtgcgtggcgtcggttcttgcggaggaagccgcgtcgtccgggcgagcgtgtggctcacggcgacgtcgagcgggttctgcggaacgtggcgcaatggccggcatggaggctagctcccggtgtgtcaccggtctataagaggcccctgtactccttcgttgtttctttgcaaggttcagtgaggaataaagccaagatacaggagcgatcggctccgcggcgttcgtcgctgtaaaatccattgttcatcgtctccctcaccggcgtttgtgttcgtgagtgtgagagtgttcctgggctgagccaacaattggtatcagagccggatgacgaagatcggagatagctcgccaccgaagatcggagaaggctcgagctcgggtgccgccgagcgcgtcatggccaactccagcgtcgtggagctcccgctattgacaaggaccaactaccatgagtggtctttggtgatgcaggtgagcatggaggcgttggagcagtgggacgcggtggaggcggtgagcaaggaccggggcaaggatcgacgcgcgctggccacgatcatctgtgccgttccaagggagatgaaggccgggctcgccgtgaagaagtcggcgaaggaggcgtgggatgcggtgaagaagatgcacgccggcgacgaccgcatgaaggctgcgagtgtccaacgtctcatgaagcaggttgagaacatgacgttccgtgacggagagaacgtcggcgacttcgcgatgcgcatcaacggtctcgtcgccagcctgcgcgagcttggtgaggagatggaggacagccgcgtcgtgaagaaagttctgcgcgtggtccccaagagactgaagcaagtcgcggtggcgattgagatgctcgccgatatcgacaccatgaagatcgaggagctcgtcggccggttgcaggtggcggaggacgcggacgctgaggatcaagcggcgtctagcgcggagcatgctgggcaactcctgctcacggaggagcaatgggaggcgaggcggcgtcaacgccgtggcaaggagcatgtgcacggcggcattggtgagaagggcggcagccacgacgacgacgacgatggcagcagcacaagctcgggacacgtgttgatcgagtcgtgggagtgcgtggtgtgcgtggcgtcggttcttgcggaggaagccgcgtcgtccgggcgagcgtgcggctcacggcgacattga

SEQ ID NO: 72392 - DNA, 243 bp, Oryza sativa
  Clone ID: PAT_MRT4530_72775C.1
atcacagggtcagcaatcgaaccacgcgggatggaccccaggcgatctgaaaagatgtttaatatccccataccacatgggcacggaaaggactagaattaactggaaaatgaaaatgccgacatgacgcacaggctggctgacaagatatcattcttacttggacagatggactggcctgccgtggcaacaacgggggagaacaggcatccatgatcgggacctggactggcagacggcccc

SEQ ID NO: 72393 - DNA, 192 bp, Oryza sativa
  Clone ID: PAT_MRT4530_72776C.1
atgaatgaagtacaagctgttggtcgtattgagcctcggaagccgatcgcagcctcccccaccggcgccgaggtgggagcgcccttcctgccgtcctactccgatgtgaaatggatctgcttaccctcctgcccgactcctcagcccaccgatacgccattcatctccaccaagaagatgaaggacgcttga

SEQ ID NO: 72394 - DNA, 1184 bp, Oryza sativa
  unsure (1)..(1184): unsure at all n locations
  Clone ID: PAT_MRT4530_72777C.1
cggacgtgntntnttttactgttcagagccgtaattcaatgtatatagcacgcacgtacgtcctcgaattcgtagtgtcctcctgtcccgtatacatactagtaacatacattcacgtacaccgtacacgtgctacatacataccattaaattggatctcgagatgggtgtacatacatcatatcgatcttcatgcacgcgacggagagctatctaccggcggcgattggattcggtggcgccattaataaggggcgagacgagcttgagcttgccgccgtagtcctcggcgaggttggagtcgtcgatggcgtcgcggagcgtggcgtggaggtccttgtcggcgacgaagacgaacttcttcttggtgttgtcgtcgatgaaggggtagatgatcttccaggccgccatgaacacgtaggggacatggatcaagaacaccctccccagcctctccgggtagtagttctgcatgatctccagcgccgccacgtacgcgcggatgtcgcagttgccgtagtacccccacccctgcaggtcggccacggcggcgaacttctcctgcccgccattgccgccgaggcgggcgcaggtgcggtcgaggacgtagacgacgtagcgcttgaactcgtcgaggtcgcggcgcgccgggaagtggcgggcgccgaagccgtacaccagggggcgcccctgccggtcgtagccctgcatgtagagcttctcctgcgccagctcgccgcgcacctcctcgtcggcgatggcgcggccgccgggcttcacctcgcgcttccactgcaggtacttcaccagcatcgccgacgccttgccgatgttgtggtctctcgcgcgcaggaaccggcgcagctggtagtcgtcctcctccttgcatgcagggtcctgggcttcgacgacggctctcagctcggccaccttcttccactccgtcacatcgccatcgtcgcggtgcccgtctcgctcctgctgcttgcagtaatccatggctgccttagctagctctcctctcctctcctcttgaattgctcctcgcgcgatgataattcagaaatggaagtcgagagctgaagccctttttataggcagaggagaaacagcagcagctccaaaaggaagctaagctgacgatgcagcgtcgctgacccccactatttatggttgcggtctaa

SEQ ID NO: 72395 - DNA, 175 bp, Oryza sativa
  Clone ID: PAT_MRT4530_72778C.1
cataattggagatttttattgctcgagaggacctgttggaggcacggattggccatataacacagcacttatgaacaaattttaatgttcatgctaactgcacaatggcttgcaagttatcaatatcttgatatagaaattctgtttccggcttggcgactaaacaggaatcccc

SEQ ID NO: 72396 - DNA, 228 bp, Oryza sativa
  Clone ID: PAT_MRT4530_72779C.1
atgaggagcaacgacgtggagcagcgtcggtggcccgttgctgaagaattcctcatcatcgccgtcttcacggagagggacgccgacgcttgggctttccactccggctttgagctcttcaccatcctttacaccgagaggcggaggttgagcagcgatgatggctggggagatgaatccacgagggggctccatccgagaaggaggagcggcctagaggcgcagtga

SEQ ID NO: 72397 - DNA, 990 bp, Oryza sativa
  Clone ID: PAT_MRT4530_7277C.1
atggcggtgttgattcagtctttgttccacgtggagatgacgtggcgcttatcggcggtcggtgcctcctccaacctcattagcagcagtggcgctggggtcctcccaagcggcggggtggcgggctcttccccagcggcgagccggagcggcggtggctggcacctccccagcggtggtggcggcgggctcctccccaatggctatggcggcgggctcctcccaagcggcgatctccgcctcgatgtggcagatcttggcctcgacgttgtagccggcggcgacatcaagctcacggcggtggttctcctttctcgcgcccttgaggacggccgcaatggtggggcaacggtgatcacccagttgagggcgtcccagtcggaatcgtcgtcgtggcgcggcaagagaaagaggtccggaaccgccgaggagcggagaggaggtaggacgaccggccgcgatggtgaggagaatgccgagaaggagaaggaacaggaggaggaggaggcggtggcctcagcttcgccactggcagagcatgcctcttctggggcgtcatccgccataagtttccccctacgttggccttccctccctcacgccgtcttgggggaaactgccttcggagagaccatcttcgagccattcgagggcattgacctagacatcgttagggcccatgagaaattgaaaaccagatactttgctaagcaagataaggttgacacaattgtagttgctgacctgctgcaatacgacaaacaatataatcttgctatgttcaagatttctatagatctatctgctcagatatcctcttttactagtaagctaaagtgtgctcaaaaggtttttgtactgcactacgacaaacaatataatcttgctatgttcaagatttctataaatctatctgctcagggagctttggttggattgtgcatcaagttcgaccgcccctttgccatggcggacaaacataagctgtaa

SEQ ID NO: 72398 - DNA, 567 bp, Oryza sativa
  Clone ID: PAT_MRT4530_72780C.1
tgcaggaattcggcacgaggggcggcggaggagcaccggcggacgacggcgagggtggagacgggctcttgggcggtggattcgcggggcccgtgctgggcggaggcggcgcggcgggcgtcggctttcctcctggattcgcggcgattcctgttgcgggcgcggaggcaggcgccgcgggacaggatgcggtgtacgcggcggtccccgacgccgacgaggaagagggtttctacgaggaagatggggacgagggtttgggcgaccgtgatgatgcagaagagggggggcacatctgccaggcgtccaatctcaactgcaagaaaggcagcactgatgaagttgcagctggattgcagagccagtatgacatcgctgcctcaatcaacaagaagaggcccaataaaccagccaggaagccatgtgccctatgctacatggaatctttgcaatcgggggtctacaaggagaggttcttggatgctggggggatggagccacactacaagcgcgtccaccccaaattcatgtctgagaataaggggaggacgttccagtgcacaaaat

SEQ ID NO: 72399 - DNA, 244 bp, Oryza sativa
  Clone ID: PAT_MRT4530_72781C.1
tatgtgtttaattccaaacaaataccctgtgtatcttttttattcaatctgttttttttttctctcctgagttggatgtgtcggcttcgatgggcatatgtcttctgatcctttcttgtgcggctgttatatttctctaattttttgcctttttgacttacttttttatggttgctttttctgcatgtttatgtgttttaccttattgtggacagtgttacttgtccttaaaaggtgagagatg

SEQ ID NO: 72400 - DNA, 1023 bp, Oryza sativa
  Clone ID: PAT_MRT4530_72782C.1
atggccacttcttctcggaggatgcgcgccgtgcagtacgacaagtacggcggtggagctcaagcactcaagcatgtggaggtaccgatcccgacgccgaagaaaggcgaggtgctgatcaagatggaggccggcagcatcaaccaggtcgactggaagttccagaaaggtgtcgctcgcccgttcatgcccaacaagttccccttcatcccagtttatgatcttgccggagaggtcgtggagctgggccgcggcgtgagcagcttcaaggtcggcgacaaggtcatcgccatcaatttccctggcggcggcgggctcgccgagtacgcggtggcgcaggcgtcgcggacggcgccgcggccgccggaggtgtctgcggccgtgggcgcgtgcctgccgatcgccgccgtcacggcgctcgtggcgctgaggaccgccggtgtcagcttagacgccggcgacggcggcggcggcggcgccaagaagaacgtgctggtcaccgcggcgtccggcggcgtcggccacttcgcggtgcagctggcgagcgccgccgggcaccgcgtcacggcgacctgcggcgcgcgcaacgccggcctcgtcggcggcctcggcgccgacaaggtgctcgactacgccaccccggagggcgcggcgctgcggagcccctcggggcggaggtacgacgccgtggtgcactgcgcggcggtggcggggctcccgtggtccgcgttcgcgccggtgctcgccgacgccggcgtggtcgtcgacctcacgccgggcgccgcggccttcgccacggcgctgcggcagagggtgaccttctccaggaagaggctggtgccgctgttcgtgtcgccgacgaaggaggacatggagctcgtcgccggcatggtggcggaagggaagctcagggcggtgatcgagtcgaggcacccgctgagcagggcggaggagggctgggccaggagcatggcggggcacgccaccggcaagatcatcgtcgagatgggagacgaacagtga

SEQ ID NO: 72401 - DNA, 561 bp, Oryza sativa
  unsure (1)..(561): unsure at all n locations
  Clone ID: PAT_MRT4530_72783C.1
ggcggcggcgcaacgaagacgcggcggcggcgggcggcgcgacccgaagcgacggcgacggcgacanacggctctctcatccggccgccaccttctttccgtcacagaaggctatagttcgtcatttggagcaatcactgatgttgtattttatgtgattaaaatgtgatggtagcagcttcatgaagtacttaaactctcattttgggagatcctaggagaagtttgggttttgttgtgtatttagacttcgctagtgcaacctgttttgagtttgctatgtgagatacttggaaagtgaaaagaatgtttgcgatgtgctccttgcttgaaaaaaaaaaaaaaaaaaaaaaaaaaaaaaaaaaaaaaaaaaaaaaaaaaaaaaaaaaaaccaaccaaaataaaaaaaaccaaaataacaaaaaaaacgcctccacccccctacccttttctctcttccctgccctgtctctcttccccggcccgttttgttacacccttctgggggggccctctcctggggcctccccttttctccccctttcgccccctttctttttt

SEQ ID NO: 72402 - DNA, 3962 bp, Oryza sativa
  Clone ID: PAT_MRT4530_72784C.1
cccgaaatccaccaccaaacgctcgcgagattaatccgattttaatcctcgagatttgtttaatggcagggctaatctcgccccaggccttgtagaaagcgacacccaaaccaactcacctccattggtgaggtgccctgtccttttctctctcctcctcctcctccatagttaagctccccaccaccactactactagtagtagtagcgctgccacctcccgctccactcccgcgtcctctgctggaagccttcttctcctcgccgggaggattccagcgcgggatgcggcggtgctgatcccggtgtgcacggatcttgggtgtgattcggtgagctgagagctggtttgctgctgctgcagcgtgcgccatggacggcgacgcggatgccgtgaagtcggggaggcacgggagcgggcaggcgtgccagatctgcggcgacggcgtgggcacgacggcggagggcgacgtgttcgccgcctgcgacgtctgcggcttcccggtgtgccgcccctgctacgagtacgagcgcaaggatggcacccaggcttgcccccagtgcaagaccaagtacaagcgccacaaggggagcccggcgatccgtggggaggaaggcgaggatactgatgctgatgatgtcagtgactacaactaccctgcatctggcagtgccgaccagaagcagaagattgctgataggatgcgcagttggcgcatgaatgctgggggtggtggagacgtcggccgtcccaagtatgacagtggcgagatcgggctcaccaagtatgacagtggcgagatccctcggggatacatcccttcagtcactaatagccagatctcgggagaaatccctggagcttcccctgatcatcatatgatgtctcctaccggaaacattggcaagcgtgctccattcccctatgtgaaccattcaccaaatccatcaagggagttctctggcagcattggaaatgttgcctggaaagaaagagttgatggctggaaactgaagcaggacaagggagcaattcccatgaccaacgggacaagcattgccccttctgaaggtcggggagttggtgatatcgatgcatccactgattacaatatggaagatgccttactgaatgatgaaactcgccagcctctctctagaaaagttccccttccttcatccagaataaatccctacagaatggtcattgttctgcgtttggttgttctaagcattttccttcactaccgtattacgaatcctgtgcgcaatgcgtatccgctctggcttttatctgttatatgtgagatttggtttgctttgtcctggatattggatcagttcccgaagtggtttccaatcaaccgtgaaacctaccttgataggctggcattgaggtatgacagagaaggtgagccatctcagttggctgctgttgacatttttgtcagtacagtcgaccccatgaaggaacctcctcttgttactgccaataccgtgctgtccattcttgctgttgattacccagtggacaaggtctcttgctatgtatctgacgatggtgctgcaatgctgacttttgatgcattggctgagacttcagagtttgctagaaagtgggttccattcgttaagaagtataacattgagccaagagctcctgagtggtacttctcccagaaaatcgattacttgaaagacaaagtccacccttcatttgttaaagaccgtcgtgccatgaagagagaatatgaagaattcaaagttaggataaatggccttgttgctaaggcacagaaagtcccggaggagggatggatcatgcaagatggcacaccatggccaggaaacaatactagggaccatcctggaatgattcaggttttccttggtcacagtggtggccttgataccgagggtaatgagcttccccgcctggtctacgtatctcgtgagaagcgtcctgggtttcagcaccacaagaaggctggtgccatgaatgctcttgttcgtgtctcagctgtgcttaccaatggacagtacatgttgaatcttgattgtgatcactacatcaacaacagcaaggctctgcgggaagctatgtgcttccttatggatccaaacctaggaaggagtgtctgttatgttcagttcccacaaaggttcgatggtattgataggaatgatcgatatgcgaacaggaacactgtgtttttcgatattaacttgaggggtcttgatggcatccaaggaccagtttatgtgggaactggttgtgtattcaacagaactgctctatatggttatgaacccccaattaagcagaagaagaagggaagtttcttgtcatcactatgtgggggcaggaagaaggcaagcaagtcaaagaagaagagttcggacaagaagaagtcaaacaagcacgtggacagtgctgtgccagttttcaatcttgaagatatagaggagggtgttgaaggtgctggattcgatgatgagaaatcacttcttatgtctcaaatgagcttggagaagagatttggccagtctgcagcgtttgttgcctccactctcatggaatatggtggtgttcctcaatctgcaaccccagaatctcttttgaaagaagctatccatgtgataagttgtggctatgaggacaagaccgaatggggaactgagattgggtggatctacggttccgtgacagaagatattctcactggattcaagatgcatgcgcgaggctggagatcaatctactgcatgcccaagcgcccagctttcaaggggtctgctcctatcaatctttcagatcgtcttaaccaagtgcttcggtgggcacttggttctgttgaaattcttttcagtcgccattgtcccatatggtacggctatggaggacgccttaagttcttggagagatttgcctacatcaacaccactatttatccattgacatcgatcccgcttctcatatactgtgttttgcctgctatctgtttgctcactgggaagttcatcatcccagagattagcaactttgctagtatttggttcatctctctcttcatttcaatttttgccactggtatccttgagatgaggtggagtggtgttggcatcgatgagtggtggaggaatgaacagttctgggttattggaggtatatctgcgcatctttttgccgtcttccagggtctcctcaaggtgcttgctggtatcgacaccaatttcactgtcacctcaaaggcttctgatgaagatggcgactttgctgagctctacatgttcaagtggacaacgcttctcatcccaccgacgaccatcttgatcattaacctggtcggtgttgttgctggtatctcatacgcgatcaacagcggctaccaatcatggggaccgctctttggcaagctcttctttgccttctgggtgattgtccacttgtaccccttcctcaagggtcttatgggtcggcaaaaccgcactccgaccatcgttgttgtttgggcaatccttctggcttcgatcttctcattgctgtgggttcgcatcgatccattcaccacccgtgtcaccggcccagatacccaaacatgtggcatcaactgctaagaaagcaggggattgtagagacagaaatactgccagttgtgttttttcagaatacaaagtgccactgccaccaattgtgttttaagttattaggaggtggctttatttacagctacgtacagaccagaaaatattgctcatcagaaagttacttgtgtcgatatgtattcttttgttgataagttatatactattttgatgagagtggctgacactgtcaacgagttttgtatcttatgaaggacacaataaactattagtttgcattctttaaatttccgttcagttttctgtctttcagccttatgcatgttggcagcttaaactaaatattctttatctgc

SEQ ID NO: 72403 - DNA, 428 bp, Oryza sativa
  Clone ID: PAT_MRT4530_72785C.1
aacccccaaaggggaaggttttttaaaaggggaagaggtttttttttaaatttattggcccctaagtttcaacagccacacaggggggggggggattttttttttaacaaccaaactttttttttgttccaattaagccccaaacccccccaacgggggaaatgttctggggagcatttttttatttgggggaaatcccacatttggggggcaagttgaaggcaaaaaaagtttgggtttgaccttgggtttgaccaaagggcccccccctaattgggtgaagttggagttggggcaaaatggtttgaaaaaaattaagggcctggaaaggaaattgttggcctcccaccctgggttgtgggaaaaactggtggggaaaaactgggttgttaataaaaaaaaacaaaattggttgccaaaagggggtt

SEQ ID NO: 72404 - DNA, 469 bp, Oryza sativa
  Clone ID: PAT_MRT4530_72786C.1
acgactacgcgtacgatcacgcgtactgccacacataatgtcacgcgtgcggccactgcgctccgtgctagatcgcgagcgtgctgtctgacacgctgacggctacaaatccaaagccaaagacatatccattgcagagaagaaacttccgatcgttatgaatgtagtgcattaccgaggcgctgaactctggcatgagaactatcttctgggtactgctgctgcacattatccagaggttggctgagacaagcatccatagtatgactgaccattttggagggctgcgatgtttgatgccaacttccatgagcgcaatctttactaccatacactaattatctccatatcaagcatgtaagactgtgcacagttagagatcaagtcgggatctgagaacggaagaagtattgaatccttacactactagattgaacaatacagctatgtacgtgcatctcgcgacata

SEQ ID NO: 72405 - DNA, 531 bp, Oryza sativa
  Clone ID: PAT_MRT4530_72787C.1
atgggtgggcgagcagaggtgggggaagacgccggcgccgcaggggaagccaaaggtggccgggaaattccagttgccgaggaagaggcggtggagagcggcgcagcggaggatgtcggcagtgaggggcacatcaaagtaatggacgggcttgttgacgaagacgagatcctctacgcccttggcggcgacgaggcgcgcccactcggcatgcatcaaagtaaccgctcctggagcacctcgagggaggaggggagctcgacggcctcgagctcgccggcggggtcggaggagagcggcgcctccgtcgcccccatcgtcaagtccctccacggcctcgatgtcgaccgccagaacctcccccgcgccgggctatcgggcgtcgacggggaggcgcgggtgtgcgcgggcgtcgacggggcgaggcgggaaaggaggaagacggcgccgcgacgggacgatctgaagcccaagcagacgagaaagacgcatctcatctttccttctctccgatctctcgaatccccctga

SEQ ID NO: 72406 - DNA, 951 bp, Oryza sativa
  Clone ID: PAT_MRT4530_72788C.1
atggtcgtccgcgccggcgcctacgacgacgagctcatcaaaaccgcaggggatcttggcgatggacgagttccacgggacgccggggaaggggccggcgtgcgtcggaaccgggagccgcgcagcacgcccgtggtgagtccgccggggctgccgcagtagatcccggggggcctcccgtacgaggagacgctgtacaagcccacagtcgacgacccaggcatcgtcgacgtcctcgccgaggaggggatcctgctcgttatcaacctcgacaagggcctcgtcccgctggcagagtccgatccggagcctttggaggacgggttggtgccgatcgtggaacctgagttcctgatctacggcgatacaccggccgaggcgaggcctcagatgccacaccaggtcatggtggacaagttctacaccgtgtcgtagcaggggaggaggggtcatgtgcgatgcacgaatcgaacgatacttacgggaggaggctggcctagaacggggctggcagggcgctcagtgccgctgctcgtcacggcggcggtgctggggcacaacttctcggggggcatccagtgcgaggtgtcgctgttcccgtaggctttctgcgatcacacaggaagcttcgtcgacaactccgaagagatagggcgccggatctgcttagacaagggccacgtcgagcggatgcatcatgattgcgggattttggagctagttttttggagctttgttgttttgggttgcagtcgatgctcggcaggctcccctctgtacaaggaggcgctgggacatttgtctgcaaggttttgtaatgtatctcctgatttgcatggttgctgcctaatttcgcatgctatatatacccgacgcttgaacgtccgatatgtaataataagggctaatttttaatgataaaaaaaaaaaaaaaaaaaaaaaaaaaaaaaa

SEQ ID NO: 72407 - DNA, 312 bp, Oryza sativa
  Clone ID: PAT_MRT4530_72789C.1
gaacgaattctccattaaaaaaaactcctgttgttacacacaagattcacatttttgctttgggattaacggctgggctgtgaaaactgaacaggctttggcgcgttcacgtaacgagaaaattcccaccctacagggatgccggtattttagattcatcacacggggtatcgaaggcagctttgctcattagaggtaaccaaatttcactctaagcgctttgagctgctttagatttgcggagtatggaacagtccggcattgcatcaaaagatttggggaacattgcaatctaaagacccccgacgccaa

SEQ ID NO: 72408 - DNA, 588 bp, Oryza sativa
  Clone ID: PAT_MRT4530_7278C.1
atggcggcggcgggcgaccgcgagggtgatggcggtgggccttggctaggcggcggcatggaaatcggttttcgcgtgcgggcgcgccacccgcacgcgaaaatcgcgattttcccagaccactggagatatgtttgggcaaaaatctgccgcaaagacttatggatcaaatcaactggcacgctcacgaacctaaaggcaagattttggacctgcattgaagttaagcagatcttccaggccagtgtgtgtttttcgcatcaacacgcttttggcatgcccagtgggaaacggcaagtgacaacaatgtcagcagaaaagccatctccgtcgtcggcaagcaagccgccaattcctccgaaaacggagctggccttcggtgaggctagtgtcaaggacatctgcaagtacggcgacattttcaagaaggtgctcgccgagggacacaagtgggagaatcccaaggaactcgacaagccttccctcttttacaggtatgtatattggattagtgattctattggtggtcactttgcaaaggttgctgtttcagtggataagagggcttactatcaaaaactgaggtga

SEQ ID NO: 72409 - DNA, 363 bp, Oryza sativa
  Clone ID: PAT_MRT4530_72790C.1
tttataaaaaaaaaaaggaacgctcccttttgtgcgccagaccgacgccggatcctcccgccggagccgctcagatcctcctagcgcgcgccagcccgctgtcgccgcctcccgacggagctggtcgccttcttcacagtgctcgcccgacggagacggctgaccctacccaccgctggctgatagcctgctcgcgccacgccgtgatggagaggaaagagaggcggggtctgctcgccctaccccgccgtctgctcgcgtgcgcaggccggacattcgggcgtggacgcccgaaaggggatatgaggcggcggaaattctcgctaggaggaggagagggggccaacggaggagggctagagg

SEQ ID NO: 72410 - DNA, 1494 bp, Oryza sativa
  Clone ID: PAT_MRT4530_72791C.1
ggcacgagggctctgttttttttttttttttttggaagagtataagcaagtaattctttgatgcaaagagttaagaacaatgctttcactggagttccaaagaaaatgaatcaatgtgtcaaacaaagcagaataatttcatctgtatgaagtctatgactgtagtattatcatttatctcccccaacttcctgatactacaataccctcacctaaatcaatggcgatttccttccatccatacacccaattgcaaaagatgcaacacaatcctgaatccaaaatgtaaaatgtagtagtggagtagtaagtatggcgcggcagcggcatccgtcggcgacgtagctgcagttattctgggtatgaaccgatgctaatcttggtaatctccgattccgacgacgacggtgtcatcgccggcgacggcgagtcaacggttgaggaagccactgatgaccttgtcctgcgcgatggccgcgtcgcagtgcggctcgaggaggtggaacgtgtgccccttctccggcgcctgccatatctccgcctcgccgcgccacccgctcgacgtgagccggtcgtagtaggcgcggccgcggtcgcggagcacgtcgccctcgccgatgcacacgagcacgcggtcgcacgccagcgcgtcgagcgccggcgcgccgtccacgagcgggttgatgagcgggtcgtcctcgcccgtggtggccgggcacatgacgcgccacaggctcccgaggctctcgcgcacggcggggtccaggtcgtcggaggccaccctgttagtgccgaggaagtaggggtggatcatgacgaggccccggatcttggcgccgggggggagcccctcctcggccacccgcatcgctatgtggtgcgcgatgttggagccggcgctctcgccgccgaggtagaggcgggagaagtcggcgtggtcgacgagccacgcctcgtcgccatcccccgcggcgtgtccggcgacccacgcgagcgcctcccacgagtccgcgtaggccgccgggacggggtgctccggcgcgaggcggtactcgacggagacgacgagggcgttggcgagcgcggcgaaggtgttgaagtaggcgtggaacgtggggttgaaggccgagccgaggcagaacccgccgccgtggtagtagacgagcacggggagcttggccttggtctcgccgccgtcgaggtcggggaggtagaggcgcgcccacaggccggtggccgggtcgatggtgacgtcgcgggaggcgacgccggtggcggcgtcgacggagggcgggacgcgggtgtccgggaggaggcggtcgacgcggccgctcctgtagcaccggatcagcggcaggaactcgaacgtgatctcgtcgtcgggctcggccttcaaccccacgttccacgcctactttaacacctttgccgggctgggcaacgcccttggtgtgttcgtggagtaccgactggggccggagcaccccggcccgg

SEQ ID NO: 72411 - DNA, 525 bp, Oryza sativa
  Clone ID: PAT_MRT4530_72792C.1
atggcaagttcgccggcacactgttttagcctccatgtcgtgctcgctggtctcccaccgtcgatgtctctcgcgcctgctgccgctcgccacgactcgtccctcccgtcagctgttgtcgtcgcccgcgtcggccctctatcgtcaatcgtgctagccagctgctgctgtggcctgcgcctcccatcggccagccggtatgctaccgctcgaacctcccaccggccgcagcgtcctctcaacctcccgccatcccaccgctgtcactcgcgcggacgcctgcacctccaatcaaatcccgcggccaacaccagatctagtgggggagacaaatacgacgatggcggatccgcagcttcacgctacaccgtcacacagccttcccagcacgtcgtgccgcctcctcatgccgagggcgggctgcagctggggttttggctccgccgtcactatcccggcagccgtgtagatttcggcgacagcgaggcggggagaggaggggagggtggtggctgcagggagtag

SEQ ID NO: 72412 - DNA, 318 bp, Oryza sativa
  Clone ID: PAT_MRT4530_72793C.1
ccacgcgtccgtcacgcgtccgcccacgcgtccggaggattcgaacatttttatccattcttcacacgaggtagaagcagatctcggtttactgctccagattcttgtgaaccaacggttaagcgagtgtaggttacagaatgagttatgtttgtaaatgcacttttttttggtcttatatatgatttagtttctttcgaccttgtcctgaaactttctgtaatgttccactctcaggaaagctttcactgaaaggagagaagttttctttgaggctatgtctgagaaagtagcagatagttcttctgagagaacgac

SEQ ID NO: 72413 - DNA, 152 bp, Oryza sativa
  Clone ID: PAT_MRT4530_72794C.1
atgaggcctgaccccctctggagggtcgggcccgagggtgatgtggccgcccccctcttagtctccccgaggggtcggaccgctcccgtttcggccccgagggttgaggcgccccgaccccttgggagttttgtgccgcgtgtatgggttag

SEQ ID NO: 72414 - DNA, 322 bp, Oryza sativa
  unsure (1)..(322): unsure at all n locations
  Clone ID: PAT_MRT4530_72795C.1
cttctcactcccatccatgtaggcttagctccgctaaaaccctagcaggttacattcccagccagcggcagcacgcacgcgccatggaggctaggcgttgccggcgccgcaccgccagcgcagagcggcggcggcgaggaggcggctgtgcagcctcctcgccttcgccggcgactacctcaagtacctcctcacgaagcggggccggttcctcggcagggtggccaggaggtccctcgccgccctgctcctgtcatccggcggcggcggcaagcatgcctngccacggcgccgtggccgacgttcgcgctggcggaggcga

SEQ ID NO: 72415 - DNA, 277 bp, Oryza sativa
  unsure (1)..(277): unsure at all n locations
  Clone ID: PAT_MRT4530_72796C.1
cggncnnntacacananntagcnnttnttntgcatcnncctcctcgntccanatntnnnggtcgagttcttggcggatctctnccctcccaccanctcttgctaacaggttcttggtgtagcttnccacttnnancagcaaagtttcatgtctgatctggacattcagatnccaactgncttcgatcccctttgctgaggccaatgctggagactctggtgcgncttcatgatcaaaggactacgttcaatgtacgcatccagnagcgtaatggccc

SEQ ID NO: 72416 - DNA, 918 bp, Oryza sativa
  Clone ID: PAT_MRT4530_72797C.1
atggcgaacgcgagtgcaacgcccaagacccctcgccgccgccgccgcgtcacgttcctggctaggacttgccaccgcctcctccgcttgctcgccactcaccgcctccgccgcggtggccatggccttaactccatcagcgccggtgacgactcccctccctccggtcagccgccgcgaggccgggacgcggaggaagccgaagcgacccaggcggcggcggcggcgcaacggcggcacgaggagcgacacggcgacgacgacgccgccgccaccgaggaggcggaggcggccgtggcggggaagtactgggcgcagcggcgcagcctcttctccctctacgaccgcggcgtgcggatggacgcggagggctggtactccgccaccccggagcccatcgccgccgcgcaggccgcccgcgcgccgccgggatccctcgtcctcgacgccttcgccggcgtcggcggcaactccatccagggttgctacgtggtcgccgtggagatcgacccccggaaggtggagctcgcggcgcacaacgccaggatctacggcgtcgacgacatgatcgagttcgtcgtcgccgatttcttccacctcgcgccctccttgaaggcagatttggtgttcctttcaccgccatggggagggccatcctacagccaagctcaagtttactcccttgatatgctgaagccaagagatggatttacaattttccaagctgctcaggaaatatctccaaatatcatcatgttcctgccacggaatgtggacttaagccaagtagagcaactttcttggttgtcttctccccccttggattttgtgagcgaagagaattacatagaacatagattcaaagggataaccgcctactttggaggtttggcacaagaagttctgaagcaaggataa

SEQ ID NO: 72417 - DNA, 138 bp, Oryza sativa
  unsure (1)..(138): unsure at all n locations
  Clone ID: PAT_MRT4530_72798C.1
tgccttttgattgctgaggcctccgggggggggggcnnctgctcngggtactnngatactcgtggtgtttggccgccggtgcacgcgggtgcgcggttgcctctcgtggtcggcgttcttgcccctgggggactgttt

SEQ ID NO: 72418 - DNA, 948 bp, Oryza sativa
  Clone ID: PAT_MRT4530_72799C.1
atggtggcggagctagtggaggagcgcgacaccaagccccgtgatggaaaattcaagatccaacaacggttgggctggtccgcactggcgcatgccgcctcttgcctccctcccggtgccccttgctccaacctcccactcatcgccggctgcctccttccacctcccatcggtatcgtctgtttgctcacttcccacccggcgtcctcctgcatctcacttgcaccaacagctgttgggctactcactgattccataccaaaggaacaaggagagcagctggatgaggcggtgccagagctcgagccgctccgttgctccgcctgccgccttcccgccaccggtggctgcttccctcgttacctcccctactacaactcctccctgtcgcgcaccgtccgggcggtgccgtgcgacgacggcgccctgtgcggcgtcgcgccagagaaggcaaggtgcgcgcgcggcagcgacgacgtgtgcgtggtcgtggcaacctacggcgccggcgtagagctcagcgttctgggcactgacgcgttcacgttcccgtcgtcggggacgacgctcaactccaagttctcctacttcctgacaccctacttcagagacaccatcagcccgagccacctattcgtcggtgacggcggcgcggcctgggcgctggcggcggcgctccgtgaccaatccggacgtttcggatcgttccaagcacatgcttacctcggcgttgccgtggccatcgaaaacgctgaagaggtgggccggcagccggagtgcgtcggcgtcgaggcccagcccgtccaggtcgcgcacctgcgccggttagtgagcagccgcaccggcacgtccgcgaaccgcggcacggcggcgcacgcgtccttcatctccgcgctgcggccgcgcgtcgacgcgtggccccacactggcgcgcagtccatcaactaa

SEQ ID NO: 72419 - DNA, 1200 bp, Oryza sativa
  unsure (1)..(1200): unsure at all n locations
  Clone ID: PAT_MRT4530_7279C.1
gggccgagtgcaaaaccacccgacgcgacggaggcttccactccgccaccgccaccgccaccgccgcgcctcccctccccgncggcgacggtgccatcccaccggccaccgggagcaggaagccaggaaccccaccgcaccagcagcttacgccgcaaccagcccatgggcagcatcggcggcgacgaggcggcggtgctgcgggcggaggagtcggcgtcggggggcgtcgacgtgtggagcgacgccgtctcctcccacgaccccgaccacctcctcgtcatggtccacggcatcctcggcagtaatgctgactggcaatatgcggctaacgaatttgtaaagcaacttcctgatgatgtaatcgtgcactgcagtgagaaaaacattaataccttgactctagaaggtgtagatgttatgggggaacgtttagcagatgaggtgatcgatgtaatcattcgaaagccagaactcactaagatttcctttcttgcacactctgttggaggattagcagcaagatatgcaattgcaaagctttatagacatccaagtgacacatccaagagtgaaacgaaaggaaccatcggcgggttggaagcaatgaactttataaccgtagcaacacctcaccttgggtctcgagggaacaatcaggttccccttctctttgggtccattgcaatggaaaattttgcttctcgtgtggtccattggatatttaggagaactgggaaacatctttttctcactgatgatgatgagggagaaccaccattattgcagcgcatggctgaagattatggtgatctttatttcataccttctacttgtcaattctttaattcatggcattcagacattgttggctggagaacatcgtctatcagaagaaagactgagctgcctaagtgggaggaatcgatatctgaaaagtacccccacattgtacatgaggaatactcagaagaactcggtgatgaaacatgtcaaaattcggcaacagtttgtgattcagacatattggaagaaaaaatggtgacaggacttcgacgagtatcatgggaaaaagtagatgttagcttccataccagcatgcagagatttgctgcacacagcataatccaggtcaagtaccagtttatgaacgaaggcgcggatgtcatacagcacataatagaccacttccaagtctga

SEQ ID NO: 72420 - DNA, 459 bp, Oryza sativa
  Clone ID: PAT_MRT4530_727C.1
tacgacgcgaccggcattgggagcggtggagaaggatctgacgacgatggcgtcaccggcgaagggaactcggcgacgtgtgaggcggcgctgactcccatcgatggaaggccggacgcccaactccccgacgcgccgccagccgccccagcccccgacgcgcggccgagcacccggctccccatcgacgcgggccgcaacgccgccgccacgggtcacattcgcgtccgcgttgctgtcgccgccgcaggcagctgcatccgcgccaccgccggtgtcgcaggtcgtgtccgcgtcgctctcgccgcgggccgcaaccgcgccgccatcacaggccgcgtccgtgtcgccggaaccacgccgccatcgcaagccgcatccgcgtcaccgccgccgcaggccgcaaccgtgccgccatcgcaggccgcgaccatgtcaccgccgccgcgaagggtttga
